United States Patent Application Publication US 2007/0161031 A1 - sequence listing, part 26

SEQ ID NO: 32676 - DNA, 2300 bp, Homo sapien
gactctcaataaatgtagctctcctttattcctttctgtagaaccctacctgttactgtggagtttctgtcttaataatctcaagttccaatcatgacatcttagttaattaggtttaaattttagatatttattcataatgtattatctttcatgtaaatcaagtagtgtaatataaagtcttacattaaagtaatgtaaagtattacattgcttcagaaactttaaaacactatataatgtaaaataatattatttcttaagtaacttattttattagcaatgtactaggtatttcccttatctaacttaaattttaaagtgaattgataaagtcaaaagcaaatggacacacagaaaaagatttggaggcaaatcatctcacatcattggtaaatatagattgctgtaaatttctaggtatgttttaaaccctccttaggtgagcagtgactttttcacaattgaaatttatcttttgaaattatttctgttgaggatttaataatcaattgtgtgtgtatacatatatatgtaaaattagattctatttttatatagatttagggctatataaatctatatacaaagggctatattagtacaactgttattcatattttattcttggtaggttgtttttaatttttcaataactgtccattttgtctacatacttaaagcttagtattacaaaattgagttcatcagctttttctccaaacctattatttgtccttcactggtctctttttcagtcctgttggcagagccacaagttagtgtcagctttgactcgtccttctctctttacttctccacattcaccaaacactgtataatctagctcttattaaaaattcccaagtccatcacgttatttttgctgctgctgctgctgctgcaactgctgccaccaccatggctgttcaggctcatagtgattttcatctagagtgcatcacagcctctttaaaaatcgtttttcctttagtcttgacttgctccagttcttctttagatgttagaatattccttcaaaatgcaaatctggtcatgttagagacttggtaagttcattcacttagcagttttttgttctgtaagatgaatacacaattgtctaataagttcatatctgtatatcatgatgtcatctgcctttagacagtgaaattatggcttcctttaaagaacttaaaatgagtttaaaatagctatagctagtatatttttaggttggtttaaatcttattatttattttacagtgctgaagttttttgaccataatttagccaaaaagttggatcttaattggttcaagctatttattgatggtctgagatttagttattttagtttgataaaatgtacagtaatgtagtttaaagacaatgactggatattctaattggatgtaaatattcagtcacataattaaggctagtgtatattcaagtgtataggtgaaaatatataaattatttatatggaagagattttgtaaaaagaaaccttacttgttatgtctcctgcaactttttttcccaatcacttgggagttcagatgatgttaactgggtacttttatggttatgtaagactgtctgcttcttaattagtatctattacaatggagttgagagaggcaccaagctactaaaggaataagtagttcaatttgtaggtaggaaaatgaaatttttctgccatcagtgtgtttttgcagaaagaaaagaaaactgatttacatactaataggtattaattgatctgcttattagtattaatttattaattgatttatttattatatgttgacattctctttgaagatatggtacttctataatccttttcaactgattacatctacttttttatctcttctttaggttttcgaaaaataagtttagatgaccttcggaaggcatatatcgtcaaggatgttcagcagtacattcttcatcgtttagatcaagaagaagctttgcgacaacacctcacaaaagaaactgcagagatgttaaatcaactgcacattaaaagcagtggatgctttctttacctagaacgagttttagatggagttgtagaaaattttattatgttaagagaaattcgtgacatcccaggaactctaaatggtttatatctctggctgtgccaaagactttttgtaagaaaacaatttgcaaaggttcagcctattttgaatgtgattcttgcagcctgccgacctttgaccataacggaattatatcacgcagtatggaccaaaaacatgtcgttaactttg

SEQ ID NO: 32677 - DNA, 2300 bp, Homo sapien
ggagagcgcggtgggggaggggaaggacgcggaggcggagccggcgggcaaagaaaggccgagcggcggggcgggggcgggggcgggggcggggtctgggctgggcgggcggggcggagccggccggccgggggctgcctgagacagttactgccctgacggcggcggcggcggcggttggccggtgggggctggggcgagcacgaccgattctgctgggaaagctggaactggcagccgccgggggccaagaggaggatccggagctgggagcgtgccccgggcccggcggaggaggcggctgcagttggagtggagtcttgggagcgctgctggcagcgacttctcagcgaagcaagtgtctgagactgagagtccctaacagcggcagcggcggccacggcggcggctggggccgaggtaaccggggggcggcggcggcggtggaagcgaggcccctccctcgggttggaagctgggaggccgaggccgtggcttggacctgacccaaccacccaccctctccggcctcgagccccagatttgccctcttccctcgcaccgccgtcggccgggtgggagcgggagcggggcatggggcgggagcgcagaggcggaagccgaccgggaggcgacccctcgtctgggattggcaaggacctcagtcaccccctcccccttcaaaagacacaccccaatctcggtgcggggcggggtgcagaggcgctcccagcctctggaagggcagacctcggtgtggaggctgcaccttcgctcgtggcctctctgaggtggctcccctgtggctcctctgggcggttccaacccaaggtggtgcccggcgctgggaatcccggagttccttttgtctgtcagctgaaactggaggccggacctgtgggcagacacccaccagcaccgaagcactctactctttatccctttcctgtcttggaaggaatttctctctagcagccttttctccggccagactggtagattttatccctgacctccatccttggcccagaggaaggaaggattcacattttacttgtgtttgctttatcattcttataagaacagtcatcccccatcgtttttgttttttttttttaaaccgtttcccatccagctgcaaccctggtaatcttcccctagatttttgcacattatcaacaaagaagtgtggctggaggagtagacagtccttgactgactggactgtgtaagttaatagagcttccttagctggcgctgttctaccagtctactgtgaatgagcgttttgcctggagttaagggtgttactgtatgtgcgtaaagtttctccccccctcctttgctatggtgaagttgcaaaaatcttgggtaacttgattaaaatgtggctgtttgggaagcataacaatgaggaagaaaaatgcagaagggagaatgtgattatttcagtggtttttgtccaactttttgaaagtgccaaaggtgaagtacgtggatttttgagattacgttaactggtacactgcaacctttattgtccttaataagtttttaacatatgatattttgcactgaggtatttttgtttgttttattttagttacttgtggaaattgttgattacccggacgtcttaaaaccaagaaacctgtgaacaggttcattaagaatctgctgtcttgaaaaatgcatattatgaatgctttgaattaagaaggtgttaacagtggttgtcatttctgccacataagagactataatctgaaacagttcctggcagttgcccagatgcctgaaactggcacgatctagtactcttgagtgatcatccttcaacgagaaatacagagctacttacatactgtacctcataccgtataaatgtaatctctctgatgccatttaatgcagtggacctcttttcagaatctaattgtcagatgcagaattaacacttggaatctggagaagcattttgtacaaattgaaagattgggttttttctttagttttccacatgtattgtctcatctctgttcttgaaacatccacaatcacataaactccagttataaccatggagttatgtgactcattaaaatttaggaaaagtgttgctgagctgtggaatcaggcgtttctccctcagttcaacaactaatacatagactgctgatcaagaataaggaaccaaataaagtcatgcacgttctgttgacagaggaactctgtggctgttgaattttactgtaactagttactctgtcttcagagtcaacttaatatacaagttatgt

SEQ ID NO: 32678 - DNA, 2300 bp, Homo sapien
catctttatatgccagtagaatgcctatgttattattacatttgctgaatatgggactttaataaaaatgtaaaaatgacctggatttgcttaaaaacagaaatatttctagaggagaatttacatgctagacatggataagttgtcagaatgagcaggacacattattgctcttggaatctcagaatatagaagtctctaatttaagtaatataaatgatcttcagtatcctgaagatatttgcaattacctatgttggtaatatataaacttaaatcagagctacaaaatactattattgaaataaatatttctgacaaaactgttacttgcttgtatttaaaagcaatcttgatggcattatcttaatatctttagagataacacttgtgaactctaaacattatttttagtgcaaagtttgtcataatttatgtggtttaagtgacaatattacatgagacaattaattttggagtgtcagttccacaaatccaaaaagtcaataaagtaaataattatttttgccactaaacaaaacaaaaaattaagcactatttgccttgatgcatcaggtgttactattttatagtttgtacagtttctgtctatcctgccaactatttaaatgtaagccattctgaaaatgggtatttatatgttgcatcttttaagaaaaagaaatagctttttgtatacgttttaatagtaatcactttcactgatatttacagagaatttaactatagtttctttagttgtaatacatacctattgtctttctgctgaatgtctgttttccagtggcattgataagacgaactctcacagattattttatcttaatataaatataaaagaacctaaaaataggcaagaagtgaataaaatgttttttaaagtagcccatcaaatattattttcatcagaaattattttcttgttgacataaaatgcatattttttatgaaagatcattctctctgtgcaaagatcagagacattgtgtcttaggcacatcattcagcttgctccacagccctggctgtctccactactctggaaaaatcagtgccctcgagtaggaggcttaacattgtttttcttagataaatcacttgacatttcagtgccttaattttgactctctgtaaaataacagaaatggaatggaaatggacttgatgatatttaacattcctacaaaaagtattagtatgttgacttgcaaatgaatggatttctgaactttcagtgtactacaaatcctacggtctcccaaaagaaaacaaaagattgtttttcttctttatttgagaaccattttatgtagattgcaggaaggttgtgaattaaaatatgtttagattttttcattccgttcattaagaaacatttgatttaagctgcagagaggatatgcatttaagaatatgtttagaattgtggttgaggtggcaaccaccatgcaattatcagtttattaacaggggaatgaactcataatggactttgctattttagtcatttcctttaacttgaatataatcttctactttcataatatcaatttaaattggggaaatagcatgttttatcattagatccacaaatatataatggtttgatattagcgattgttaggtaatgattgttccttagttatgtagttgtatgctgaaacatttaaaaaattaatccccatgtataataacattcttgatgtagagcaaaataaaatgatagactgcatattataaaaaaaagagaaaagcattatattattttatgcactattcccacagaaatattttttagttttaaaatatccatttgacccttcagcaagctgaataccagggattttattccttcagcataaagtaatttggtaacaatatttaaaggcatatttctaacttaaattttacttttataaaattaccaaaagacagatcatttgtgaactaattggttattagctcctttaatctcagtcatgtgtttgtctctaaataaaattatttcatttaccagagttttactgctcagggctcaggtgactcagtcaagaaagtcattcttgtgaagctacctaaatggtaacaacggtagtggcagtgggtgataccttagctcaaccattagctgcagctgaagtgtttattgtaagtcaagcacagatctaccaactacatttcttctaattgtagcagatgaaaccacacacatttttaaaggaccagatatctaagcacaaaggtcaacatttggtaggcatgcagaaaacatggaagtg

SEQ ID NO: 32679 - DNA, 2300 bp, Homo sapien
tccctactgttttggaaaatgccccaagtggaacaacagttatccacctaaatgcaacagatgctgactctggaacaaatgctgtgattgcgtatactgtacagtcatctgacagtgacctctttgtcattgaccctaacacaggagtcataaccactcaaggcttcttggattttgaaaccaagcagagctaccatcttactgtgaaagccttcaatgtccccgatgaggaaaggtgtagctttgccactgttaatatacaattaaaagggacaaatgaatatgtgccccgttttgtttccaaactttactattttgaaatctcagaagcagctcctaaaggtactattgttggagaagtgtttgctagcgaccgtgatttgggcactgatggggaggtacactatttgatttttggtaatagtcgaaagaagggtttccagatcaataagaagactggacagatttatgtttctggaattcttgatcgagaaaaagaagaaagggtgtctttgaaggtattggccaagaactttggcagcattagaggtgcagatatagatgaggtcactgtaaatgtcaccgtgcttgatgcaaatgacccacccatttttactctaaacatctacagtgtgcagatcagtgaaggggtcccaataggaactcatgtgacctttgtcagtgcctttgactcagactccatccccagctggagcaggttttcttacttcatcggatcagggaatgaaaatggtgccttttctattaatccgcagacaggacagatcaccgttactgcagaattagatcgagaaacccttcccatctataatctctcagttttggctgttgattcagggaccccctcagctacaggtagtgcctctttattagtcaccctggaagatataaatgataacgggcccatgctgactgtcagtgaaggagaagtcatggaaaacaaacggccaggcactttggtgatgacccttcagtccactgaccctgatctccctccaaatcaaggtccctttacttattacttgctgagcacaggtcctgccaccagttatttcagtctgagcactgctggagttctgagcacaaccagagagattgacagagagcagattgcagacttctatctgtctgtggttaccaaggattctggtgttcctcaaatgtcttccacaggaactgtgcatatcacagttatagaccaaaatgacaatccttcacagtctcggacggtggagatatttgttaattattatggtaacttgtttcccggtgggattttaggctctgtgaagccacaggatccagatgtgttagacagcttccactgctcccttacttcaggagttaccagcctcttcagtattccagggggtacttgtgatctgaattcccagccaaggtccacagatggcacgtttgatctgactgtccttagcaatgatggagttcacagcacagtcacgagcaacatccgagttttctttgctggattttccaatgccacagtggataacagcatcttacttcgtctcggcgtaccaacagtaaaggacttcttgaccaaccactatcttcattttttacgcattgccagctcacagctgacaggcttagggactgctgtgcaactgtacagtgcatatgaagagaacaatagaacgtttcttttggcagctgtgaagcgaaatcataatcagtatgtgaatcccagtggcgtagccaccttctttgaaagcatcaaagagatccttctccggcagagtggagtaaaggtggaatctgtggatcatgactcctgtgtgcatggcccatgtcagaatggagggagctgtctacgaagattggctgtgagctccgtattaaaaagccgtgagagtcttccagtcatcatcgtggcaaatgaacctctgcagcctttcttatgcaagtgtctgccaggatatgcgggtagctggtgtgaaatagatatagatgaatgtcttccatcaccttgccacagtggtggaacctgtcacaatttagtgggaggattttcatgcagctgcccagatggcttcactggtagggcgtgtgagagagatatcaatgagtgcctgcagagtccttgcaagaatggtgccatctgccagaattttccaggaagcttcaactgtgtttgcaaaactggatacacaggtatgacaacgtttgtacttttctcactaagactttagccatgtcaagtatattgaaacgaaataattttatcattttccaatgattttcatataaatgagcat

SEQ ID NO: 32680 - DNA, 2300 bp, Homo sapien
aagaaagacatctgcaataatgttacatttgactgtatactttcaggagataagaaagtcacaatggtaactgtggcaaaatcattttaggcagagaaaaaagcaaaatctcttagacaataacttcttggcctattggaggagtagcaggagacttaatgtgcccagagattagagagattatgaggggaagtggtgagaactgaagtcagaaatgtatcagaggaccagatggtgcaagcctctgtaggcgtctgtaagggtattagcttctatgctggagtgaagtgggaagccattagaggattttgatcagaaaagcggtataaatttacatacattttaaaacaatcattctggctactctgtaagaataacctgtggtgacagtggaaataaggagactggtcatattgtaattattagtcaatagatgacagtggcttggatcacattggtaggggtagaggtagtgagaagctatcagagttttgacaaattttaatagtaaagccaactggatttgatgacagattggatatgatgtgtaaggaaaatgcagaaatcaatatgactccaatgtttttggcacaagcaactggggaagtatgttagttcattctatgttgctgtaacataatatccaagactgggtaatttatagtgaacaaaaatattatttttcaaggctatagaggctgggaagtcaagattgaaggacccacatctactgagagcctttttgctgtgtcatcaaatggcagaaagcagaagggcaagagaacaggtgcgcatgagagagaaagaagggaaagaaagtggggcagactcatccttttatcaggaatctattcctgtgataactaactctctctaacaataatggcattactccattcatgagggcaggaccctcatgattcaatcacctcttaaagctcccacctctcaagactattacattggagattacgtttccaacacatgacctttgggaaccatattcaaaccatagcagggagattatgataggaatatatttcagagagggtgagtgggtgtaggggaagtaagagtttacagtgtatatttatcctttgatatcagtagctacatattcatcatttgacaccaaaaagaggcaaagctaataattgtacaagggatattttgatgaagttggaaggagccagaatatatataaggatgtattgtagatttgatggtctaattcatctcaaacatacaaagtgaaatagatatgtctccctgattttttcagatactgtttgataggagcataagaggtgtggaaaattaaaacagtggacatgtagatatccataaggtattatacattacatagtatacatccatataccatttaatagtctgaataaatattggagtagactgcatttacctttaatgcctttgtaggaacttttagaagtcacatgttacattccattctgcaaaataaaatttagcttatgtattttctgtaacagacctcatctttcttttgtacttccacaccaatagatagtagggaaaactcacattttttatattagcaaaatattcctatgttattgtatctgctttctgttagttagtaaattaagccaaatgggaaagccagtatttttactttgactagctaaaaattataaaatactagtaaaacctgctactcaatataagaacatttttcttgttgctagttcatgaatatacagtgataatactgacaagattgagaaggactaaaagaggaaaaggaagagtgaaagaatagaaaaataaagcaagatggtaggtttcttagaataaattattttcatcttccatacatgcatcaatgtttattgagaatgaaccatttacagtacagatactcaaatattatgataaataaactagagccatttcctgctttcttagcactgagttattttgccagtaaatactaaggtaaatactaaggaggtaaataaagaattatatcagagatgattattatgaaaatataatttagtaagggtgatagaggaactgtaaggcagagaagaaattcttttagataagattgttagaggccgggcgcggtggctcacgcctgtaatcccagcactttgggaggccgaggcgggcggatcacgacgtcaggagatcgagaccatcccggctaaaacggtgaaaccccgtctctactaaaactacaaaaaatagccgggcgtagtggcgggcgcctgtagtcctagctacttgggaggctgaggcaggagaatggcgtg

SEQ ID NO: 32681 - DNA, 2300 bp, Homo sapien
aatgtgccttggcagcaccgaggtccgctcctctgggaggtgccccacgtgatcagtgagcctgcgcagcacggtctttccagtgcctgagccgcctcacgcaaatcctgccggggtgtaaattccttccaagtccattaatgaggcttcttggttcccctcctcgacgtcaggctttcccctgtaatgtggtccaaaatccctccactttttatcacctatgccacctgccgaggtttgcccctttgggagaagcctggacaagcttgtctgaccattcgctttgcttacgtggtcttacctaggcttccttacaaccattttcctcctccccaggtagtgtttccttctcagcaatcataatggtggactggctgcaaggaaactagtttgggggtttgaaaaaacaggtgtttaatattttaagagacccccatcacatatattctacttccataatcccatccccaaaatattattttttaagtgtaatgaaggaaaacctggagtcattctgaaagtcactgacatccaagttattctcagttactgcctgcaagataactttcctggaaatatgttccattttggattttcaaagaacactttgctagtcctgcttaggccaatagagtatgacgaagacctctgtgtacccaataatgtataggaagtgcttagcctgcatacatattgataataatgttagctattattaccatgttgcagaaagggggcagaagcaggttttatctgattgccaaagtaggaaaagaattgatatttaaagtagtgagccccatatctgcatgggaccattaagaggtaaacaggccactaataccagaggcaatttcagtgctaactcagtctaggagacaaagagcacagccatcctcgcccttatttcactttccatcagtcatactgtaatactgatatagaggggatgacttgccaccactgttaaaaatcttctaccttacagtgaaaggaatgaacctttcagatacagaaacatgacttgaacccaacatatgtacagtaagatggtatattgcaaggtttggatatttttagaaaatgtcactctagaaaaaaagatagtaaatgtacacacagttggagacatagagccctacagcctgttagattaattattgagagaaagaaggaagggaggaattaaataatctagccaacataaactctgaattccgggaatgagggaacagagcaggtgaaccgttgtggaagatgaatttggttagtaagtaaaaaaatcaatccatctggatgactgatttgctgatttttttaagggaggggttctccctatgttggccaatctagactcaaatttctgggttcaaggtcctcccaacactcctgcctcagcctcccatgtaaccaggactacagtgattttttatagattggcttccagagaggaggaggaggagaaattaagagtctttttatcttacctttttttttttaagggaagaacccagcattgggttgttaaaaactttataagacccctcctcaattaaaccaactccacttaataaggctagagcaaactcaaacttaatgattcgcagatatctttcctcaacgatctactacaaataccaaatatataaaagagaaaatttggtaaatcatttgccagtttaacaaattaaaaccagcaactaccaccttcaaatgttcttgggtttttatgttgtgtaaatggaaatcatagtttaaattattgttaaagatgctacttgatacactactcagtatgtgagtccttcaggaagttattttgaaaggtaaaacaattctgttaaccagttttcctaacttgaacccaggcttagcagtcaagtggaaaatatcatcatgggctcaagaagagttttctttttagcacaatatttaacagagtaaaaataagtatgttattgaagctatttcaggtacattctaaagtacatgctaaaggcccaggtcactttgtgggggaagaatctattatataatggttaacagtgctttaaaatcactataatgtggagccaaaatggccgaatagaaacagctccagtctacagctcccagcgtgagcgacacagaagacaaatgatatctgcatttccaactgaggtaccgggtgcatttcactggggattgtcagagagtgggtgcaggacagtgggtgcagcacacccagcatgagctgaagcagggcgaggcatcgcctcacccgggaagcgcaaggggtcagggaattccatttcctagcc

SEQ ID NO: 32682 - DNA, 2300 bp, Homo sapien
atactatcctggccatttaagtttaatacacttgaaaaacagcaagtgcctttgtgctgcttcttaaaagcaacagatgaagctcccatgtgaaagacaccctccctatactagaaaaatgtaacattcttattctcaagggcatagaagtgaaaccaagagaattctgtacagaccttgttaaaataacttatcttttaagcttcccaatttagtttagttgcttcttcacaactaactattctttgtccaatccagtatataagttaactgactctaactgcttctttgggtcttcatttctttatgagggctcccctgccatgtaaaacttggattctagagcaaggagagaggtctgtctgccaggctcaaatttgcgaggtgggagtgggttccagcctattcagggaatggccagttggcctgtatagatgaagcacagaactgagagaaaatttagggcagttccccaagtttgctgaatcacagggggcacttgtttgaaatagagatttccaggcccctccactggagattctgatcctgttgatgtggagcagggcctcaacatctgtataacaagttccagttgcttttcttttgttaatctattttaggtaagtttaattctcaggcccagctgggaccctaagaagatggaggtagagtttttctgcccctgcaacagctacaattcaggttcctttgagttctccatgcatatacccataccggccatgtgatgactcatctcccattactctttctctgttggaaccatgccataataacaatataaattaatacttcctctaagaaatttgtcatggccccacgtatactactttggttttttctggatattccattagaaccttgtatttattgtaatacttatcactatgttataattgcccattagagaatccccagcacccagccttttagatcataaaataacattatatcctttttttacacgctgcaacatgaacatttcccccatgctttactctttgaacacattctagttaaaatcataatcatcatattttatatatatttaacttttcccccattatttgacattttaagattgctttcagcttttcacttttacaaattttataaatttgcatcctttctcagagtagatatctaatagttgaattactgggttctgagggaggaaatttcatgtaatggttattgacttaggttcatttcttggttgactttgttgactgctagccatgtaaccattagtaagatgcataacttctctaaagcttagtttccttatttaatatagagaaaatatttacttcatagtatgtgaatgctcagcattgtatatgaataaagtgagcagagccaaggctgactctcaatcaatgctagctgttatttttgtacttaaaaaatacttgatataggtattcataaataacaggtagattttacctgtttacacttccaactttaataatgagaacacttaattagattataaaattttgagttagaaaatgaacatgaagttgattccacaggattgccactcatttgtggcactctacaatacccacttgggataaccgtgaaaatgtttgcaattgcgaaacaatatgaaacccataaaacaatggagcgtatttacattaacacctagatcgcgttgcttaaaagcgtccattacttgcacggatgaggtcctaaggaaaggtaaagtgcggtttccttcacctcgaaggaaatccaggctgaccgacagctgttaggcattagaaacacaggacaaagagcaaactggatatccagcactggaagaaaaaggtgagaagcccagtgcatctccgcctgttttaacaggttatgctgctctaaggaattgcgttccggagagcgtaagcggtgaagttttagctatttctatccttccaactgagaagccctcctggaagtttcagcccattggctgctttctgttctccctgtttcttctgggaagcttctccgtctccctggcaacgcgacctgccaccaattgcagctaaggattggtggtcacatggcctctgccccttcccaagcagaggcaacatggcggccttagcaagctatagctgcgagatttgaattactccactcgtagctattgcattcctgacgatggcctctgtggcttcgtgcgattcgcgtccgagctcagacgagctccctggagacccctcttcacaagaagaagatgaggactatgattttgaagatcgggtcagcgactcgggttcatattc

SEQ ID NO: 32683 - DNA, 2300 bp, Homo sapien
ttgatatatttctgtaggggcaaatgtaagagtatttcttcataacagatacagaaaagagaaagacttaaaatacatttttgtgtttttctttgcttataagaccatcaaattcactatcctgaaatatgcttctttctcaaaaaaatttctttagtaaaaaatttatgcactattatttaaaaagacatacagtagagacggtattgactggttttgttcgtgtccttccatatattttctatacaataaaaatatacatactccctttttaataaaagtatgctgttatgcatatttttctgcttcttgcgtttttaaccttcttgattggaaggcagaaatttgaggtaacatttaacataaaattgggtatgggaaatcgatttttctcttagtgacttttgttcttgtatttctgagggctaaaatggtatctttatgtttaaagccttaggagtatatcagtacaaaaatccaaaggcagtttatacatttttccaaaccatagtgatatcagctctctgtttatctatagtggatctttgttctcattgttcttacagtatcatgaaggaattttctgtgattgtgtcatctgggaaaattatctagtttgcagtgttctctagaggaactgctgaggaggcacatccctgtcaaacctgattgcttaccaacattttccagataagtgagctacaaagagctgggcatccataaatagtgcttttaccttttactagtaaggaaagttttaaccaatgaagagtaagaatgtggttatgaactgcctctttaagtttactcaacagaagaaaactttgccatattttgccctaattgaagctttctgttttcataaaaccagagattatcaaagattaaatttttgcaatgattttcatacatataaatagtccattggagttgtcctacaaattccattagagtagactggggacagagggacttaatttctctttcatcttgaaatttatcttccattgatagtggaagtatctttttgatggcagcaaatttaactcttttctacttcaagtgagaatttaaagagcaaactacgataataaatgtgaagatccattgagttcttaaaaccaagaagcacagtgaatccaggatgttattaatagacattttgtaataaatttttataacaactttttttctgattatgaaagatattaagggccaattgtgaaaaattacaagaagaccaaaaagtgtagagacttgattatctttttaaagttgtgagctggttaattctctatgagccacagaaaactgactatatactaacagtttaacgttgtgaccaaattaaagctataacaatttccttcaccattccccactaattcatcagcaagtcctgatcagtctgtcttcaaaatctccaatctgtccatttctctttatctttattattgccctgtccagccactgctatctctcacacactacagtagcctcctaactggtctccttcccttcattcttgccacttgaactaattttcatatagcagcgtgatctttctacattattatctggttcctacctacccctctgacttcagatatcaaaccacacgtgcctcctttgcactgtattgcaaacaccctggcaaagcttttccccagcccagggcttttgtactttttcttcttgctggatctttctgacattggaatatcagctcaaatgccctttctcagagattcttctccaaccattcaacctaaaatagccaatctgtcacaccacccattcatattgtgctattttctgcatagtcctttatatgaatttgtgttttttactttttgttcatttgctgtctttctccattagaacataagcttcatgggagctcattgtcttttgtcttgatatttttactgccatacctccagcaatgagaatagtgcctggaatgtagtagtcactcaaatatttgttagatgaatcagcaaataattattttgatatgccgatagcatatgtacctgctattttgtcattcagtgagctgttccaataaatgcttgcagtcaatgctgtgttacttttatatggctaaaaccaagtatttcggttttttctgtcattttgttttttgagttctttaatgttataccttcagtagtaaagaggggaggaaataacttatgcttattatgtacttactgtttaccagtaaataataagcataataagaacttatgcttgttatgttctaggcattctgcatgtgagctagattgtattaa

SEQ ID NO: 32684 - DNA, 2300 bp, Homo sapien
atttctggcagaattcagctgtagatccatctggtcctgggctttttttggttggtagcctattaattactgcctcaatttcagaacttgttattggtctattcagtgattcaacttcttcctggttcagtcttgggagggtgtatgtgtccaggaatttatccatttcttctagattttcgagtttatttgcaccgagctgttatagtattgtctgatggttgtttatatttccatgggatcagtggtaatatcccctttatcattttttattgtgtctatttggttcttctctcttttcttctttattagtctagctaatagtctattttgttaatattttcaaaaaaaagcagcccctggattcatttattttttgaagggtttttcatgtctctagctccttcatttccactctgattttggttactttttgtcttctgctggcttttgggtttgtttgctcttggttcactagttcttttagttgtgatactagggtgtcgatttgagatctttctagctttttgatgtgggcatttagtgctataaatttccctcttaacactgctttagctatgccccagagattctggtacattgtctctttgttttcattggtttcaaagaacttcttgatttctctcttaatttcattatttacccaggagtcattcaggagcaggttgttcaatttccacgtagttttgtggttttgagtgactttcttactcttgagttccaatttgattgcgctgtgatctgagagactgtttgttattacttcagttctttagcatttgctgaggagtgctttacttctaattgtgtgatcaattttagagtaagtaccatgtggcactgagaagaatatatattctgttgtttgggggtggaaagatgtctagatatttatcaggtcccacttgatccagagctgaggtcaagtcctgaataactttgttaattttctgtctcgatgatctaatattgacagtggggtgttaaagtctcccactattattgtgtggaaatctaagtctctttttgggtctctaagaacttgttttatgaatctgagtgctcctatattaggtgcatatatatttaggatagttagctcttcttgttgaattgacccctttaccagtatgtaatgcctttgtcttttttttaatctttattcgtttaaagtctttgtcagaaactaggattgcagcctctcctttttctgttttccttttgcttggtagattttccttcatccttttattttgagtctatgtgtgtccttgcatgtgagatgggtctcttgaatacagcacactgatagagtttgactctatccagcttgccactctgcgtcttttatttggggcatttagtgcatttacatttaaggttaatattgttatgtgtgaattttatcctgacatcatgatgctagttgattattttgcagacttgtttatgtttttgcttcatagtgttactgatctgtgtatttcaatgtgttttttgtagcggctggtaacagtttttcctttccatattgagtgcttccttcaggagcacttgcaaggcaggcctggtggtgacgaattccctcagcatttgcttgtctgaaaaagattttatttctccttcacttatgaagcttagttcagccagatatgaaattctaggttggaaattctttcctttaagaatgttgaaaattggcccccaacctcttccagcttataaggtttctgctgagaggtctgctgttagtctgatgggcttccctttataagtgacctggcctatctctctgactgcccttaacattttttccttcatttcagtcttggagaatctgatgattatgtgtcttggggttgatctcatggagtattgtattggggttctctggatttcctgaatttgaatgttggcctgtcttgctaggttggggaagttttcctggatgatatccagaagtgtgttttccaacttggttccattcttctgtctctttcaggtatatctaccagtcgtaggttcagtcttttaacataatcccatagttctcagaggtttcattcattccttttcattcttttttctctaatcttgtctgcctgccttatttcagcaagatagtcttcaaactctgatatcctttcttccacttagtctatttggctatggatacttgtgtttccattataaagttctcatgtttttcagctccatcagatcatttacgttcctctccaaactggttattctgtttaacagctcctataatgttttat

SEQ ID NO: 32685 - DNA, 2300 bp, Homo sapien
tccagcctgggcaacagagcgagactctgtctcaaaaaaaaaggttgaataagccaccatggaaaggaagtagcaccaaacatatgatatcagtaggacttgccaactgattttatgtgaggtaatcaaaatattgacaacattcctggtctggaatccttctgacctaaatggttttttactagtgacaagtactagtagaagggttataacacataagacaaaggaaaaattagaacctaacattcaaaaaaagctaaaaactcatttcacattttatagatgtgttgtaaggctctgcaggtcctacagagtaagaggtgataagatgggatctccatttatttcaaaacaccaaacgagctgtaaaaagggatatattaaatgctactatagaaggatctccacgatatattaagtgaaaaaagtgaggtgaaagaaaaagacaaatgttatgtacaggctagacgtacctctactgagtatttttgccgaaagaagtcaaacctgaatctgccaacctcctctaaatgagttctcaaagtgcagtttagaaaacccctctgtgtcacggagacaggaacaccatgaagtcaaaggtattttcttaaatgatactattatttgcctttttcactttcattctgtcctgaataaacagtggagttttccagtggctacatgtatgatatcacaacagactgaatgcaaaagcagtaatgtgaatctagctgtcttttattaaatcagacattagagattcaaaaatataaaacaatactatttttctactacattttttatttaaaagtcgtacttatgctatcctgtaatggattatttttattttaaatgaattaaatatttttaaatcgtgttttaatttctgagtggtaaatgccaatatacataataaaaacggaagcttcattgtgtcttcaataattttttttaagagacagggtcctgctctgttgcccaggctggagcacagtggtgagataataactcactgcagcctacaactccagggctcaagcatttctcctgtcttagcctcctaagtagctatacttaggactacaggcttgtgcagccacgcccagctatttttttttttgtaaaggaggggtctcactatgttgcccaggctggacttggcccaaagttttgggattactggtacctggccttcaataatttttcagagtgaaaaagaggggtcctgcaatcgaaaagtttgtgaactactcttctagataggtcattggccctcaaccctagaattagaattacttcaaacactagaattacctggagaatttaaatactgatgccaggcctcacttctagacgttctgatttaatgtgcagggcctaatcccaagcatcaatttgaaaaacaaaacaaaacacccctcatccccttgaatgtgcagtctggattgagaaccactgctctggatattatcaatttaaatacaatatgaaaaagaggaacatgtattatgctatgggggcacaatcatcaaaacgacacagaaagtgactagacaaaggatccctgcttaattaaaggaacagattaaagcaatttccaagggaatttgaagcattaacaggcacatagggtgaaatttaaggggaacatcacttgaatcacacaacaggtaagactgtcttttttaagatgccaagaaaggtcaaaggaaccatctctggtcaaaaaaaacgtaacggattaaagcgattaagaaagtgaagggggtaacactaggaactaaaactaaattctgttaatctcacaccgctggtttactgctctggcctagtctcagctactaaatttcttcacacagaactggctctcctcggcccctcccctcgcctttcctgctcaatgctcaccgcctccggacccctccctcatcagaaagcccaggctccgctcgtagaagtgcgcaggcgtcaccgcgcatccaggagccacgtgtcaggagtcacgtgtcaggtgtcacgtgtcaggcgtcacgtggctggaggccgttggagcgcctgcgcagcttttccgcacgcgcctcgccggcgcgcggctctctcagcgtcccaagagccactttctcgccagtacgatgctgcagcggttttccggttttccgcttcccttcatcgtagctcccgtactcatttttagccactgctgccggtttttatatccttctccatcatgcatcgtgagcctgcgaaaaagaaggcagaaaagcggctgtttgacgcctcatccttcgggaaggaccttc

SEQ ID NO: 32686 - DNA, 2300 bp, Homo sapien
tcaggatcattcagcagctaagcatagctagcatttattgaccgtttggtgccagggactgatgcagtgcttacattatttaatcataaaaacagcccagtaggcatatttgtcctcattttaacagactgaacctgtggcttggagcattaagtaacttgccaaacgttatacaggtagtaagttaggcaagcctggtactacaacccaaatctgtgtgaccccaaagcccgtcatggttttaaccactgggtactctcacgtcctgccagtaattgtaaggaacgtgatgataacaccactttgctcctggcctcaacttcctttttactttgatattttaagtggtatttttaataggaaaaaaaaaaaacattcttacaccctcaagttgtatagacaacatggataaactaatggaattaagataaattaattgtactaggagaatttcaggatattctggaataaatctagatagtgatggccgatgtcagaagaggtgtgtgaggagaactggtggaagtcacaggcgcccagcaggaccagggcccagggttcagtcgcagggcaacgcccaatccctgttctgctcacgagctgcccgctgggacgccgagttctgcggtgtctcagagcgcagcttcacccaggggctccacgtctcctgagtgctcatgaagggaagagaggcctgattgatttcttcaatgtagagaccagagcccaagcaatactgtacaatccagttgcctcagtattgcccttgaaaatggatttcacgttcattctaacagcagcaggaactatagccacccttgctgctgctgctgctgtagcaacattattaatagtaaaaaatctaagttatttaaagaagtggacaactagggataatcagaatactaaagaatctagtaaacaaaacaaacaaacaaaaaaacacgcctgttttcaagatggataccaaaatggaacaggaaaacacacaaagaattggatgagaaggaacagagactagatgaagaggacggggaggaacagggaacagaccaaggactggcagagaaggaacagggcacacacgtaaaagtgaacgaaaagcaacaagacagccaaatttcttaagtgtaacataaaacttggttaattacagacaggcaacacatgccgatcaaaccaagagggagggcgctggaccacactgggctcttttttgaggaccacagggcagcggctggaggctaaagcacagacttggctggtgtgagtggcacacttaattaaggtcactttcctgtaaaactggtttccagagacaagggtcagcggcggggccagcatcttttagaaaggtgtgaggaaaggtacgtggagggaaagttgtcagtgtgatcttatttcttgacagaagtttgacttttgatatttcaaatcctgctgatgaaaaaagaaaaaaacctaacatgtgctcatcccgctttcgcacaagagtctgtcccgggctcggcagctcccccggggctggacagggcggagcggcggacgtcggacaatgcgcgccacctcacagagccgggcgcggcgggcctccagccacaaggggagggcgccgggctgcacatgggcccctcggggaggcgaggcctgcgggcgagcccttctgagggcagggggtgagggggcggcgcccgccagccaggacagcatcctgccgccgtgacaagcacgcctccggttgccaaaacaacccaaaaatgtgcctcaaaacacgttcgcaaagccccgggccggccggtcgcctgcctctcacctagcccgaccgcccgacgtcctactgccgagcgagggcgagcaagccaatgtgcctagcctcctttccccgatcctccccgccccgccttcccgcttctcccgcccccggatagctcagcagcctccattttccagatctttctcgaacccgcagcttcttgggcagccgttgcccgagtgctgacggaagcggccgaagtccgggcccggagctggctcgggcgcggagcggaggctcgcgcgcctcccgggcagccgagcgcgcaggcgcaggtcccagtaaccgccggttggaggcggccgaaccgcagtagggaaagacccaggctgcgggacgcggtgcaggctgcggcgctgacggcctctgctccttccgcgggtttccgactccctgccctagattttctgcttagcgacttggggtcccctctcgtttgcttctggtaggagtcgcaatcccagcagcaatagcccagaagaggaca

SEQ ID NO: 32687 - DNA, 2300 bp, Homo sapien
cactccagcctgggcaacagaacaagactccgtctcaaaaaaaaaacaaaaattcttccaaaaaactagaaagagcacagcaaagaatttggctattgaaataacagataaacttgattttgaaaaggataacaaggctgggcacagtgactcacacctgtaatcctagcactttgagaggctaagaagggaggatcacttgaacccaggagttcaagaccagcctgagaaacatagtgagaccctgtctctaaaaaaataaaaacttagcaaggcatggtggtgcacacctgtagtcctagctactcaggaggctgaggtggaggatcacttaagcctgagaggtcaaggttgcaatgagccataatcataccactgcactccagcctgggcaacagagtgaggccctgtctcaaacacataaaaggcagtggcccacgcctgtaatcccagcactttgggaggccaaggcgggcagatcacgaggtcaggagatcaagaccatcctggctaacacggtgaaaccccgtctctactaaaaatacaaaaaattagctgggcatggtggcgggcgccggtagtcccagctactcaggaggctgaggcaggagaatggtgtgaacccaggaggcggaggttgcagtgagccgagatcgcgccactgcactccagcctgggcaacagagcaagactccatctcaaaaacaaaacaaaacaaaaacataaaaggaaaacaagacatttactaagaagagctaaaggaaagaattaaaggtttcttatgcttttttgggggggggtgtcaatttttagtatattaagagctaaaagaagtaaaggtttcttagactttttttgggagggaggcgtcaatttttagtatatttgtgattaattccatgatagaagtctttaaagagaattttggggctcaataatttaacataatgtcagtgttaaagcacttaatccaaattagcccatctttaactgttttgaaaaatctatatttattaaaggtagtagacatttgaatatagtaatcaaattaactgattttgttttcaccctaaatacatacaaccattcctccactttcataaatttgacaaataataagcctctcccattaggattttctgttttatagtaaatagttggtatttggtagtccacaattaaagtcattgcattaattttacaaattatagatttagaaatgattcttaagttattggtaaaatataactttctcagtttttaaaagtttacaaaatttttttttttgttttgagacagagtatggctttgttacccaggctggattgcaatggggtgatctaggctcactgcagcctccaccacctgagttcaagcgatttttctgcctcaacctctcctgagtagctgggactacaggtgcatgacaccacacccagctaatttttgtatttttatagagatggagttttgccatgttggccagcctggtcttgaactcttgaactcctgacctcaggtaatccacccacctcagactcccaaagtgctgggattacaggcgtgagccaccatacccggccaaaaatttttgcttttaaagttaatgttattttgtggttaaacttctaaagttttgaactgtaagcagaattttgttttgtgatattttattgtataaactgttaatgagaggcacagctaattgtacatatcaatatacatttaaaatctggtaacactggttaaatagcccttgatgacttttcatgtggcatgagagggatatgcttataaagcttaattctgatattatcctcttactacctacagtatgttttgcaaaaatcagtccacttagcaaactaatctttgtaaagcagtcagtttcagaagatactttttatcaaaaaagatggcaggtttaacattataccttttggtttttgcccaacatttgatttaatctaaagcaagaatataaaataattttaagaagcatataatttcttttgataaaaagtaacaaaaatttaatgcagatcaaagaccaaggcttgtaaccaaaacaagcaaaaagaaactttagctgtttaactatcacctctctaatttaaaatgcatgaaaattaatactttgtttttgttttttttttggaaacagtctcactctgtcacccaggctggagggcacaatctctgctcactgcaacctccacctcctgggctcaagcctcaagcaattctcctgcctcagcctcccaagtagctgggattacaggaacccaccaccacgccca

SEQ ID NO: 32688 - DNA, 2300 bp, Homo sapien
gctcatctttttggcaaaattgtttctaatacatatggaaagagaacaattatcattttgtaactatcatagtaaagactagtttaggaaaaatcaataatactgctaaattgtgagagaggggtttgctgaggagcagaatatttgcaggaaattcaagtgtctcccccatagattgcttattagttgcaagtagaaaaccagcaatttatacagtggagaaactgggatcaaattaacatcactaatgagagacaaacaatatcacgtgcctccaaatgtggtctcttggaaagaatataacctcatgtatgtaatattacaatcaggaatacataacctgaatctaatcatgaggaaacacgagacaaacccaaagtagggaagattctgtaaaataactggcccttaacacacacacacacacacacacacactcctaagagtggtgacaatgtgttaatttgattgttgtaatcatttcacaatgtatatgaaatcatcatgctgtacaacttgaataaatacaatttttgtcaactatacctcagtaatactggaatgaacaaatgaacgaatgataaataattggcctgcactcttcaaaaatctcaatgtcacaaaaatacaaatgctgaggaactcttccatattaaaggaaattaaaaagatatggtaactaaatacggtatgtgatcctgtactagatctatactggaaggaaaaaatgttaaataaagacattactggaacaattgacaaatcggaatatgaactgtagattagattaaatataaatattgtatcaatgctaaatatccttaatttgataaacatacaagaggataccctggttcttaagaaattcacactttagaaataaggggtataagagcatagtgtatgtaacctattttagaatgattcataaaatacaaataataggcttatttatatatttatacatgtatattacacatgaagaatagtaaaaacaagtgtggcaaaatgttaagaattggttaatctgagtaaaggacaacaggagttctctattatttttacaacttttctgtaagcttaaaattatttgaaactaaaaagtttaaaaaaaaaaatgggccgggcatggaggctcacgcctgtattcctagcactttgggaagccgacgcaggcggatcacctgaggtcaggagttcgagaccagcctggccaacatggtgaaaccccgtctctactaaaaatacaaaaattagccagtcgtggtggcgcgtacctgtaaatcccagctacccgggagactgaggaaggagaatcgctggaacccaggagatggaggctgcagtgagccgagatcgagtcactgcactccagcctgggcgacagagcgagactccatctcaaaagaaaaaagaaaaagaaaaagaaatacacactaacatcaaggaaaagagctttcacttaataacagaagatctaagtttgtgcgctacttctgtttgttaaatatccttccttaagcatcacacttttctcacctgcaaaacaccatcccaaacttacagaggtctcttttgatccatacaaattatgtgtatgagagatctaactgtaaattattatacaaatgacattataatattaaatacttaggagtttgccaaaataaagaatggagttcgttttcttaaggtaccgtacacattaactacagttataacaaactacggaataagcggtagtggtgtaaacggtgttccttaaaggaaggtaatgttttttgccctgttccgtcaagtcttaaacgcttgacattttaaaatagttttaaaccctttccggaattagaagtggtatttcggaccgtgaagtaaccgatcagccataagtgtcccatctttaaggcctgctcttttacccgtcttgcagaagttcttccgagagtgggcccgagacagcctcccgcccgaactaaactctccgcagcgcttccggcccttggccccgaagtctagaaccctgggccggccgcaaaggaaggtctgccgcgcatgcgcgccccggcgcagcctatccggagcgatccatctcgttacgtcaccaccagcctagctcggacggcaagcggcgggagattttcaaaatgggagcccagaggcaccgcccaggcctcggaaggtgtcagggagaactttccgtggtttcagcgtcgtcgcctggagcggcggtttagagagccgagcctgatgggcgccaaggccggctggctgcttggagcgctgcctcgaagggactgcgt

SEQ ID NO: 32689 - DNA, 2300 bp, Homo sapien
tgttaaactatcaagaggttgtcaggcaattaggcagcaggtcattactaagaccgataccttcaagtatctattaaaaccatcattttgaaactgtgaaatctggaaagtgatcagctacaaagggccaaatatggaatgcagaagatacagaatgtggtggctttgtgtccgggattggtgggttcttggtctcactgacttcaagaatgaagctgcggaccctcgcggtgagtgttaacagctcttaaggtggcacgtctggagtttgttccttctgatgctcagatgtgttcagagtttcttccttctggtgggttcgtggtctcgctggctcaagagcgaagctgcagaccttcgtggtgagtgttacaactcttaaggcggcgcgtctggagttgttcgttcctccccgtggtctcgctggcttcaggagtgaaactgcagaccttcgcggtgagtgttacggctcataaaagccgtatggtcccaaagagtgagcagtagcaagatttatcgcaaagagcgaaaaaacaaagcttccacactgtggaaagggacctcagcgggttgccactactggtgggcagcctgcttttattctcttatctggccccacccacatcctgctgattggtagagccgagtagtctgttttgacagggcgctgattggtgcgtttacaatccctgagctagacacaaaggttctccacgtccccactagattaactagatacagagtgttgacagaaaggttctccaaggccccaccagagtagctagatacagagtgtcgactggtgcattcacaaaccctgagctagacacagggtgctgattggtgtgtttacaaaccttgagctagatacagagtgccgattggtgtagttacaatccctgagctagacataaacgttctccacgtctccaccagactcaggagcccagctggcttcgcccagtggatcccgcaccggggctgcaggtggagctgcctgccagtcccgcgccgtgcacccgcactcctcagcccttgggtggtcgatgggactaggcaccgtggagtagggagcggcgctcatcggggaggctcgggccgcacaggagcccacggagtgggtgggaggctcaggcatggcgggctgcaggtcccgagccctgccccgcgggaaggcagctaaggcccggcgagaaatcgagcgcagcgccagtgggctggcactgctgggggacccagcacaccctccgcagccgctggcccgggtgctaagcccctcattgcccggggccggcagggccggcctgctgctcccagtgcggggcccgccaagcccacgcccactcggaactccagctggcccgcaagcgcggcgcgcagccccggttcccgctcacgcctctcccaccacacctccctgcaagctgagggagccggctcccaccttggccagcccagaaaggggctcccacagtgcagcggtgggctgaagggctcctcaagtgccgccaaagtgggagcccaggcagaggaggcctggagagcgagcaagggctgtgaggactgccagcacgctgtcacctctcagcttgggtgctgcaacaggcaaagcagcagcctgggtttctccagccccgtcactcgaacccacgggctcatcaccgcacggtgcggccagacgccctttctcctacgttgggagcgaatctcctcggctcacacaacccagccaccggctcccaccgcgctggaacccctctggcagcgagggtttgtcccagtgcgggtgacgcccggaaaggaaccagtcccaacagcgcaggagactgaggggtccctccaccaggatccgctcacctgcttccaggtgtgtcgcctaagagcggctcctgttcactttcgttccgcaggccggccatagttacactccctacaaggcgtcttgcgcccaactctcgcgacacctgctttctcccatcccgggtggcgtgaagctggcaaaacaagcctgtaagtgcgcgtgcgcacctgacggtcagacgtaggcggaacgccccgaggtcataggcggggtcacgcggaaggccgggcagcgcagggcgaaaggaggctgtgtcctcagcctcctccctcggcacgcgcctcccatcctgacggggactgagagcccaggagagctcggggcgtgtccaaactgccgcgccgccctgctccgggtttgtcttcctccctccgtttctccttccgctgtatctagcatttcggttcctggaaaggttaccggagctgcgattggggct

SEQ ID NO: 32690 - DNA, 2300 bp, Homo sapien
gattgttgtaaggatgagatgaagtaattcaatgagcattcatccaacatatatttatctaggagccattctgcttactgctatactggttaaaaatccccttgtccactatatatgtgccatacattgctagcccccaggaattaaaaaagacaatataataaagcgacattatggcaagaaaatactaacttttctacctatgtgtctttttggaaccaataatacaaatctgacttgtttttgtgagctgttacaaatgaatctgcaagactgaatccaagtacaaaatatcaggtcttgatttagaagatatttctgaatagcacgtttcaaggtttttggttttttttttttttttgagacagaatctcactctgttgcccaggctggagtgcagtggcgtgatctcggctcactgcagcctccgcctcccgggttcaagggattctcctgcctcagcctcccgagtagctgggactataggcgcccgccaccacgcccggcttttttttttttttttttttttttttttttttttttgtatttttagtagagacggggtttcaccgtgttagccaggatggtctcgatctcctgacctcgtgatccgcccgccttggcctcccaaggtgctgggattacaggcatgaaccatcgcacccagaccgcacgtttcaagtttaggtgttcaccagtgaactgcgcctggctgatacacacaaggtcacaaatgacacaaagatcagaagtgatggcatataccatacatgactgtgtaactagtataggacctagcatagggtaaatgctcataaatattaatttaaaaaaattaagtttggtttccaactttgccacttccacacagagtgactctgggttaacttgtctggatcttaattttcagtaaactagcaatgtgtctgcttcgcctatctcataggatacttgtgatcaaatgaaattacatgacaatgtatctggcgctaataaaacggtaatttatgagacacagaatgactactgacgccagctagcctacaagcctaatagtagagataagatgttaatacataaccaccaagaaataaacatggagatctagtgaaaacccatgacatgttttctaaaaatgtcatcttccttgtgacgaaaggagctggtcattgctaggcaggtgctgtacctttttcaactcccacgtttcagcagcaggctctgctgagtgacattttgcaaggctgaggcccccgtaggcgcaggcgccgttggggtgcgcatccggggacctgcaggttacaagcagcagatcccaccttcagtcctggctctgacaagccctccaggtaaggcgcctttgcatttagccgagctagagaagagagctggaagccacctctacctttcacggggggaagggactgcccgcgcgctcgcccccattatctcagccctccgaagcgcgccacggactccagccttgtctctcacccccagcctcaccccgcgtccctgacccgcgagtctcccgcccagctccgcgtccccggtccctgcctccaggcgcgtacacggcgcgctaagaggcgcggggagctcttagcgcacctactacttaaccggaccggctacttactggccgccaggtggaagcctgcgatcgagctggccgggcctcccagcaccgccgctctccaggctccctttccaggactcaactttggtcccagccccaatcgcagctccggtaacctttccaggaaccgaaatgctagatacagcggaaggagaaacggagggaggaagacaaacccggagcagggcggcgcggcagtttggacacgccccgagctctcctgggctctcagtccccgtcaggatgggaggcgcgtgccgagggaggaggctgaggacacagcctcctttcgccctgcgctgcccggccttccgcgtgaccccgcctatgacctcggggcgttccgcctacgtctgaccgtcaggtgcgcacgcgcacttacaggcttgttttgccagcttcacgccacccgggatgggagaaagcaggtgtcgcgagagttgggcgcaagacgccttgtagggagtgtaactatggccggcctgcggaacgaaagtgaacaggagccgctcttaggcgacacacctggaagcaggtgagcggatcctggtggagggacccctcagtctcctgcgctgttgggactggttcctttccgggcgtcacccgcactgggacaaaccctcgctgccagaggggttccagcgcggtgggagccggt

SEQ ID NO: 32691 - DNA, 2300 bp, Homo sapien
ttttagtagagacggggtttcaccgtggtctcgacctcctgacctcgtgatccgcccgcctcggcctcccaaagtgctgggattacaagcgtgagccaccgcgcccggctgtttgtttgaaaggggtgtgggtaaatatcctgggcagtcacctaaggaaatgcaccaaatggagtctcatattcttgtgtgaaacattcgggaaataatctaatctcttcaaatttagctcctcttttccatgggctttataaaaaaaaattacatatatatatatgtttaaatgtttactttggatgctatgtgtgtgttcctaagagacattttctttttttttttttcctactggtacaatacactaagcttacttagatttcaccagctgtatatgtactcattccatatgcttttgtggtctgaagtcatcacttggaggcaccaatggaaaagagcagtgtcagagggctgggattcctctaccagctgtgtgaccttgagtaagccaccttaacctataaacagaaagtaatatctgccctgatacatgatagccaattatttcacttagataaaaactgaatatctactatatatttttatgagatataaggaaagattcttcttgccgctttgccattttttcccataagaagcctggtggtaaagagcacaggcttaggatcaggagtcctgcatttcttgaattctagctctgttgcttgttagtagtatgatcctaggcaagttacttaatctccctgccttccatttccttgtacacatgagacaattcccccctcagaggattgttgtaaggatgagatgaagtaattcaatgagcattcatccaacatatatttatctaggagccattctgcttactgctatactggttaaaaatccccttgtccactatatatgtgccatacattgctagcccccaggaattaaaaaagacaatataataaagcgacattatggcaagaaaatactaacttttctacctatgtgtctttttggaaccaataatacaaatctgacttgtttttgtgagctgttacaaatgaatctgcaagactgaatccaagtacaaaatatcaggtcttgatttagaagatatttctgaatagcacgtttcaaggtttttggttttttttttttttttgagacagaatctcactctgttgcccaggctggagtgcagtggcgtgatctcggctcactgcagcctccgcctcccgggttcaagggattctcctgcctcagcctcccgagtagctgggactataggcgcccgccaccacgcccggcttttttttttttttttttttttttttttttttttttgtatttttagtagagacggggtttcaccgtgttagccaggatggtctcgatctcctgacctcgtgatccgcccgccttggcctcccaaggtgctgggattacaggcatgaaccatcgcacccagaccgcacgtttcaagtttaggtgttcaccagtgaactgcgcctggctgatacacacaaggtcacaaatgacacaaagatcagaagtgatggcatataccatacatgactgtgtaactagtataggacctagcatagggtaaatgctcataaatattaatttaaaaaaattaagtttggtttccaactttgccacttccacacagagtgactctgggttaacttgtctggatcttaattttcagtaaactagcaatgtgtctgcttcgcctatctcataggatacttgtgatcaaatgaaattacatgacaatgtatctggcgctaataaaacggtaatttatgagacacagaatgactactgacgccagctagcctacaagcctaatagtagagataagatgttaatacataaccaccaagaaataaacatggagatctagtgaaaacccatgacatgttttctaaaaatgtcatcttccttgtgacgaaaggagctggtcattgctaggcaggtgctgtacctttttcaactcccacgtttcagcagcaggctctgctgagtgacattttgcaaggctgaggcccccgtaggcgcaggcgccgttggggtgcgcatccggggacctgcaggttacaagcagcagatcccaccttcagtcctggctctgacaagccctccaggtaaggcgcctttgcatttagccgagctagagaagagagctggaagccacctctacctttcacggggggaagggactgcccgcgcgctcgcccccattatctcagccctccgaagcgcgccacggactccagccttgtctctcaccc

SEQ ID NO: 32692 - DNA, 2300 bp, Homo sapien
agctgcagaggcagaatgaagtaacaagatagaggttaattacagcaaattgggtcagtcagatgaaactaaaatcagacggaacgctcaaattttggaattttaagtttattattaaaaggacactttacagaggtgtgaggctaggcgtggtggctcacgcctgtaatcccagcactttgagaggccaaggtggggggatgacttgaggccaggagttcgagaccagcctggccaacatggtgaaacaccgtctctaccaaaaatacaaaaattagccgggtgtggtggtgggcgcctgtaatctcagctactcgggaggctgaggcatgagaatcgcttgaacccgggaggcagaggttgcagtgagccgcgatcgcgccactgcactctagcttgggcgacagagagagactacctcttaaaaaaaaaaaaatgccgggcgcggtggctcatgcctgtaatcccagcactttgggaagccgaggcgggtggatcatttgaggtcaggagttcaagaccagcctggccaacctgatgaaaccccgtctctactaaaaatacaaaaattagccgggtggtagtggcgcgcctgtaatcccagctactcaggaagctaaggcaggagcatctcttgagcctgggaggcagaggttgcagttagccgagatcacgccactgtactccagcctgggcaatagagtgagactctgtctcaaaccaccaccaccaccaccatcaccaccaccaataaaaaatacaaagcgccactaataacagagctagtaaagatggatgggaatataggtggaagtacaatccccttttaattgcaacaaggttcgccaggttgcttagggttgggcaaactggagatcactgacacggaaaacaagaaaacccttattgtttatagctgttatgtatgaataggttattagccttaggaaaattatttgtgccgaatacggcttttgagtaagcaaaaaatattaacgtcaagttgaatgtaattgaagcgacttattgggcgtggggtggggggtgggggttgaaagcccaaacataaggcgagcacagataatttatttaacaaggctatggggttggtggggggctcggaaaaaaatcagcggcggaacctgctctcagccaccttgcaccaggacacaaacactgactcaaaaatgaaacgagtatcatctctaagtgaatgtgagtgccaagtagaaagctcgtatccgatttattatcaaaacgtctttgtaccattttaacatccattccaggaagaaaaaacctattgggaatatggttaatttgtaattaagtgctatttacccaaattaaagaaacaggtaacaaaaaattttaaaagccggcgaaatactatttaatttactcaggaacgctttagaactcttttagttggtgggtgggaatgcgggcggggaagcgcactaagccgaacgctggggcaaaggtttcctaaacagttaccgagaggtaactcccccttcatctgggacgtggctcaagattacaggtgatcgcggtgccccgaggcgccaggaggcaactttcacctgggggaggcgccgggcgccagcgggccaagcggccgggccgcggagcccacttcacttgggagctgccccaggccgggggtcgacaccgcgtcccctcccttagcctagctgcgacccagctttagggcctaagggcaaatcgagcgctcggtcctcccagcgccatgtgcgcggcccgcccaggcccttggccgccgtcgccgcgggggcaggccgcgagccagccgcgagccacagaggcctggtgcgcgctccgcccctgagcctgcagtcggggcggcctcagccagtgagccgggagtcgtccccttcgtcctccctcgcactcggagggcagctggggcggggcagaccctcgggccgggcggcacccgggcgggcgaatccgtcagctcccgcgggaggcccggcgagagaaggacccggtgagtagccacgtcacgctcctcagggaggccccgccccgtgctctcgggccgcccctcttcgccgtctccacgcctccgcgggcagttaccagctttggctgctcgcgcctccccaactcgggtaaagctcctcggcctcggcgtgctgcgcctccgcggctgccctgcgccaggtgagggctcgcggctcccggctgcggctcccggcgcgtggtggcgggctcggggcgtgcgtcgcggagaggacggggccggcgggcggttggcgctccgttcggtgcgg

SEQ ID NO: 32693 - DNA, 2300 bp, Homo sapien
gggtttggtcatgttgcccaggctggtatcaaactcctgagctcaagcaattggctcgcctcagcctcccaaagtgctgggattataggcgttagccaccatacctcgcctattatttctttaataatgaagacatattataaattgtaatcaaatttttatatttgtataaaatcacatacattgataaagaggtgctgaaaacgtggcagctatccttttgatagtttacccgcttttcagataacctaatttaattcatcacatttccctcatctggttatattctttttttgagacagagtcttggtctgtcgcccaggctggagtacagtggtgggatttcagctcactgcaacctccgcctcccgggtttaagtgattctcctgcctcagcctcctgagtagctggtattacaggcacgcaccaccacatctggctaatttttgtatttttagtagagacagggtttcgccatgttggtctcgaactcctgacctcaggtgatccacccaccttggcctcccaaagtgctgggattacaggcgtgagccactgcgcccagcctcatctcgttgtattcttaagaggtaatcttatatttgagatttgcattttctagaattttatatatgtggaagcattgagtaggtactcttttttttcctggcttgtactcagcattattttgagatttacttgtgtgtcagcagttcattcttttttcttactgagtagtatggatgtaacacagtttgtccattcacctattgttaatggacatttggattaattttacgttttggttgatacaaataaaactgctatatgaacgtttgtgtagaaaatttttcattttttcttggatatgtaactaggttggatcacttagtagctacctgttttagctttttaagaaactgctgagtttgcacttctatcagcagtgtacatgaattccagttactccacatcttcactcactctcttttttgtgtgtgtgtgtgagaccgggtctcactttgtcacccaggctggagtacagtggcatgatctcagctcattgcagtcttgacctcctgggctcaagtgacccccccacctcagccccataagtagctgcgactataggcatgcaccaccacgcctggctaatttttttgtattttttgtagagatggggtttcgtcatgtgcccaggctggtctcaaactcctgagctcaagtgatctacctgccttggcttcccaaagtgctaggattacaggtgtgagccaccgaacccatctttactcaccgataatatggtcaagtttcaaaaaatattttagccattctaataaatgaggagtggtatcccattgcagttttaatttgcatttttctgatgaatgaatgcaataatcttttcatagatttgccatcagtgtatctttttgatgaagtatgtgatcaatctgcccatttaaaaaaatggaaggctgggtgcaatgggtcatgcgtgtatcgcagcactttgggaggctgaggacggtgaatcatttggggttaggagttcgagaccagcctgaccaacatggcgaaaccccctctctacttaaaaaaaaaaaagagttagccaggtgtggtgacatgtgcctgtaataccagctactagggaggctgaggcaggataattgcttgaacccaggaggtggaggctgcagtgagccgagatcgtgccactgcactccagcctgggcaacaaagtgagactctgtcctcccgcccccgcccctgcaaaaaaaaaaagtggtattgatttgttgttactgagttttgaaagttcatatgtatttgaggtaaaagttctttatcaaatacttagcaaatactttctcctagtctgcagctttacttttaactgtcttttgaaaagtaattttttgcctttgataacagtttttgtcatttgttttgcaattttaggttaggtatattgccacaaatttttgggtatgttagtgaaaatattaatggaaatcatttcattctgaaaacctttttgcagtttcagagcgtcctcagccaaggaaataaaaagccacaaaatagaaaagaaaaagaagagaaggttgaaaagagaagtaacagtgacagcaaagaaaaccgggaaacaaaattaaatggtcctggtgaaaacgtcagtgaggatgaggctcagtcaagtaatcaacgtaagagaggtcagtttgtccatatctttattttgattttagtttttgaagaaagttgtaatgaggaattacatttcattaac

SEQ ID NO: 32694 - DNA, 2300 bp, Homo sapien
catttttagtagagatggggtttcaccacattggacaggctggtctcgagctgctgacctcatgtgatctacccgcctcggcctcccaaagtgctgggattacaggcgtgagccactgcacctggccagattgtatatatttttggcataaggaaaacagtattaacacaattcaattaagtttagcattcctttgatgaggatacattttttcccaaacattatgtatggtaggcactagtattcgatgcagttgtggtagttgctttctgggaagcaatgagacttactcttggcatctatgggatgatatgtaagaaaataaattttaatttaataaatgaaacaataaatggataaaatgcagacacagcacaaaaagggactaattaactctcttggcaggaggtgttcaaggagtgcttcacattcccaagaaaggtaacatctgtggtgggtattaaagggaggctatgatatcctttgcattgggtatacaaaagatgcaggaaagggactttcagacagaagaaaaagcatatgaaaagatatggaacaaggaacaggactgacagtttggtgctatttgtgtcaccaagaacaaagtggaaaatgacaacagatgaggcaaaatcagcaaaatctcatatgccagggtaaagagcctaggcttattctagaggcaaatgggaaacactgaaggatgttaagcagaaatatgaaatgatctaatttgctcctcagaataatcattctggtaacagtgaagaaaatggattgggagaggaaatggcaaatgtgtaagttcacttttgactttacaaattcgtgcctagaatagtgcttggcaaatagcgggcacttagtatttgttgagtgaaaaaacaaaaagttgttatatgaatcaaaaaaagtcgataagtctgaagaaaaaccacacagaaatagtgcctatttttttttgttgctactgcttgattcatctgctggcttgtttgttatcttaccataagattttcatgaacaaatcagtaagtaaaataaccgaataaaaaaaacagtcaaaggatttgaatagcaggcttacaaaagaggaagtctgaagggtaactagaaatatgaaaacatgctcaatttcactagcaacaactagatcatttaaatcccatgagatggaagaatatttaagagtttgcacaaaacccagtcttcaccagaatgttgaattggaattctcacatgctgctggtgagagtgtaagttggtgaaatcattatggaaagtggtttggctgtcagtagtcattaagttagaagatgcttatctcttttgactcagcatttccactcagatataaaccctagagaaatgcttgtacctgtacagagacatgttcagcaatgttgatcacagcattgttgattaaacaaaaaactttgaaataacataaatgtctatctgcaggagaatggataaattgtgatatatttgtacaccacatactattcagcaatgaaaatgaacaaattagagctatgtaaataaaacatgaaaaaagtttacaaagtgatatatatatatatatatatatatagcattatgttacataaagttaattatgcaaaataatattacatatatgtaataaaagatcaaaattccaatttaagaggctagttatctctgagaagggaaagcaggagggaaatgggattaggggaggttacacaggaagcttcaccctttctttaaaagaaaaaaaggtcataaacagatatagaaaaataaaaattttataaagctagataatggtcaaaaaagtatttgttatttttgtttttatatatttgaaatgttttcagtgaaaaatcctttgagcttagagaattacaaaattatccttattctcaaagtaaaatattttcctagcatctaaataattttaagagttttttattttgcagatttgactgatgaattagctcagaagttatttgatgtttcagaaataacttcagcagcaatggttcattcgttgcctacagcagttccagaatctcctagaattcatcctacaagaacacccaaaacacctcgaacacctaggttacaagatcctaacaaaacaccaagattttatcctgttgttaaagaaccaaaagccattgatgtaaaggtatacaaaacaaccaggaatataaggcttgcattttgtatcctttaacattacagaatgaaacgttttagtttctatcacattgaaaaatgtgtgttataacttgtaatatttcacttaaaaa

SEQ ID NO: 32695 - DNA, 2300 bp, Homo sapien
aatcattctggtaacagtgaagaaaatggattgggagaggaaatggcaaatgtgtaagttcacttttgactttacaaattcgtgcctagaatagtgcttggcaaatagcgggcacttagtatttgttgagtgaaaaaacaaaaagttgttatatgaatcaaaaaaagtcgataagtctgaagaaaaaccacacagaaatagtgcctatttttttttgttgctactgcttgattcatctgctggcttgtttgttatcttaccataagattttcatgaacaaatcagtaagtaaaataaccgaataaaaaaaacagtcaaaggatttgaatagcaggcttacaaaagaggaagtctgaagggtaactagaaatatgaaaacatgctcaatttcactagcaacaactagatcatttaaatcccatgagatggaagaatatttaagagtttgcacaaaacccagtcttcaccagaatgttgaattggaattctcacatgctgctggtgagagtgtaagttggtgaaatcattatggaaagtggtttggctgtcagtagtcattaagttagaagatgcttatctcttttgactcagcatttccactcagatataaaccctagagaaatgcttgtacctgtacagagacatgttcagcaatgttgatcacagcattgttgattaaacaaaaaactttgaaataacataaatgtctatctgcaggagaatggataaattgtgatatatttgtacaccacatactattcagcaatgaaaatgaacaaattagagctatgtaaataaaacatgaaaaaagtttacaaagtgatatatatatatatatatatatatagcattatgttacataaagttaattatgcaaaataatattacatatatgtaataaaagatcaaaattccaatttaagaggctagttatctctgagaagggaaagcaggagggaaatgggattaggggaggttacacaggaagcttcaccctttctttaaaagaaaaaaaggtcataaacagatatagaaaaataaaaattttataaagctagataatggtcaaaaaagtatttgttatttttgtttttatatatttgaaatgttttcagtgaaaaatcctttgagcttagagaattacaaaattatccttattctcaaagtaaaatattttcctagcatctaaataattttaagagttttttattttgcagatttgactgatgaattagctcagaagttatttgatgtttcagaaataacttcagcagcaatggttcattcgttgcctacagcagttccagaatctcctagaattcatcctacaagaacacccaaaacacctcgaacacctaggttacaagatcctaacaaaacaccaagattttatcctgttgttaaagaaccaaaagccattgatgtaaaggtatacaaaacaaccaggaatataaggcttgcattttgtatcctttaacattacagaatgaaacgttttagtttctatcacattgaaaaatgtgtgttataacttgtaatatttcacttaaaaatcatactttaccatagtgatattttctctggttaggaaatttttcggttgggcacggtggtttatgcctgtaatccaacactttgggagaccgaggcaggtggatcgcttgtgcccaggagttggagacgagcctgggcaatgcagtgggaccccatctctaaaaaaatacaaaaattagatgggcgtggtggcgtgtgcctgtagtcccagctacttgggaggctgaggtggcaggattgcttgagcctgtaggggtcagggctgcagtgagccatgatcatgccactgcactccagccttggcaacagagtaagaccccatttaaaaataaacaaacaaacaaaaaccttttttacaattggatagtgtaattaaagacgaacagaaagtataatgaagaatcacactaagctgcacttcatttcatctttgtgtcacaaacctaccaaaggactttatttattaagttttgtaacttgtgtgtgagatttttgagttttgtgacttcatatgatttcacaatgtgttatctacagtatgaaaatgtttgagttcatttatagtcagagggttttaatttacttgtgaagttcacactattgaaactaattgcaatgcttgactttattttctttagagtccaagaaagagaaaaacaaggcatagcacaaatccccctctagagtgtcatgttggttgggtaatggattccagagaccgtgggccaggaacatcctctgtcagg

SEQ ID NO: 32696 - DNA, 2300 bp, Homo sapien
agcactttgggaggccgaggcgggcagatcacgaggtcaagagattgagaccatcctggccaacatggtgaaaccccatctctactaaaaatacaaaaattagttgggtgtggtggcaggtgcctgtagtcccagctactcaggaggctgaggcaggagaatcgcttgaacccaggaggtggaggttgcagtgagccgagatggcgccactgcactccagcctggcaacagagcgacactctgtctcaaaaaaaagaaaaacaaagaaagaaaaaaaacctattttttttcattttcaaggaaatatctgagaaataataaagtctgagtaaccatagtttgtgggttgttcttttagttaaacatgaaaaaagttgctagtttgccttataacttaatcacacaagtgctttgctttaagaaaacgattgtagctttttttttttttttttttttttgagatggagttttgctcatcacctaggctggagtgcaatggcatgatctctgctcactgcaacctccgctgcccgggttcaagtgattttcctgcctcagcctcccgagtagctgggattacaggtacatgccaccacgtccagctaatttttgtattttttatagagacagggtttcaccatgttggccaggctggtctcgaactcctgacctcaggtgatccgccaacctcggcctcccaaagtgctgggattacaggcgtgaacccaccacacccagccccattgtagtttaatatgctgcaaaaatgctttgtgttttcttctcatttttaaaaaattgtaaaaaaatgtataacatgaaatttaccatcttaacagttcttaagtgtacaactcagtagtgttcagtatattcacattgttgtgaaacagatctccagaacattttcatcttgcaaaacaagcttccatttcatgtttgtcacacacaaaaagatatgtactcatgagtgagattttataattttttggctttatcaaggatatttttaagttgaaactggaattgttttattttttctaattgcaagtgcataacaatgaaggatgcagtcacaagtaagtaaagtttggtgccactgcctcaattcacatcagttttacacaccattgcttttgtaccatcagtagaaaggtcaacatagaggcaagggccaacaatgtcttcttattatgaaatcagttttgactttgtagactttctagaaggttcttaggaaccttccaacagtccacagaccactttgagaaccactgatttagataaatgttttaggaagataactttggtggcaggatagagaagggacacttggaaaaacaaagagactggttaattcaagtgaaagaagagagactggttaattcaagtgaaagaagaggaaggtctaaatttgaatttaggtctatatttgaatttgagtgcagatgagaaggaaaagacagatttaggagatagatcaaaagtggaattgatttagagaattgcaggttctgtcttacttttgatgcctttagaaaaaaagaaaattgcaggtatgtctttgagataatgaaattattgcccatctttgtgccagattttatccctaatctccatgtattcaatttacatcactaacctaaattattcaagataagttgaaagtttccacataataaaaaactaatctaaatgaaattaataatgatttggaggaggaatgagctattcagttatctgcttctgcttaaactgtgttagcttgagagtttatgaccatgctttttatcagcttctgaatttacatatgtgtattgaacataaatagcactatatgcagatctgtatgtcattaatttaggagagttttagggactactgtcttttccactgcttagacccccaataatgaaaaaaatagtacaaattggttcatatacttggttcttgatttttcattttgaaggcttttttcccctttctcaaacagcacttcaaatgcttcaccttcagaaggcgcaccactagcaggaagttatggatgtactcctcattcattcccaaagttccagcatccttctcatgaacttttgaaggaaaatggctttacccaacaagtgtaccacaagtatcgtcgaagatgcctaagtggtaagatgcttgtcctttatctatctaatatatttaaaattaaaatataattctaaaaaatttaaatgttgtcatttaatatcaggttaagatattcttttattgttagactatacatagttttactttaaacatgtttacatata

SEQ ID NO: 32697 - DNA, 2300 bp, Homo sapien
tgttaattctcttccattttgatttaataagtattctaaaattttcattcccttgaaattttgtaagtagtaaaatgctccagttttcatggtcgttactccatctttgggcttgtgagtcttctatgtgttttcttgaggtacactggaggatttaggaaagtggaaatagtactctcagttctgtcagtaattttaggcaaatcacactgaatgcctccgctcctgttttttatctgccaaatggggaaggcagtctgtcccttccactttgggaaactctgagagagaaaagtgaggttgctggaaaattcttttaaaaattgaacctataattttccatttgtagattgttatggcctttattagttttatttttccttttgtatgtttcactttttgcttttttaagtttataagcattggtctagtcagcattaagggtaaatataatgtttatagattttttttatcattgtttcttagaaatttttatttttaaacacactagttctctgtctctgtctctctccttgtcctcctgaaaacacccattgccacaaagtgtgtagaattttgcacgcacatgtgcatgtacacacacagacataactggttaataccttttttttttttttttttttttctttggagaaggagtcttgctttctcggccaggccgtagtgcagtggcatgatctcaactcactgcaacctccgtctcctggattcaagcaattctcctgcctcagactcctgagtagctgggattacaggcgtgcgccaccacagccggctaatttttgtagttttagtagagatgaggtttcaccatgttggccaggctggtctcaaactgctgacctcaacactgctgccacagagttgggattacaggcatgagccaccgcacctggcctggttaatacccttttgaatgtcagttgagatgatagaaaaagtttgaaggttacgaatattggccagtggtaaattgtgttccatattcttatatagaagacacatttgaaagtataaaatggtagcctatgttaataagactgattaaataaattacaggtacacatccattcagtgggataatatataaccattcaatgataaataattgttgatagtcatgtgatacgatgtagcaatatggaaaatgcaataagaataagaaaagcagaatacaaatgtactttactggaactgttagctttactttcatgttactgtatcaatacctatgaatgctactcttaaaattattgctaatgctacttctagttccatgcagtaaacttttcagagaatgaatttcacatctggttaactttatagtacagtgctgttagcaactcaaattaatactcataaatgcttagatatctatttaagtgaaacctcgatttctactctcagaaggtacagagactttttgacacataactttcagtttcctaaatacttttatatatgaatataatcatttcgctcatttaaaaatcaaggaatttctagttttttctgcttgtttacttatcagaacatactttgttcttttatttataagccctgtttttcaccactctgttgttgttgttcataatagtgtctttgcctaccataagtgaatctgtttacagaatcttgagtttctttttattcggaactacagctaagtcatttggaagaaaattattacgttcctactttatgccaggcacagtgctaggcattgaggatacaaatcctcaattgatgaacaaattgctgttctcaaggacaaaccttgggaatggtttttgtcaacacatcagtcatgccatttctcctcagagagaatggtacccaattccttggataaaatgctaattattgcttaatgtgtcagtccagaagaattattccttatagctacttcctctgttttccaaaagtcatgacaagtaagagctattattttccttaatgacttttcctagtttatatagatcattgtatatatattatggtagtcagatgatttattttgaatatgggtctttttttattaaaccactcagcaaagatttattaaatgcgtgttgagcactgaactagtcactgggaccacaaagatgatacagtctcttttctcatagaattacaaccttcataaggatagcagaaagaaaaatgttacagattcaagttcagctgagtctttacataatacatgatgttctgttgattatttttatttttttgatgccactattaacagcaaccagtaaacattatttcccctcaag

SEQ ID NO: 32698 - DNA, 2300 bp, Homo sapien
tgacatttagctggaaggaaccagagatggtaaatgtccagcaatgctcaacacagtcctgaataagaattaaaaaagccagataaacactaggcaatcatggatgtcccatgctccttgtctgttactgctttagggacagctaatagcccagttctggtcaataagatataaggagtggcctgcttctggggtgctttcttccttcctatcaatgttgtctcaactgtatacagctcttgggactgctacagctatcttctcctcaaaaccagtttcttctttatcttcctatttccatcactggcacctcccattttctgttaccaagtcctaaagcaattttgacttctcctaacccttaaccttaaggtgactattcctttaggtttgcctgggataaaactgatataactcctggtctctggctataattattaatgccctactttacttccaaaagtgttccatattgaaggatagagtatatggtcatttactaccaattgtgtcgctctccctcaggtacctctaatgcagggctcagcaatatggcttataagttgtttttgcacctctccagaactaaaaaaaaaaaaatttacatatttcaatgattttcttaaaaatcaaaagaatatttcatacctgaaattatattaaaaattcaatgtccatagttttactgaagacagctacactcattcaagtattgtctatggctgctttctcgttacaaggtagagctgagtagttaaggcagagacttaaaatatgatcgggccctttacaaaaaatgtttgccaacccctgctctaatgtctcccctagctctgagtctcctcacctcacgcacaaataccctagcctactaactgctttcccactctttccccagcctctaatccttcagacacctggttgctatacagcctctctacaagagtgtcgaccctgtcacttgcctcgtcaatatcctcagtgactcctacaaaaccgacagtgaaaggttcaaacctattctatgagactcaagacaacagacaacaaagggcaagagagaacacgtcaaacgagttcgtcaaacgagttgagtgcgtgagacttcagaggtcactttttcacactagaatttcaaggtgtgagaggctaaaagacgtccaagtacatgaaacagaacctgcaaataagagtgaatgacgaatagaaagaccacctcaacctgtccacttccctacggccgcagaagttatgattcaaggaataatgagactctaaatcctttaaaattctacaagagcagcctttgccaaacccagcggggagtggctgctcggtgccagcgcgaggagcacgtagactgccgatgccagagaagcccggtgcgggttccgtgctttctctccgttccaggaagaccccagctcgtggccaaatcttcttgccgcttcccggtctgcgcgcctacgctgccggtttcccgacaaaagcgacggcgccctggtgaaaagcagacgcccctcatcggtttgcgccttgcagctcaactatgccccagcctcccacaagccacctgcccgcgtcctccgccaggcgtccagcccggacctgcccccgcggccgccaaggcgcacgtgaagctcccgggcggggggagcgcaaggaggcgggagtttgcggacgcgaacgcaggcctaggaagggaagcgattccagggcgcacgcgcagagcctggagactgggcggggcgtgcctcccgcaggggttacgaacgaaaggcgagcgcgtggcgctcaggagcccgcgcacgcgctgtggtctcgccccgcccatgagcgtccgcgcggccgtcgtagcatcttttcttcagacccgcccggctcgtctacttaacctagcggaggcttggagtgagagcagggaagtgtggggcgaggtgggcggggcgttgcacgcgtgcgcggccagcgaaagaagggagggggcgggagatccgagacaacgttaccccgtcaacacccaatcaggagccggcctgaccccgccccctcttctcacgttattggctgagaggcccccagatgggcggggccggccgtggggttggggagggcagggggcggggaggaggaggaaggcgctggcgggcagtgatggcggctggtgatggggacgtgaagctaggcaccctggggagtggcagcgagagcagcaacgacggcggcagcgagagtccaggcgacgcgggagcggcagcggaagggggaggctgggcggcggcggcgttggcgcttctgac

SEQ ID NO: 32699 - DNA, 2300 bp, Homo sapien
cagggaaaaagtagaaatcttgggatctaaaggacagtttcaataacagaatagtcaagaagagcataaaataaaaggccaaaatgggtggtacaggtaaggaacacacagaaattcaaagaaggtaggttaatgtgggctgatagaggcctcaggtggaagtagaattgaaagaatggataggtcatggaatttgtatggttagaaataagaagggcatgctccgtgaggaaacagcatgagtcaagtcctagactgtgcaatacacatagcatatatggggcaagggactaggtattgtaaggggaaacgtatcatttaatagagggtatccaagggattgtttgctggggaacgggaaggcagggaagccactcagggacttatggaggcccttgagtgctttctgagttgtcctcttcaaattacagagcacccctggagattggtgtctgagcaaaggaaatcagaacacagttctagtctcttcgtgtaggaatgaaataggaaaagactgacggcaagtcaccaattggaaagttattgcagtactcaaagcaagagtatcctattgggacaagagcttgttacttagggtggaaaataagaacttccaactagtccagttcaaggggcttacaatgagaatcaaaaaagctggggttttgggaaggcttcaagtgtgaagaagtcgagacactattttatcaaggatataaaggaaaacttttttacttcacgtggcagccaatgttggttagctacccaacattccccagcccacttccttgacagcagaactttaatactgtccaattcctctcttccctccaaaccaactggaaaagaaacctacacacactaattcagccccaaggtaaatcctgagggtctaagctactggttctcaaccagtaccacacctctggggggtgggagggaaaaacggttgatttacggtgtcacaatgcctgaggtgtggtactgacatttagctggaaggaaccagagatggtaaatgtccagcaatgctcaacacagtcctgaataagaattaaaaaagccagataaacactaggcaatcatggatgtcccatgctccttgtctgttactgctttagggacagctaatagcccagttctggtcaataagatataaggagtggcctgcttctggggtgctttcttccttcctatcaatgttgtctcaactgtatacagctcttgggactgctacagctatcttctcctcaaaaccagtttcttctttatcttcctatttccatcactggcacctcccattttctgttaccaagtcctaaagcaattttgacttctcctaacccttaaccttaaggtgactattcctttaggtttgcctgggataaaactgatataactcctggtctctggctataattattaatgccctactttacttccaaaagtgttccatattgaaggatagagtatatggtcatttactaccaattgtgtcgctctccctcaggtacctctaatgcagggctcagcaatatggcttataagttgtttttgcacctctccagaactaaaaaaaaaaaaatttacatatttcaatgattttcttaaaaatcaaaagaatatttcatacctgaaattatattaaaaattcaatgtccatagttttactgaagacagctacactcattcaagtattgtctatggctgctttctcgttacaaggtagagctgagtagttaaggcagagacttaaaatatgatcgggccctttacaaaaaatgtttgccaacccctgctctaatgtctcccctagctctgagtctcctcacctcacgcacaaataccctagcctactaactgctttcccactctttccccagcctctaatccttcagacacctggttgctatacagcctctctacaagagtgtcgaccctgtcacttgcctcgtcaatatcctcagtgactcctacaaaaccgacagtgaaaggttcaaacctattctatgagactcaagacaacagacaacaaagggcaagagagaacacgtcaaacgagttcgtcaaacgagttgagtgcgtgagacttcagaggtcactttttcacactagaatttcaaggtgtgagaggctaaaagacgtccaagtacatgaaacagaacctgcaaataagagtgaatgacgaatagaaagaccacctcaacctgtccacttccctacggccgcagaagttatgattcaaggaataatgagactctaaatcctttaaaattctacaagagcagcctttgccaaac

SEQ ID NO: 32700 - DNA, 2300 bp, Homo sapien
aaatcagtatcactagtttaaaggtttatgaggcttagttaattaaagcttttaatttgcacgggaacccaaagaagctaatctttgtcagatccaaacagtaagatgactagccattctggttttcccataatgatgaggtttcctgagatggagaacttccagtgctaaaaccaggacattcctaggcgaactgagatcaacttagcattcctcttcctcacagactcaagttttcttccatttaaaatgctgttacagactgaatgcttctttctaacatgttccctgtgcatcagatctctgctaaataatggagtcctagaactggaagggatgcttagatgtcatgaggtcatccactgccttccagtaggtttcattcagctgggctgtttagatcatctgctcctaaaaaacgatgtgctgggaaacagagtccacagatagtgtagagtctgatacttagtctgtaattttataatccttactatttgctatttgaatatctttcatattatgtggtttctttttttcttacacgttattataggattgagaggtgtggctgccagtttctgcagaggaattatggaggttgagtttagaagttcatggttctagcaatagccatggtttggggggaaattactgctttgttttggcaaatgtaaatataagttttcaggaaatatgtgcctaaattaagagtgcagtgtttagacggttcccccaaactgctgttaaaactataaggagattggcttgtctcattgataaggaagaaagttgctaatattttatttcctgcttgttttattaattctttatatttgatattctcttatatcctactcaaatatgtgtatagatctcaataattctaaaagttcagggaatggaattcattttttttggtaaatatattgccgttttctatctcattagggtagacaatttgtctatctcaattggccaaactgctattgggtcgcagtcgccttagcttgtgtaaactataaagaactggttcagatactctatatggaactctgtcaaattctggttcccaaaccttggctcagtttaagacttcaagatacacacataaatgtaaataaataaattaaaagtatatatatatatttattgttgttgttgttattgttagatagattgttttgtcccaaaggtataaccagtacgtggtcactatagtaaatacataaattacagaaaaataataggaagaagaagaaaattactctgattccacctaaagatagtgattgatttgggggtatttctttttgctctttatttctatgtagtgttgtttgtttcacatattataatattgcatcctacccttttcacttataattataacacaagcatttttccatttaatcatgaactctttttaaataacatgtgtaatggttgcacaacattccatggcatgctgtagcatttcagtagaacatagctcggtggaggagacaacagtatacacatagagtaagcttagattatgttctcaaattagttaggcaagaatgtaaaatctgatgggcagcaaggtgtcctcagaggatgggagcagatgcaggataaatcagcatggcttctcttactctgtgctgatcctcatgaggcacgtggctgcagctgatatccttcatagcgggtctctggatctggaaagctccacaatcctttcaccacccttttatatgcttcttggaagaatttacaccaacaaactatgcatttttgttgaagataattattacaacattgaacttttctggaaccaaactcagcaaagaataggtgatgttctcgtcttgaaggacatatagggtatcaatttattgcctcacagctacaaattcactcttcattgcatgctctgagaaaatggatatgggccctttaaatatttttctttgccagatggcaccatgttaatctttgtcggtagagggtgcatgagagacatgataggaggaacgggctttgcttcctggtctgaccatttttatatgcaagctcctggaatgcctgtggtttctccagcacctgggtcctgctggcaaccagcagcacccagtggccagcagcgtactctttcacctcttcttgggtgactttgtggaatgctccaatgtgacatctccctgtgaacgcctttcctgacaccctaaaaagtgtcaggaatttccagcaagttccagagagcaggtttccagcaagtttggtcagtatgacaccacagcgatatctctgccattcac

SEQ ID NO: 32701 - DNA, 2300 bp, Homo sapien
aaataattatattatagttgtgagttattaataattttaaatatattaacatatgttaatgtaattaaatacaatgctggaatccatttgctaatattttatttaaagttttttgtctttgctttggaatgtgattggcctttcagttttgtctgtttattagaatcaaggtatatctgcctcatgaaaggtatgtgtttgtttgtttttcctttctattctctgaaagagttttggattatctattcctttagtgtatggtagaacactcctaaaaaacttttgggctggtgttttttaatgggtagattttaattactgattcagtttctttggttgttcaatagtttattcagattttctgtttcttttttgagttagttttggttctacatttgttttgaagaaattgcctgttttacttattttctaattaatttgtaatatagttgttcaaagcattattttatgattgttaaatatcaaccgtatttgtaactatgtcttcttttgttcacagcacctttttttttttttttgtctgagtcccactctgtcgcccatgctggagtgcagtggcgcgatctcggctcactgcaaactccacctcctgggttcaggtgattctctcacctcagcctcctgagtagctgttcacagaaccttttattcttactctttcattaaaaatcttgctaaaagtttgtcaattttcaatgaaacaaatttaggattgtgatacttgctattgtttcattgtctttagttcattgattttcagtcatatctttatcattttcttccctctattcaacttgcctatcgtggatacgtttttttttttttttttcccttctaatttcttgggttgtatgtttggctcattaattttcaactcctttatgtcaaaggcaggattttaagacaataaattttcctttaactgtaactatagctgcacctcacacatttttacaaatagtttcagttacaactcagtactagatattttttaatgtctgttatcatttatttcctgtttaattaatgatttacctaaaagcattttcaaaaacttattgccataaatgtattcagtctttttccttttctaatagcttgaaactagaagttgaataagatcttgcccagaaaaaaagcatgtttttaaatccccaaatttatagagttctttttgctttttaaaagattattgatttataacttaatagcattatggttgatgacttggtttatatgatatcagttctttgctatatgttgagatgtgttttgtggcctaaaatgtggtcaatttctgcaaacgtacaatgtgcacttaaacagaacatacattctttttttattaggtacggaaatccatatatgtcaatttatataagtggttccaatccttttaatgacatctcatatatagaaaattctaatatttgtacagcacagtagcataagttggagttgatttgaaaatgtcttgcagggcttactaaaatatttattgtaccttttaaaattttatataattacaaggaaaaatacaaagtattagataagacattgttaaatttttataagcctaaataaaacactttcagaattttacttgagaaacttgagtttgctttcatgaacataactattttaatcagattttatgtttgaaatagctatagatcattcctgattaagatgttttaataatgaccttttctaatctcctcaaattcatggtgttgaaaacccaatgaaaatatttgtccaaataaattaccaaaatcatgttacaacattttaaaaacaattcaaaccgttgatattatataggaagcatctaaagttcttccttaatttcactgaaaaaatgtaatttgaaatttcttgtgacagggcatggtagctttgtaacgtgtccacttggctagttgaactgtgtctcccagaagccctttccctatgtgttttcagtcaggatgggcttcaggaggcatttttgcatgagatttggagggcagaagtgaagcagaagccattctgctttgtatgctgggaaggttggagcaagggcgttttaaggctcacacgtgttgctttatctgtcggctcacctcatttgcttagggtagcatctgggctggaactgctgcaccttcccttaaatctaactttggcttctccagttcctgagccaggtgtgtgtttatgtgtttagctctgggaaaaagggcattagtgtctcctgcaggacactcacttcatcaaggctggagacagcaagaact

SEQ ID NO: 32702 - DNA, 2300 bp, Homo sapien
ttcacaaatggaacttcttacaaatagatttcccatccatgttaacttattaagtaaaattttcctgttttttaataaaataagttttcctaatctcaaatactatccaacagatgttagtcacaaacatacatcataagtgggaaagtattataataaagctcattagtgctgtttatttacctttcaaatgctattgaatttttacatgagtttctctataagttcattagttgttattaagaaataaatatatgattgaattttccaaatatatttgaatttcatagtttagcatttcatacgagagaaataatcagccaatgtttttgcctgctgtttccatgaagatttcatttatcttagaagtgattaatatagaatgactataaataatataaatttaaatagaatatacttttttttttgctatgttgtttgttaggctttacaatgttgtaaaaaaactgtaacaatcctctcagactggaatttttctttatcaaacttttcctccattttcaggaaggaacaatgattcagaagtcttgtagattagtcacttcttaagaagttagatcattcagtactgcatcttagccaactgtccaaggtcagcaaaatgcacagcatgttctgtttgatggccccaggcagaaagccacagcattcaaactattaatatctcctgacctttcaacttacaaatagaagcatccttgtggtcatttttttttcctgtatatccctgaaaaactaaggatctagggtttaagataagaaatacttaatttaatttaatttaattagtttttaaccacaatcctgggcttttatataaaagcacactgtttatttcttttttccttttgagatagggtctcactctgtcgctcaggctggtgtacaatggtgcgatctgggctcactgcaacctctgcagcctgggctcaaatgatcctcctgcctcaacttcccaagcaccagggactacaggcatgcgccaccatgcctggctaattgttgtattttgtgtaaagacagagtttctccatgttgcccaggctggtctcgaactcatggactcaaatgatctgcctgccttagcctcccaaagtgctgagattacagacatgaggtaccgtgcctgaccactgtttatttgtttcataaaattttcttaaacaccaattatgtgcaagttaccatgccaggcctctgggaaacaaagatgaatcagtcagatgtacctgcaaggagcttatggtctaactggggagaagaaatacagcaaaatactataacatagggtaaaaagtaagaagtaccacaagagaagcacagacaagatgatttgggggttccaaaaaaatagattattaaattttgtgggctggcagcagagaggaaggaattggtaattaatctgagaagatgacatttgagcttgctcttgatggacagaatttaaaatgtagagaggagatgtaagtgcagacatttcagattgaggaaagagcataattaagggcatggaggtcagaaaacatggggtaataaaaaaaggttcaagtagttcagtttagttagagaacatggtatatgaatttaaaaaatcactgaactaaaatcagaaaattactttgagaccaaatctagagggctattaacaccagatgatagagtatggactctattttacagacagtgggagcccgctgaagggaaatgccacattcaacttatgcttcagtgtcggattccattggaaagggggcggtgactggaagtgaggacaccaacccatcaggcgtgctctcatttagttttctagcggaaaaaaaaaaaaaagcctgaagcaaggattaaagtactgacattttatttgggaagcacaagcccaggccagggaagctgcagaaaaaggaaaaaagggaagtgagtataggaaacaatgcacagtcatgccttgcacaactggcttctgcttcgggatgagccattggctgatgaggcatgggaggctcagcaggtctgttcccttggcatgtgggacatcttgcagtggatgcagggagggaccatgcctctagcattctctgggaagaataaaggagaagtttatcttcccacctacctcccattgcctgtttttcattggtcaaaacttgtcccactaggaattaactccttcacatttccaagtttatatcatatgactgctccaactacatgggaccccaaaccccaaacctgatgtatgtatagtgttcctgtttcatccaagcctggaaatgagg

SEQ ID NO: 32703 - DNA, 2300 bp, Homo sapien
ttgtatttttagtagagacggggtttcaccgtgttagccaggatggtctggatctcctgacctcgtgatccgcccgcctctgcctcccaaagtgctgggattacaggcatgagccaccgcgcccggtcgacaaaaattttcttaacatgaatgcgtgaagtaaggctgtttggaatttagaaaagttgcaatttttgatggagagaaaaccaagaaggagttgagtgatggccgagggagtggacaacctcctactgccagggcctctactcctgaactgttatgaggttgcctgattcctcttaacaacccttcaggttaggggccagctgttaacttaattttattaccagggaagaaactgaggctcagataaagttcttttatcccacaggcacacaaactgctaactgatagagccagatccagccatgtctggctacaaagcctgtgtactttaacttctacagagagtatgtgcgaggtgaaccagtaaaaataacaataacaagtgcaatactaagaatagtaataatgatagttaacacagtgctttacatgtgtgatcgctttgaacaggattaagtgaacacatgaataggactggcagggagtctttctactcttcattagcgaaacaggagaggacatatacagtacttaggatttccactggcttactttgttttctgaaaaataactgaaaggctcaattagttttgttttgtcgcatttatcagattataacgttctggatgtgggtctggatgtgggtagttgggctggtgtgggattacatgaaatcaaacctgatatattcagaaagattcttccggtggacacatatgccttttgggttcgatattcaattttgtaattagtgatcactgttcctatttatttatttatttatttgagacggagtttcgctcttattgcccaggctggaccacaatggcgcattatcggctcatcacaacctccacctcccgggttcaagcgattctcctgcctcagcctccccagtagctggggttacaggcatgtaccaccatgcccggctaattttgtattttttagtagagacagggtttatccatgttggtcaggctggtcttgaactcccgacctcaggtgatccgcccacctaggcctcccaaagtgctgggattacaggcgtgagccaccgcgcccggcctgaatgggagtttttaatccgtacttttttcttattgaagttgaatgtcatatacccctctatttccctagatgaatccatgaaagaagtatgttgccctctatatgaaaaagcaagcttgtcttctgcagaaaatcagtaaccactcctttttacacataaatacccccaaatgaatctccgatgactgatctgatactagtctgcaattctagttttagcattaggctcactcctcatatttgggagaagatgtccaattctgtagtaatgtgtaacataaagtggtgtcaatttataaataatatcttctaatgaattaatgctcatttgcaatgatcacttccatacaaatttaggtaaagatgttattcagaattggattctctctatttaaaaatgtcatcctaatgtgcaactccctaaaactgttactacaaacaactattttgccactcagcctaaaaataaaacctttcacccaaatgacacatcttaatagccatattttaatctacgtaattttaaactattctgaaagaatccatttctagatgtcagacaagagttgaaactgggacagcagtttgaaggggctaatttaaaaacccacttgcttggagacacctcaagaatttctaggctcacaaggtgggtgaagtaaggaaagagactaagagctgaacagtgccgttctttgcgagcccccactggcgcaggctgagccggctgcggctagggctgcgaagagttaacgagggaccgagccccagcgccgcgggctccccgcatgctccctccgccctcccgtccccaccctctcgttttggcaagggattaaagtgctcccccctgtggcagcagtgacccagaaatgagtttgattcacatagtccttcctccataacaagccaaacgccagaccgagagtgcctccgtgcgcgagtgcccggtgtgtgcgcgccggcgagagcaggggcccgcccggctccccgcccgccgcggcccgaactcatgcagctccgagcgagcgagcggcgcccagcccagcgcctcggccgaacccctccgcagcaggtacgcgcgcgggccgcggggggcg

SEQ ID NO: 32704 - DNA, 2300 bp, Homo sapien
aaactgttactacaaacaactattttgccactcagcctaaaaataaaacctttcacccaaatgacacatcttaatagccatattttaatctacgtaattttaaactattctgaaagaatccatttctagatgtcagacaagagttgaaactgggacagcagtttgaaggggctaatttaaaaacccacttgcttggagacacctcaagaatttctaggctcacaaggtgggtgaagtaaggaaagagactaagagctgaacagtgccgttctttgcgagcccccactggcgcaggctgagccggctgcggctagggctgcgaagagttaacgagggaccgagccccagcgccgcgggctccccgcatgctccctccgccctcccgtccccaccctctcgttttggcaagggattaaagtgctcccccctgtggcagcagtgacccagaaatgagtttgattcacatagtccttcctccataacaagccaaacgccagaccgagagtgcctccgtgcgcgagtgcccggtgtgtgcgcgccggcgagagcaggggcccgcccggctccccgcccgccgcggcccgaactcatgcagctccgagcgagcgagcggcgcccagcccagcgcctcggccgaacccctccgcagcaggtacgcgcgcgggccgcggggggcgcgcggggtgggcgcgccgcgcgtgtgtccgcgcgtgtccgcgtgtgggtccgtgtgcgcgtcccggtcccgcggcggcgacggcggcggcggcggcggcggctgcaggacgagccgagaggctcagccatatttgatggttttgttgctttgctcgggagttctcgggagtaatttaatgccgaaggtcgctgcctagtggaaataatataatacgtcattaatatggcgccaaaagattgggttctcgatctgtagcgaggagggagggaggcagccgctgagcgcagcgttactatcccaccagtaacttgggcattgccggggcgggggccggaggaggaggagaggatgatttttggatcctgagaattgatctatgttggatcagtaagttttattatgattttttttttcaaatttggggggctgaagacttagagctatttcttcttttggatttgcgaagaacatgcggttttcaggtgaatcatcaattaaacgcgtttaggagcagaagcccagtttaagttggctttagtttataggttttttttttttttttttttttttagaaagccaaagtgcattaggctgcatgaaagtggaaagcatagtagcaacttggtagacagatggcaatggcagaacgcaggttcgcgtacatatatgaatccagagtgtgtgagaccgtgtgtgtggtgggactgtatttgtccaaacataggtgtgcgtaggtacatctgtgtgtggtggccgcagccctggctcttgtcaccgcgtcaccacatgtccaaaatattcattgcatcaattcaagggcagtgagaggggggtgggggtgggggtggagggacagtttggcaattagattcttccgaactgggcttccagtgatcagatcttttacttacagcgcgactgcttgtaaagtgtaaaaccccttaatcgatgaaatggggtaggagttggcgttggtagagcaaagtaccgattaatcgtgaacttaaaggggattgcaaattgcaacctttggcaccatctgcaaattgtgggggtggggtctcttggtctccttgcttccttaaatgaacgtgtagtgtgtaccccgggactgcaagttgcagagcccttcagtgcacgtgtcttgtgcctgtgagtctgtgtttgcgagttgggggctgttgttcggtagccagcaggctttccgggttgctcggcattggcttgcaaatgcgggagagggatggaatgtggaatgttgaccggggaaccgaatcctgtcggaacggtcccatttgctggagaaattcgatcccttccacctccttcccgctcccccccgcccgccttcgggcaggaggcggggctgaggacgcggctgctgctcaaagtggcggagcgcggcggcgggaggcaggtgcacggcacccgccagtgggggtgcctcaacttccgcgggcgtttaaatagcagcctctctcccctcccaccggtaataggtgacctggcggccgagggcggcgggggagggaaccgggggagactcgggagcgagcctccgcggcacgtgggcaggtgctgggtggccccggggccaacttttgtagcccgcctctggtgt

SEQ ID NO: 32705 - DNA, 2300 bp, Homo sapien
tgtgggtaaagggaaggagacttcaccgaagagaaaaaacccaagaagagttagacctgaaggcttatatacaattttaacagagggtgataaattgtgaagtgactagtcaaaggaaaagggagtttaggcttttttgactgctcttttgtaggcctttttagagtggagctttggttttttaaaattgctttcttgttctatcacagtggttctccacatttttctttttttttcaagacagaatctcactgtgtcacataggctggagtgcagtggtgtgatctccactcattccaacctccgcctcccgggtttaagtgattctcctgcttgagcctcctgagtagctgggattacagatgcgcgccaccacgcacggctaatttttgtatttttagtagaggcagggtttcaccgtgttggtcaggctggtctcgaactgctgacctcgtgatcctcccacctcggcctcccaaagtgcagggattacaggtatgagccaccacacccagcccggttttccacatttttttctccacaccattcctatgtgccccacttctattgttgtgtgtatgtgtgtgtgtgtatgttgagacagggtctctgtcgcccaggctggagtgcagtggtgtgatctcggctcactgcaacctccgcctcctgagttcaagcgattctcctgcctcagcctcctaagtagctgggattacagacacctgccaccacgcccggctaatttttatatttttagtagagacggagtttcaccatgttggccaggctggtctccaactcctgacctcaagtgatcctcccgtctttgcttcccaaagtgctgggattacaggggtgagccaccatgcccagccacatttgcattgttaacaccacatcatacatattgtgattcccaatgaggaggaggttgggatgtacttttctgagagggtggatgggtaggtaggtgatggactaccatactttttctcacttgaaaaagctccctttcatttttaggattcattgaactgacagaccagtgccctaaagatgtcaggttgatcagtaattttaatttggaaaagctttttgtatttgtttagagagctgccctgtgtgaatataaccgcgagaccatctgtataagttcattactggccattccgtctcagttcactgccttcttacctaaatgcagcctttctcatacttgagggtagtgctagaattctgttatcatcagctacctgggaggagttggccaggtgcgctgggtctttgtacaaactgacttcttattttggctggatttgggtctatttgtcctgaagggagctgaggtgaagtggagtggaaatagtgttggatttggaattagaagctccattcccacaacgtgaccttggggaagttgctgcttaacctttcttggctttagtttcctaatgtgaaagggaggggtctggatcaaaattgtataatgtctgtggttccttcctgttccctctgtggggttagagatggctggaggagacatttgcattccattacccgatttgttttgtttctttcgcctttagggttattttagtaaaatttgcctgagaagcataatcatgcccagtgcagtgtaaatattcacacatccaggcacaaccccaccccaccccccacatgtacgcataaaatatgaatctgtctgtagtgaggaagcacagtacagtgttcattgctgtggatttttttctgcagtgcttgctgccagtcagctaaagattcctggagtagttatagtaataatgtcacaggaatatagaaagaaacctggcatctttgggagacctactgatatgtgacttctccacccctccccctccttttttaacctggtttgttaatgattgcacctaattatgtatctttggtctttttactgtttacaattcaaatgctacttaaagccatttgtttgcttttgtttgctgtaaatcctgggctgccatctgaagcacaacttgatgattgtgtattatcatcttgggttaagtgctgtctcattgctttgcaggctgcctgctgtttcccggggagatcatgaaacgaggtcgccttcccagcagcagtgaggattctgacgacaatggcagtaagtcctgctttgttgttcttggagcctaccagggtttgggtcggggtaaaaacatgattttttaatgtaatgctttaaattgctgaggccctttgcatgtcaggcaggtcagagaaagccaaagcctggagaaacgtacctgagt

SEQ ID NO: 32706 - DNA, 2300 bp, Homo sapien
aagggccatgtattgtaatctaggacatagtaaataatcacaagatcggccgggcttgttggctcatgtctgtaatcccagcactttgggaagccaaggtgggcagatcacctgaggtcaggacttcaagaccagcctggcaaacatggtgaaaccccgtctctactaaaaatacaaaaattagctaggcgtcgtggtgggtatctgtggtcccagccactcaggaggctgaggcagaagaatcacttgaggtgattcttctcaagtcacttgagggggtggaggtttccttgagccgggattgtgccactgcattcccacctgggcaacagagccagactccatctcaaaaaaaaaaaaaaatcacaagatttttgtcatggtggatttcacagccttgaagggccaagaccttttgcgtctttccagggaacgtagcatagggtgtggcttgcagtagatgcttgtcctgccattaggctcaccacctgttgaatgggagtgataatgtagactgagctgagcatggtgttgtcttctactcgctcagttactcaagtgtttttatagacaaaatagacttccttcttcttggtcctgctttaggtattaatggccaaaacattagcaggccacaaggtggttttatggcatgagttcaggagttctcagagatcttttggaattgaatactaaattttagcttcacagatgatacagtttctgctgtgttgtaagcacattataaagaccagtgtaatacacttgactggaatctaggtgtcctgtgttaagtcagaggactcagcccaaagactcttcgcatttatgaatggtttaaataataagaactgggctaatccatatttgaagatactgttgaatacattggcaagattaattttgtaattttataacataaacggaacgcatgcttaaatatgtttgtcttagctgttattggtctttttttctttcttttttgagatgaagtctcgctctgtggcccatgctggagtgcaggggtgcaatctcggctgactgcaacctctacctcctgagttcaagcgattctcctgccccagcctcccaagtagctgggattattggcacctgccaccatgcctggctaatttttgtatttttagtagagacaggatttcgccgtattggccaggttggtcgtgaactcctgacctcaaatgatctacctgcaaagtactgggattataggcatgagccatcgcgcctggtgtttcagtcttttttgcatttggttaactatgtttttcaaccttgtagaagtaagaggatgaggagggataaaccatttaaaaatatttgagtgcccaaagtgaaatctgttttgagagaactgttttacctaccaagaaaggcaaatttttaaaaacatccataccattatatgaagtcatggttttgaagtcacttacgtgttagttgttatgtgtaatgagtataatgaaatgacttattcaacaatgtatgtatttaatatccttgaatccttttaaaatttaccttttgcttttccatttactacactgcatcttcactacctgaccataggaaaataacagtttcctggaagactctcccctttgaagattgtttcttagaaggatctgataagcatttaataaaaaattttggggccctcagagatggatgcatcgatgggttgattgattgatagattgagacacggtcttatgtcactcagcctggatcacagtggcacagtcatggctcactatagccccaacctcctgggctcaagcagttctcccaccgcaggctcttgagtagttgggactacaggtgtgtgccaccacgtctggctaattttcatattttttgtagagatggggttccactatattgcccaggctgaccttgagctcttgggctcagatgtgagccaccacgcctggccagtgattggatttatttattgtacaattatttattcattatacattatttttaagtataaataaaccagtactattttgtaatatttattaatatggatttattaaaatgggttttgtggcatttttaacttcaggaatgcctgaactagatgaatacaccatggagagggtcctagaggaatttgagcagcgatgctacgacaatatgaatcatgccatagagactgaggaaggcctggggatcgaatatgatgaagatgttgtctgtgatgtctgccagtctcctgatggtgaggacggcaatgagatggtgttctgtgacaaatgcaacatctgtgtgca

SEQ ID NO: 32707 - DNA, 2300 bp, Homo sapien
atttcaagtaagagagatgtaagtatttctattacatgtctgatttgaatatgagagcaacctgtctgctcctaagatgtcaggatttgtttccattttttatttccaggagtcagattccttgttaatgtaaaaatggttctgtttcctagaagttttgaatctgctatggatctaggtctggcccctcgttcttgagcttcactcttaatttcccctgggtggaacaatatcgaagagaggaggatgttagccacttccattcccaagttggtgagaatttctataaaggacacctgcttcttggattgagggtgtgcagctgtcagagaagggaagaaactaccttaactaggctgattgacatccatgtaatatttactatgagacagggagagtgtttttattctcaattctttaaatttaaaataagacaggaaatgttagtgacataagggattgttagagaaaaaaagatgggaagatccgtaaagtgaatttgttaggggcaggagaagcctgacttggcattttcctgtttaggccaggagatattaccataatgcaaatgtgaaagcctgtgttctgtctctcttaatgcttcatgtcctcttgcaaatgagactgccttcagcacagctggaattattagggtttagtctacacttacgctctacaccagagtgcaaaatcttttgtgtcttcacaaggcttgttgatgcttgttgctgtcctcactgccaaaagaaaaggttggtgacctttggactttttccacttaaagtagggtgatactactttattgagtttatggggaaaaaattataaaggtgtcaggggaagagtttgctcataatgggatatttttaggaaagtgaaggcatgcctgtaggagctaatgggaaagatgtggtcagataaagatgctaccactcctgccactgagattacttaggaggtcttgtccacatattcctgaagaagggtttaattgtgtatttggtgtgctgtgtctgacatctgtgtttgcaggtccgtgtaatctaatcaggttgaccaatagaagattttaggactgaaggattaggggagtttagagactaattctttaagttttgtgtattgagtgatgacaggtggggaacaaatctaaatgttgattactgagcataggttagggttatgtgatccaaagcagtcacacatcagataggaagtagagccaactcttagcactgggtcttttcagttacaagcgaatcgggagagggcaataccagtttttcaagtgatgatgcagagaactggactggagatgtctaaccagcaaatcattggcaaagctggaaatttcctaggcattcgcacacctcatagcaacacataagctacctgctaactccaggcctttcagtgagttcagtgtgcagttgacaaagacatttactaggattcttggtaaccatttggtcttccagtgggcctggtgcagggggctccactttgatgacccttggccccatgtttacccagttcagcctcagaagatagttgataaagtgcagaagtggcttctgaactgctttaaagccattggccatccaagtaatagaagatattgatgcaataattagcaaagtcgactggcaagaggttgcaagttttgacttggacaccaatggcctctgtgccgggatgggttaggtgtgatggaggaggcaggacttttgtaggagttctctaggtgtccctcccactcctgtgggtccctaaccctcttcgatgttgcttctgcctatgttgagggctatatgtggaatccttcttatctgcccaaaaggagatcagagattggataaaatgtttaaagtacctattgatttcaagtatctgtcaaggccctagtaggagtaatttctcttaggtaaagaaatttaaaaagcaccaaagtactgttatactgtattgcttacttagaatctttattctctacattctaggttcggaacctcacttacatggtgacccgcagggaaaagattaaacggtctgtgtgcaaagtccaggaacagatattcaatctttacactaagcttttggagcaagaaagagtttcaggtatgcattaagccctggtaggtcaaagtatagggcaggggtttgtaagctttaacactgttgaggaagaaataatcatttcttaattttcttatagaagaatttaagaagcatagacgttcatatttaaaggaagtctttaatttgaggcatcatgtttaagggaaaaagctatgaatttg

SEQ ID NO: 32708 - DNA, 2300 bp, Homo sapien
aatgaatcttggcttcaggagagctccaggcaggagttcccatcagggtcattttttctggcacactgatcacatagcctagcctggctatctagttatgcctggtgaaaattatcagtaaacaaatcaacttgcaggctgcaggaagagattcatactttaaacagcacatcataaatcccactgttcgtatactggctaagagtcaaggctagatattcaggcatccccagagctttcccagtccagctgtaaattaatactttactacacagttcctgacaatttaatctaataaaaggcaaaatgatgatggtagctgcattgtataaactacagtaaaatttattaaatgctttaatatgtattaacttatttgaactttataattctgtgagctatatgggaaaattatttttatctccattttatagatactaagactcagagaggttaagtgattggcccagttcacataccttttgtgttggtagagtcagttctagaagacaggccttctgccttttattttagattttttttcaacacttcctgccaaaagtagatataaagaactatttacttactttctaactgttctatggaacagtgtgggaataaacaaatatatttaaaaccactacttatttccccccaaaaaaatagtatttgtggtttagtgaacataatataatatgaatgttttcagaattttttttataatgacttccaaattaggtctaagtccagtgcctattttttttctttttacttatgtagcaggagatttcatttcaaaggaatatgagataatatatatttggaataattgttcataaaattatttttctagaatttttcacacatgaatattaaattgggtgtgcaagatctaggtaaaatatcaagatatagttgtactgtaacattctctctctctttctctctctccctctctttctctctccctctctttccctctccctctctccctccctctccctctcctccctcccactactccttcccctcccctctccctccccccaccttttccttttgccctctcattcatttatgattgatttacttgtctcctatgccccaggtactatgctatctcctgaaggtttaaaaattaataagatgtgatccttgcttttaattatcttacattgtatattttttatgaactcacagttccacaaaggagaatctctatagtattgattacaatacagtgtgttcaattaataatgtataaagtattatatattataagtattgagatatagggtttttgccaaggagaagttagtgaagacttgaagatggggagatttttgatctaggtcaaaattaaggaattggttagaaaaagaagaagactagtccagccaaacatgtgaaaaaagaaacaaggatgtgtttagaaaacagcgagtgagtactttattatacttggaatataaattacatgggggtaattggcaagagatgagactctttgaggctagatgttgactggccttatatgccagtagaggagtgtagacttatatgtagaggagtgtagactttatgccaaaaagtgtggaatccaggaatcattgttaaataggagtttttattactagataatttttttaacagataagatacattataaagaatgaacaaaagaggagaccatcagtgaagagatgagtttggaatctactggaatagtcttatgagtgataatgaagctaaaggttgggccaaagaatgaaaaaggaatacacaattgaaagacaacttagaaatagactcaggccaattagattgaaataaggaaagaatctaattctagaattttggtcttggcaaattgcctaatccacctctgtttttggacatgaggtctttgagacgtgcagcatggtcaagtgaattgtattaagacatattactagttagtgacagaattgggtccctgcctgtagtgttctccacattgtaccttgcttcctgtgtctccaacaggtttttttttttttttccttgatcatgctatgaccttatcttgcttacagtttacaggacactctaatatacattatctatttttacttgttcagcaatcccatgaaacaagtagaacaagcaattattttatcctttctgaaggtaagaaaaccaaatcagtgtggttgctatgctttttcagagttttctcagttttatccttactacttaaatatattattccttaagtttttcctttaaaaatatataggattttataactggtagaatca

SEQ ID NO: 32709 - DNA, 2300 bp, Homo sapien
aaagtttttatttgcttgatttcctacctgacttttaaaacaaaacaaaacaaaattgtttattagtttatggccagtgaagaaacctgctcaaatacagtggaaacactatgtaaaatcaaatgttaatacccttaaatgtgacctgttactaaaataggtgtcaattttgtctatcataaattaatcagaatagaattttacaacaggaaggtatcttaatggttattaaaagacttttttctacccaaagcaagaatcattctacactctttcaaagtggacatctagctttagcttttgctttacacgtctattgacaagaactcattatctcacaaggccatctattccatttggaaatctacctcttttattcttctgttggttcttttattgctaggtgcattgagcactatggaggaattctaattctgacctcttttctatgtattttgagaggaagctctttaaataagttggttttcatacctctcttcagctctcatttacagacttttcaaattctggttaatgaatattcctattattgtaattataattagaaatatctacctaaagaaattgtaaaaatacttatgtgatgctttacagtttacaaaatgatttttctttacatgccctggcttgaaaaaaagtccacatgtaatcaatctgatttgttggacttttacctctgagatttaaaaaccatttttcatattaagttctttgaggactgtttcctcatttaggtcaatcaactaagcccacaaggttgggtttttgttttgttttcacctgaataatatcattcttttactatagctacatagtttgatgggtccttatacaagactttacaaatagcacttcattcttttttccctggttatctatttaattctgtctttcagtatatttacagcctctcccaactttgtgtcgtctgtacaaataatgtttaatagaatcataacagctaatcaaacaatttttaaaatgtggggcatgagaatgtttttaaaaaaggtgggcagtaactcctgtgccatggtttgtattataggttttgagtaggtttgaaagtgacgttccaatattggacaaggtctctctagcatttagaatttctaatcacttataattttttatgatctctttcttcaagttttaaaataatatttaataaatgatttctagaaataattatttgacataaaataaacagccacattaatttcagcattgccactttaattttttaatcatttaaaaaatttcttagtttttcaactactaattcacacaatagtaataagaaacactactaattttatctaaacttaggcataatgattttagacttgattttagtttaattttaaatatgggttataaacaacaaaatgctatttatatactccccttaccttcccactgtaggatcagctatttgattttcaacaactgaccaaacaacttcatgttactaatgagaacatggaagtggtaagtatacttatttatataaactagaaattgtccctataaataatcatatttatttatgttaatataaatcaacaataagcatgctgcacgaaattagataatactgttttttcttttgcttttgctttctcattcaatagcatgacacagtttacagtaccttttggagatctaacatctctctgaaatatatcttaatctggaaatcctcttaggattcttagtaaggtctccttagactaatctagacagtgagttcctcaagagtagagtacatgcttaattttttttatttcacctgacacactgccaggtatttaataagaatagtgtaattgtttaatgaattaatagcccattgcctaaaaagttttaggaaactaaggaccatgtgttggtatggtactcctaaatttccctataagtttctcctaaaataaatagaattagtctttccagttctgctctttaccttcttattctctcacttttgttttctttactttcttggaatgttatttttacctcattgttgagtaatagaattatgacacttcaggtaattcctctctctttcccttcttcattcttgcttagttactctgctaattcttgttagtacctaataaaaatgtctttgtataacaatggatttgtgctatcaaaagtaagtatccaattttattctactttaaaaatttttcttttttaaccatgtaaaaaattattaaaccaatctgtacctattctgttaacatttgaagtgtctaattacatacagtttt

SEQ ID NO: 32710 - DNA, 2300 bp, Homo sapien
tggggtggggatattcccactgcaaacctaagaaataatgctaatgttattgtgtcattatagtgtcattaattattttagataacatataccatgcacttaatatgtgccagacactatgctcaatgctttttcatcatctcatttaagtctcacaacttcaagaggattcttgtgttcttatactcattatataaatgagaaaactgaggtgcagaaaagctaggaaacttgctcgaggtcacagacctggaaagaggtaggctgtgagcccagacagactaaatccagaggctgactgagttcttaaccactggtctataatgctaccaaaacggaacttactacctttttcctaacttccccgttgctcaagcaaaaactaagttgctctctacctctttctctcaaatcccctgatctccagtctccctgtgcccaacttagtttacttcttacctgaatgatgacagtagacaactaactgcactctgctataatgcatattccccgtaaaaatcagaccgggccttctaaactacaatttgatcatgccactctcaactgaattcctataacccatgcaatggtccatactccttagcacagagaagacagggcccttcaccatccagcccctttctacgccttcaactgcacttgccatttccctatataaatattccaattcaatttacatcaatattacactcaaaccagccgtattgcaagtctttaacaaagcatattcctaatcccctcagtgtcacaaatattgttctatttgggatgcctagagtttttcatatagtaaattcatatttgtactgcacgtttcagcccaatagcaccttccttgaacatattttaataataatcgtgtaatagttaatatttgtttaacacaatgtatcagatactattctaaatcctttacatattttaatattcatttaatctttccaacaaccctatgagactgtggcaaaagagccagcagttgctgtcacttcaatatattttggaatacatttccctccccaaattaaattcttggaggtaaaaactgtcctgtttatctttgcagcagctgttcttccatagtgtctggtacataatagaaacaggagttcaataaacatctttttaataaatggccagagagctgtgcccctagattttaaatgcacacttggaaactcctgctggccattagccttctaatcttcagagcacgagaggagcataacaaacatgtttagcgtctagtagaattctgtgtaagctacaagtactaccacacggttctgcttaaatatacacacatcctcacgtataacatcaaggttttttttttcctgcaactaacttctttaactctttaccaatttaaatgtacccaaccagcattcaaaaaagatttgtcggtcaacgacgacgatattaaacattgtatatgaagtctcaaaaaaacatggagcttactttgctctctcagaaagtcgatttctgcagccatttcgatacaattttagtttagagctttcaccacctttaccttcctctgaaagacagagagcttgctgtgcgggaaaacaaaactaagccaacgctcggttggttgtcaagcgctccagcggtgcaatctgcatcctactcacgcggcatctacagccccgccacgcttctttcccccgcgccccagacgagtccctggccctggtgagagactgaagattgctggggactccacgttcaaccgaatcccacgctggtgggaagaggacgcggtcgatacaggcgtcccgcgggtcactctgggtctcgtcgggccacctaggagagtgccgcgggagcttgacggcagcctgagagcggcgttctacgcggagcggcgggggttggagaggacaacgccaagacggctgggaagccccaggccagcagcggaagtccactcggcccgccctgcgactttgaaaccggtgccccggaccactccttggagacggtggcgcctcttgcgtcatcacgcgggcgttggagcttacgccatcgcgcgtcctagagtcctagcacgctattggctggctgtcaagcaatgggaggagtcgtgagaacctggatgacagcgggctgagccaccggcttggcgcggcggccaaactggtgggacagtgtctccaggtagtgaggcccaacctctttaaaacaaacaaacaaacaaacaaaaaaccaaaatgcaaacgtgagtagagaatgaaatacacagtttaaatgccctcactatctttgggtta

SEQ ID NO: 32711 - DNA, 2300 bp, Homo sapien
tgttctgatccttgcttaaacttctaactttgtattcttcctggtactttgcacatagtactgggtgctcaatgtcaattgatcaaccaaatgaatgttagtgaaatgtcactaattttcaatctatacaactttaggggttttctttattgcagaaaagtcatataaaaacattaaatggtggcttgacaagagttacacacaaactacatacatttctgcttgtcattccttgtattcaatttatactaatagatacttttcatgaacatccactgaattctttcattccttccatcagatatttaatcaactctgtgttccaggtattatgatggagcctggagacaaactacaaaacatgacagataatgcaggaaggagcatgaagtaagtactaaggtggcacctaccttgggagaagtggataaagaactcaggagatgtgaaaaggaggaacatgagaggggatcctttaaggataagtgaaatcatcacaattttgtttcctaatgatgaaacttatgttgaaaatactccattaaaattcaactactaaaatcttgtaaccacaaacacaaacgcaaaaacaaaaaactatcatgatcataattatgatcatgtaagctaaaaaattcgagtgcagacataaaagttttcacctgagatattcactttatgtaaataccactcatcagttatagccagaaggtatttgcttccatccagtttgggtgtaagcgtagagttaagtctataattatttatttgatgccaagtagaaatacgacaatatacaaggttcaaatgtgggagaagttacaagcaagtccttggagagtcagtgagatgtttatgaagaaagagtcatatactgaacttcaaaaacgagttggaccttgcacactcaattttcccttagctataacgtttatacaaaaagtttttgtgtaaacgttatagctactaaaaatcagaacaagttcaattatcaccaactcaaagctggattagaccttttcaatgattattaagctacacatccatatttaacagctagtctttagaggaagggaccatctcattctattaacagtgagtattgagtaaggccttcagatgcctaactgcatatatttgaatacatttttaaaatttcttaacacatatcgctaaggttactttgtttatatgacattatgagtacgggacaacaaaactcttaagccgttaaacagaaagccaaatcaagctgcatctatgacatgcctgtttagtgaaactttacttcagtccataaaaatacaatttattaaaagcacaaaactagtggctagcttcaagttaacatttttgttgctagtggtgagatttcctctaatgttaaatgattttttttaaaaaaatacgttttaagtccagacaaaattaattttcaaaaatgaaaattgtaatctatccacaaatgtaagttttaccgttttgttttttgcaaaaaaaagtaccttttatctttccttatatttgaggaaacaagcttatctttgaagaagtagctgctgaatttgcaagatcttttgagtacttctaactacacgctttattactacacagttaaatatttaaacaacagttgtctcctttgtctaaagacccacaaagaccgagaaggtacttaccttcttgagatgaccaaatccaaacctagaactcctccagaggtacagccttggtgggagattctgaagacgccagtctggcttctatccctagccgcaggaacctgcatcttttacttagtccagaaaggcttagtatattagtaacccaaagatagtgagggcatttaaactgtgtatttcattctctactcacgtttgcattttggttttttgtttgtttgtttgtttgttttaaagaggttgggcctcactacctggagacactgtcccaccagtttggccgccgcgccaagccggtggctcagcccgctgtcatccaggttctcacgactcctcccattgcttgacagccagccaatagcgtgctaggactctaggacgcgcgatggcgtaagctccaacgcccgcgtgatgacgcaagaggcgccaccgtctccaaggagtggtccggggcaccggtttcaaagtcgcagggcgggccgagtggacttccgctgctggcctggggcttcccagccgtcttggcgttgtcctctccaacccccgccgctccgcgtagaacgccgctctcaggctgccgtcaagctcccgcggcactctcctaggtggcccgacgag

SEQ ID NO: 32712 - DNA, 2300 bp, Homo sapien
taaagtatttaataatgaaatatttctttatattgcagttattcatttgaaatgccatttaaatgcctctcagtgtctaacattcagaagccattgctccttttgtaggctggacagagagctccaaacaattgatttaaatgagatttgtagatattcttttattttcttttattttgatattcagctaaatctaatgtagaaaagtctagctgtttgcgttctgttttttaagaagagtaatcatatacctttgtgtgttacatttcaactaacatgccaaaatttgttattgaaaaatatgattaattctcataaactgccatgagaagtaagaaaatttcaactattgtgtgcttatttttaccctacaggtgagaaaactaaggcaaacattcataatttgtctagagaacagtaaagaacttggatatcctaaaattttgcccttagttttaattttattagatgataatattggttcattttcataaagtgatgtcaacactagatgaatagaataattagattctctcttgttaagaaattacacagtaatcattgtgtataaaattaatagattttaaaggttaaaaaaattcacagagtagtttggtttcttatgtatcaggatagttaataatcaagaatcatagttttgcttcaagcagtcatttcctgtaacagtttattaacctctaggaaagcaacaggaagaattttttttatttgcaagaatttttactcctaggatgtactcctaaggctgcataataacaataaaaataatcagaagactttcaaatggaaaagaatacttggcttctgttagaatagtttactgaaggaaatcctccctgaaaagctctcaaaagagtacctgtatagaaatgttttaatatataggtttttctagagttagtgaatttgcttcatgtaaatacatgaaatcctttggttcttaatgacctggctagtcccaattgtacactgttattagaatttcccttggaaaatatactgtgttcctttttgaaaacatgatgctgaatgaatggtagaaagcaggaaaacacaagaggcagacatgttgaggaccgtgtgtgaaaaaaatagacaaagattaaaatctttagcctgttgactagttgtagactgtctatgttttgcattttttattttcctaatgagctaccagatagttttcttacagaaataacctttattaaagtggttgaattcagacttggaaattgttgcttgctttagtttttgaaactcgttttataaaaaactccaaataacatggtatctctctgaccttttttcatactttgtatcatctaaccaaatgaagtattttatataattgtttctttaaagaatataaaaagcaatctaaacatgaaactttatgcatttggtggcagttgtctggagagtggtaaacccaaagatgtcatttctaagcaactgaacacactggctctccctataattatccaatattaatattgcatctttttttttttgagacagagtctcgctttgttgccacgctggagtacagtggcgctatcttggctcactgcaacctccacctcccgggttcaagcgattcccctgcctcagcctcccaagttgctgggactacaggcacacgccaccatgcctggctaattttttctttgtattttagtagagacggagtttcaccatgttggccaggatggtcttgatctcctgacctcgtgatccacccgccttggcctcccaaagtgctgggttacaggcgtaagccaccatgctcagcctgcatcttttaattatttggaaaattagttgcaagcacacacattccatgtataaaggatagtgaagaaaataacattcatgtttttcaaacactcatgaggaatcttaattttgacagccacggacagcatttagtgcttttactttctggaagaagaaatgtgtggaaagtaagtaaataaaaataggaggcaaaatcattacgtacacagtaatacacatatttctatgtttaaagtgtaagcccaattttatcttttgtgtttcacatgttgtttctgtagcaagaacttcctttatcgttcagaatgtccagaggagagacaaaatgggaaggcaaagcttatctcccttggagttattttccaccaaatgtgacaaaattcaattcatttgcaattcatggatcaaaagataaacgaagttatgaagctctttaccctgtacctcagcatgaactgcagcaaggacaaaaacctgatttg

SEQ ID NO: 32713 - DNA, 2300 bp, Homo sapien
ataacaaacagcttactaacttcattgtaaatgaggaagtaggtccctgttgtggagtctgcaaggatcactccaacaaagctgtgaaaattacccttggagaggcatatgagattaaagggtgaagcgtatgaggttaaaggtcccagacagggaggcactgcatggcctgtaatccacaccagtcacccaaaagcctgaagtttggtcatggtagacaaggagaaatcagagcaaggacccatgagccaatgcctttatggagtgtcatgggtcgggcaacttgtggcaggcaggaaggatcctcactgggtaatttcaatgtaattgagtcaacatggaaaggaggaagagctagaatggggaagtcattaggcttagggcttgaatatacaagttggggacgggtacccaaatacaggcaaaaactaggtaaaagtttaaaaataagcagggcaggtgccagcatgaagggagtcattgaggcgacaaataacagctttaaattacgttatcataaatcaagaactgccttagaaagtaactggaaatattgatcaattgctaggagaaagaacagttcagcatcaactgagtcaaagctcaaacatacactgtgagatagatgcacatatgtattcatgtagacaccactggatataattctctatgataagcccaatgtgatggctcatgcctgtaatcccagaactttgggaggctgaggtgagcagatcacctgaggtcaggagttcgagaccagcctggccaagatggtgaaaccccacctctatcaaaaattcaaaaattaggtgtggtagtgtgtgcctgtaatcccagctacttgggaggctgaggcaggagaattgcttgaacccaggagatggaggttgcagtgagccgagataatgccattgcacttcagcctgggcaacacagtgggactctgtctccaaataataataataataataataataataataataataattttctaacaatttttttaggtttttgaaaaatcccttgcttctctttctttgccttagtttcttcataaaaatgaggatgatagtatctgcttcactgatttgttgtggagatttgattagacaggacacataaagtacttttcacattattggtacacagtagctcatcaaaagttgattgatatgccatgtaggtgctttttgtggtttccaaatgaagcatgataatttaattttaaaatgacccttgatttttccctgcttggttctagctgtctgggaagggaggagggggagagaccaataaaaaaaaaaggagtatgtggcgtgaaggtggaggaattatggggagctcaaaatgacttttttacattcaagatgtttcactgatcaatcaggctgaaaacgcaaaagcttgcctttaagcaggtgacaatagaaagggcaaccttccgaggcaggcagatcacctgaggtcaggagttcgagaccagcctggccaacatggtgaaactccatctgtactaaaaatacaaaaaattagccgggcgtggtggcgggcgcctgtaatcccagctacttgggaggctgaggcaggagaatgaatgaagcctgaagtttggtcatggtagacaaggagaatccaggaggcagaggttgcagtgagccaagatcatgccattgcactccagcctgggcaacaagaaggaaaagaaagaaagaataaagggcaaactttaaaaaaaaaattgtcagggattaagctaactcattatgtaaagagctcactattcttgaaatgggtcattttctgagagttatcaaaagaaccagctccatttggctaacacaatatcttctagaagttttaattaagactaaattagattacataccaagatgctgtgttagctagactccaaagatggtgctccagtgagccatggttcctgatagtcacaccctatgcagtctcctctccttgactgtaaactaattgtgactcacttttgacccacagaatgcagtggaggtgatactatggtcataatgaccaggggctgggtcagaagaacttcagattgagcctcttgaaacatttgctcttggaattctccctctcaggaaactaacagcctgctatgaagcccaagccacaaagagaggccaaggtaggtactccagttaaaatcctcagctgacttttaagccaatagccagtgtcaaccaccagcactgtaaatgagcaaccttggaagtccagccttatttgagccttaatttgacagtgtgtagctccagcca

SEQ ID NO: 32714 - DNA, 2300 bp, Homo sapien
tgggtgttatcattacttccattttgcaaagcaagatgctgagacttagaaacaggaagtaatgcttccaaattcacatagcaagtcaatggagtggccagaatctgcatctaggtttgcacaaatctatttttagccaattacatggaaaattcagaaaatctaaattgatttcatttgatgtcatagatagaatgaaaagtttccatagactgtggcttttcccaaagaaaccaaattgacaacagaaaatacatataagtttatacatattatgaagcaacttactgttaagttataagtgatactttttttgcatataatttgagtttaatagaccgaatttgtgccgacgaaatctatttattactgcaattgtgatatagtgctagaaaatctgtagagtccaagggagtgttttggctgccattgtcatttaagcctctgatttgctttggagagctggagggcactgtgtgtccccttgccaacttggccaggtgcatgagtacatctctaaaataaatgtagaactactttcacaggaattgaaaaaatgtttcctagatttcttttgacaagaagtcattatcagttgctttggggaagagttgcagaagcttcatgaaaagtatcaggccgttatttacttttcatactgcaagccttggtctgaaagggcagacagataataataccttttgctcatgaagagcaagtctcactgtgacctgcagccactttgaaaaacacagaactgagctcagaacatggattttattgtagatgttgttctcatttattacctgtttgaggttttgattctgctggcaacattggccttataatactatatatgtatgatattataccataataccatataccatataccaataccaataccatataccataccaataccaataccataggttgtgtgcatgtagtcccagctacttagggggctgaggtgggaggactgcttgacccaggaaattgaggctgcaatgagccatgtcataccactgcactccagcctgagtgacagagtgagaccttgtctctaaaacacaaaaattgtttgtagaaatgggggtcttgctatgttgcccagcctggtctcaaactcctggccttagtgatcctcctgacttggactcccaaagcaataggattacaggtgtgagccaccacatctggccagaagatactttagtggaaccaatctgggctggtaacaaaccacttacattgtgtgtgtgtgtgtgtgtgtgtgtgtgtgtgtgtgtgtgtgtgtgtgccttgcaatcattaccaaaaattttttttctttttacaacaacttcttgtccaacagacctttcaatcatttttaaatgtacaatttagtgacattaaataagtacattcataattttgtacaaccagtaccactctccacttccagaatttttcatgatttcaaacagaaactctgtacccattaaacaacaacttcccatttctcctgcccctcgtaatcatatttaaaaaatacagaaaactaatcagatcaatgtcatatataaggatgttcagactatctttggcaatagcagtagaaacgtagaggttcccaaaacgctgtagagaagactgcaaaatttccctctgtttctgtttaccaacaccaatcatgaatctgaaagtggcctgacttaagagtaaggaacattatgaaacataggtggaacatgtgtaatggtaagttccacctgtcctcttttctccaaaaacttggaagaggaaaactcaggttgaataagagcagaggcagaatggttctcatgttagagataagtcttaatcaaagagggaaaagggcaaaaataagttctcaagtagagagagaaaaaacgcctagttaattaatgaggtcttgtgtccacttgcatatccttgtagtggagtcagatgtaccaactcacagctcacatggtagtcattgtgagaaggataagcacatcacatatcacatatcctcacatatcatagaagataatgtaacagaacatctgaattatataactaactttattttgattcctttattttcaggatgcactcctaagagaagactacctgaaaggcgtgtacactggtctagcagttgagatcagctagtgttccatctatcttctgtcatgtgtgagtataattttcaagagttaaactcagctttagggacactggagctctagtttcagcaaaattcacaatcaacctctggacatggtaaaattaccaagttaatgtca

SEQ ID NO: 32715 - DNA, 2300 bp, Homo sapien
tatctctctctcctttcgcgctctttccattgcccgctctttctatctctgcccatcagtatgtgcccatctgtgtctgtgccttgggacacatgtgccctgtgcgccggagggtgggtttcttgcaggtcggcctttcttctggtcagcctctccccgcgtctctgcctgggtcatgtggccggttggcagtcggtttcccggcggttccggtttgggggtctgtgagggcctgggcaatgccggcatctgcttcggagccgcaggggttttcgtcccctccccatccggagcagcctctttgctaggctagatccagacgaccgctccccaagcaaggacaacggcctcccaggcgctcattgtccacccgcaggagggtgcccgcagaccttcaagaagatggttctcacgcctctcgccctctccctcatggagaaatggagccacagctcgacgcagggacggagaaggaagccggcaaggggatggggcaagcatctctgtcactcaaaggctggccttcctggccgagtcacccgtctgacactcctccccggatgcccggggtggtggcatggccccgtatcctgcctgggctctggcctctgctctgtcctccctcttgctgtgtctgccccgtctctgagaagcctggcggcttcttagtctggctcaacgtcttcaacaaagaagacttcgcagtccatcagggagaaaccccgtgggcgtccgtgtcatgatcgtttccctctccacacctctttctggatgattgggcaggtgtggtgaacctggagctctgggcttccatacctgtgtgggacagggaagctctcttggtctccatggcccaagtgatggctgcgcgctcggtccaggaagagggggaggcaagcccaccgttccccacattggccttccaggaaaggcggtgttgcatcccacctgcacttcctgtctgatccttgagggccaaccggtccctccgctcctggggaaagcgccttctggcactgaatcttttggctgccacggatgtcagggagccaacgggactgggttttggctgggtgcagcggaggttgcgtcaggggtacctaagcggtagcggcgtgggggtggggtgtacttggtccaaagctctgggctcctctggcgggcctccctgaatgtggcctggactcgcgcacaggccctgtctcgcaggtttgcaggtgcgcttggcttttcctccgctttgtggggcaggtctccagtggcccccgggcgcacgcctggacatcactgtccgtctcgtcgtcgccccctacggcctcaaagacacacgctcactgcatgtgctcttgggggacgtcagtgccacgtttggtcacacgggctccagctcggactcgcctctgtctgcctttgcaggtgtcgccggaagctgcgtcgggatgccggagcccccgggcgtcggagatgaaggcaggcccctgctccacccaggaaggagggaggcagtggactcatgggtcagtgccgttgcagacgacagcacgccttgcggccttggggatctttccgtgccccggcgagaccctttccgcctcactgcattgtaaccccattcccgatcagcgggtgggagccatcatcgaatcccaagaggcgtccgcgcagccaagccagcaccccgaaggtcctccttcaccgggaacagaagcaggagaccgatcaaggaggtcctgacgacaggacccctatgggtccgaccctgggtctcccgcaggcccctctggtagtcctcttcccacccgccgcctcgggctgcgccgcagccgccgccgccgcaacctccaggaccgccgccccagtccccgcagccgccgcgtctccgccattttttaaagggtccgcagcctgactctgctgagtaaggaggggtggggcgggtgagtcggcctcgccagtgcgcatgcgcgaggccccagccgccgctttggtcacagtgaccgccaccgttgccgggggatgggtccctgagacttggcgaagtaggagccctgtgtgattgtgcgtcagagtcggggctgacaccagtcctggccagggcacttaccaggacggtctccggaggccgggattcgcggagggtccaccagcagtaagaaacgccaggaggaagaaacctcagacagatcgccggggacgcagcgcgggatcccagcctcaggcgtgcacggacggtgtgcgggtgagtctccccaaaagtggcgcccttgtgatgtggaggacaggtctgccagggtgtccgt

SEQ ID NO: 32716 - DNA, 2300 bp, Homo sapien
atgtctgtgtgcgtcttggttgtgtgtgtgtgtgtgtgtgtgtgtgtgtgtgtgtgtgtgtctgtgtgcgtgcgtgcgtggcgtccgtgtgcccacttctgtctatctcttacgtctctctctctctctcccccccctcgctctttccgtcgccctctctttctatctctgtccgtctgtgtgtgcttgtgcctcgggacacatgtgccccgtgtgccggagggtgggtttcttgcaggtcggcctttcttctggtcagcctctccccgcgtctctgcctcggtcgtgtagccggttagtagtcggtttcccggcggttccggtttgggggtctgtgagggcctgggcaatgccggcatctgcttcggaaccgcaggggttttcgtcccctccccatccggagcagcctctttgctaggctagatccagacgaccgctccccaagcaaggacaacggcctcccaggcgctcattgtccacccgcaggagggtgcccgcagaccttcaagaggatggttctcacgcctctcgccctctccctcatggagaaatggagccacagctcgacgcagggacggagaaggaagccggcaaggggatggggcaagcatctctgtcactcaaaggctggccttcctggccgagtcacccgtctgacactcctccccggatgcccgtggtggtggcatggccccgtatcctgcctggactctggcctctgctctgtcctccctcttgctgtgtctgccccgtctctgagaagcctggcggcttcttagtctggctcaacgtcttcaacaaagaagacttccctgtccatcagggagaaaccccgtgggcgtccgtgtcgtgatcgtttccctctccacaccactttctggatgattgggcaggtgtggtgatcctggagctctgggcttccatacctgtgtgggacagggaagctctcttggtctccatggcccaagtgatggctgcgcgctcggtccaggaagagggggagacaagcccaccgttccccacattggccttccaggaaaggcggtgttgcagcccacctgcacttcctgtctgatccttgagggccaaccggttcctccgctcctggggaaagcgccttctggcactgaatcttttggctgccacggatgtcagggagccaacgggactgggttttggttgggtgcagcggaggttgcgtcaggggtacctaagcggtagcggcgtgggggtggggtgtacttggtccaaagctctgggctcctctggcgggcctccctgaatgtggcctggactcgcgcacaggccctgtctcgcaggtttgcaggtgcgcttggcttttcctccgctttgtggggcaggtctccagtggcccccgggcgcacgcctggacatcactgtccgtctcgtagtcgccccctacggcctcaaagacacacgctcactgcatgtgctcttgggggacgtcagtgccacgtttggtcacacgggctccagctcggactcgcctctgtctgcctttgccggtgtcgccggaagctgcgtcgggatgccggagcgcccgggccttgaagatgaaggcaggcccctgctccacccaggaaggagggaggcagtggactcatgggtccgtgccgttgcagacgacagcacgccttgcggccctggggatctttccttgccccggcgagaccctttccgcctcactgcattgtaaccccattcccgatcagccggtgggagccatcatcggatcccaagaggagtccgcgcagcccagccagcaccccgaaggtcctccttcaccgggaacagaagcaggagaccgatcaaggaggtcctgacgacaggactcctatgggtccgaccctgggtctcccgcaggcccctctggtagacctcttcccacccgccgccttgggctgcgacgcagccgccgccgccgcaacctccagcaccgccgccccagtccccgcagccgccgcgtcgccgccattttttaaagggtccgcagcctgactctgctgagtaaggaggggtggggtgggtgagtcggcctcgccagtgcgcatgcgcgaggccccagccgccgctttggtcacagtgaccgccaccgttgcccggggatgggtccctgagaattggcgaagtaggagccctttgtgattgtgcgtcagagtcggggctgagaccagtcctggccagggcagttaccaggacggtctccggaggccgggattcgcggagggtccgccaggaggaagaaacctcagacagatcgccggggacgcagcgcggga

SEQ ID NO: 32717 - DNA, 2300 bp, Homo sapien
gctccaggattctgacgagtcagcttgaagagctcaaaacatttcatttcaattctgcagatctgaagaaaaagaaaggggggaggggtggaagtacagatgcaataccgtattaatattcagatacactataatctccttttcattgatccacaggtccctttatacactgccgctccattctcagccgcagacgtgatgctaaaatcattttaactgcagcggttttcgcttggctttggccagtcttcaatttactgcagctggaaaaggattagccatttttgctggaatcctttccttctaagcgctcaaaggcaggacccatcttcatgaaagagccaagtgcgggggccggggggacccggcgttgcggggagttggggcgcggaaatcagggcagtagacgtgcattcgcgggactctcagaagcacgtctcaggctactatcacgcccatggacactagccctccttaactccttgccaggaggaaatggcaacgtatctccaggtcggaaaacgactctacttttcccgcaggttgtggtggtgtattcttgggtcattcattaccagaaagcagcaaaggaccttcctatctctttgcataaaaaggagattgaataggggcttctttcgtgaataaacaaccaattccttgctagtggcccattaattaaaaatatatatttatagatctttccttagagaactggcattctatccactctccagcattaaagagttcgcgctgtgttttaacttcacaagaactagctatgtggatgtgccgcgttgcccctgcgcctccggaaggggcactcacagctggtcaagcgcgtccttcggaactcggggaggctccgttggggcttacacagagctaagccctgggccagggaggatggatgcaagtaccgtgcatgtgcaaacgtgttcgcagatacccgcagcggtgcacactcgggcccctcgtgtgcacgggccctgcccaccaccccgcccgcgttcgccgccgccccactgtcctcatcccgcgggctgaccccaggattggcagaaatcagtggtctaatctagcatggtgggtaaagggatcgatctccaattgccaaaaaaaaaatagaaaatagccggtgttcccagccgctgcgtggcacttggccgcacaaggcgcagggatatcagaggcgctttgcagcgcttggcggtgctgtgtgccggatgccccagagcccggcgttaggatggcgggcttgtaggaagcggctcaaatcaactcctcagtcactgatgaacgcgctcacggctcgaagctaggtcctcgagtgagttaatctacttggtaagtattttgtgaatatgtattttgggaggaaagaagcacgtcgaacgcgtctgcccgtctgtaagcgctgtcatccccacatcctttagcgtgaattcctccgctttttaggagtcacctccaccccctactccgtatgcttcgcgcctttcctcacggccccgtcagaccccctcacctttagattgacacatgccatataatactcacttttaaaatgccctgccagtctctgctagggtcccttaattaggtaacccttgccaattagtgggccctgcgctactttttcccttctcgatgatttatttccatgatgcgtattagggaaaataccttaaaggaaaaagaatgttagcatcattggaaatcccgctcctaggagaggatatcgcagctgttgctattatgttttcgcatttgctgatgcaaacaggggaacctctctattccctccccattacctgcggctggggactgggaactttccgcggcattgtccccagccagcgcctcgggacctgcggggctgttctcgctctcacactcacactcaccccggccgctcgggcgagagttctgtcccgccccgcccggctgccgcgtgacgtgtctgtttggcggccagtttggccaatcatcggcagctcggtgggtggtgctcctgggcgattggttggcagaatgagggcgctgcgcaaaaacggagaagccgagcgctcggagctcagaaactgccagcccagaccacaggctcagaggctgaagcaggaggaaggaaggactggaaggaaaaagagacaggttagagggaaagaggcttgggaagaaaacagcagaaaagaaactgctcattacacttacagagaggcaagtaacggtggagatgaggacagagggaaccaagactctgaaagacaaaaaatacaaatagagcgaaagaggaaaaa

SEQ ID NO: 32718 - DNA, 2300 bp, Homo sapien
atctctggcgcgttgtcattagcatccagtactcgcactagcaccttgcagtgcgcaggcacggcgttggggcccaggtccttggcttgcacgtacacttggtacactgggctctcttcatagtccaactcgccgcttacctccagtctgccagtgcgcggcgagagtccgaaaagctcccgcgcccggggcgaaatgtggctgctgaaggagtacacgacctcaccgttctggccctcgtccgggtcggtggcgttgagctggatcacgagagtgcctgggggagagttctctggtagggacacagtgtagacgggttggtcgaaagcgggcacattgtcattggagtccagcactcggatggtgagtagggccgtgccggtgcgctgctgctgggggggcaggcctgctcccccgccacctccccctccttctcctactcctcccccacctcctccgtccaccgcggtcagcacgtagcggtgcaccgcttgctgctctcggtccagtggcttctccagcaccagctcagcgaatcggttgccatccccctgggtctgcacgtccagggagaagtagctgttgggggtgatctcgtagtcgcgcaaggagttggtgcccacgtctgggtcgaatgcgctctccaaggggaagcgagtgcctggcgtggcgctctcagagatttccaccgtcaggtctggctccgggaaagagggggggttgtcattaatgtccagcacctcgatctccacctggaacagctccagggggttctccagaaagacctccaggtgcaggacacaggaggggctctgtttgcagatttgttcgcggtctattttctcgttcacgtacagcacccctgtctccaggttgaggtctaagtaaggggtccttgagttgggcaccgtctgaaacccgcgagccgaaagttttgtaatgtccagacccagatcttcagcgatattccccacgaaagtgccatgttcctgctcctcctgtaccgtgtagtgaagctgggaaaagactccttccaccatccagagcaaggcaaacaataatagcacaatcatctccaaaaggaaaggaagtagcttcccgcagccagtcagccacccaatcacctcccccaccaccacgaaacaaaaaaaaatctgaaaaaatacaaataaaagtgcgctacgtgggggctcctgtggctttctgtctttaaaaatcttactccttttgcttcattttagagcttcccgcaatccagcctcatttttttttaaatcttagcacaggaagggtgacaggcgtcccctttcctcatctgtaatctttccactgactaattaataaaataacaataatacaatagtcagcgtcctttattccgacagtcttggcgctggcaaatcccaaagaggaaatttcgatatttcaagactgtcctcggtttgtcttcttgctgatgggaggagaacgaggaggaggaaaaagaggaggaggaggaggaagaagaagaagaggaagaggagaaggaaaaggagatgctgttggcaccgttaaacatgcctcttaatgtcaacggctggcaaatgcaaaagggcttaaaatcagcgatataattttgtgccggaaaagcacagaacggctctgcagcttaaaactttcattctcttcatttctccggatggatgttcttcttgacatttttttcctctttcgctctatttgtattttttgtctttcagagtcttggttccctctgtcctcatctccaccgttacttgcctctctgtaagtgtaatgagcagtttcttttctgctgttttcttcccaagcctctttccctctaacctgtctctttttccttccagtccttccttcctcctgcttcagcctctgagcctgtggtctgggctggcagtttctgagctccgagcgctcggcttctccgtttttgcgcagcgccctcattctgccaaccaatcgcccaggagcaccacccaccgagctgccgatgattggccaaactggccgccaaacagacacgtcacgcggcagccgggcggggcgggacagaactctcgcccgagcggccggggtgagtgtgagtgtgagagcgagaacagccccgcaggtcccgaggcgctggctggggacaatgccgcggaaagttcccagtccccagccgcaggtaatggggagggaatagagaggttcccctgtttgcatcagcaaatgcgaaaacataatagcaacagctgcgatatcctctcctaggagcgggatttccaatgatgctaacattc

SEQ ID NO: 32719 - DNA, 2300 bp, Homo sapien
tcctgtgctaagatttaaaaaaaaatgaggctggattgcgggaagctctaaaatgaagcaaaaggagtaagatttttaaagacagaaagccacaggagcccccacgtagcgcacttttatttgtattttttcagatttttttttgtttcgtggtggtgggggaggtgattgggtggctgactggctgcgggaagctacttcctttccttttggagatgattgtgctattattgtttgccttgctctggatggtggaaggagtcttttcccagcttcactacacggtacaggaggagcaggaacatggcactttcgtggggaatatcgctgaagatctgggtctggacattacaaaactttcggctcgcgggtttcagacggtgcccaactcaaggaccccttacttagacctcaacctggagacaggggtgctgtacgtgaacgagaaaatagaccgcgaacaaatctgcaaacagagcccctcctgtgtcctgcacctggaggtctttctggagaaccccctggagctgttccaggtggagatcgaggtgctggacattaatgacaaccccccctctttcccggagccagacctgacggtggaaatctctgagagcgccacgccaggcactcgcttccccttggagagcgcattcgacccagacgtgggcaccaactccttgcgcgactacgagatcacccccaacagctacttctccctggacgtgcagacccagggggatggcaaccgattcgctgagctggtgctggagaagccactggaccgagagcagcaagcggtgcaccgctacgtgctgaccgcggtggacggaggaggtgggggaggagtaggagaaggagggggaggtggcgggggagcaggcctgcccccccagcagcagcgcaccggcacggccctactcaccatccgagtgctggactccaatgacaatgtgcccgctttcgaccaacccgtctacactgtgtccctaccagagaactctcccccaggcactctcgtgatccagctcaacgccaccgacccggacgagggccagaacggtgaggtcgtgtactccttcagcagccacatttcgccccgggcgcgggagcttttcggactctcgccgcgcactggcagactggaggtaagcggcgagttggactatgaagagagcccagtgtaccaagtgtacgtgcaagccaaggacctgggccccaacgccgtgcctgcgcactgcaaggtgctagtgcgagtactggatgctaatgacaacgcgccagagatcagcttcagcaccgtgaaggaagcggtgagtgagggcgcggcgcccggcactgtggtggcccttttcagcgtgactgaccgcgactcagaggagaatgggcaggtgcagtgcgagctactgggagacgtgcctttccgcctcaagtcttcctttaagaattactacaccatcgttaccgaagcccccctggaccgagaggcgggggactcctacaccctgactgtagtggctcgggaccggggcgagcctgcgctctccaccagtaagtcgatccaggtacaagtgtcggatgtgaacgacaacgcgccgcgtttcagccagccggtctacgacgtgtatgtgactgaaaacaacgtgcctggcgcctacatctacgcggtgagcgccaccgaccgggatgagggcgccaacgcccagcttgcctactctatcctcgagtgccagatccagggcatgagcgtcttcacctacgtttctatcaactctgagaacggctacttgtacgccctgcgctccttcgactatgagcagctgaaggacttcagttttcaggtggaagcccgggacgctggcagcccccaggcgctggctggtaacgccactgtcaacatcctcatagtggatcaaaatgacaacgcccctgccatcgtggcgcctctaccagggcgcaacgggactccagcgcgtgaggtgctgccccgctcggcggagccgggttacctgctcacccgcgtggccgccgtggacgcggacgacggcgagaacgcccggctcacttacagcatcgtgcgtggcaacgaaatgaacctctttcgcatggactggcgcaccggggagctgcgcacagcacgccgagtcccggccaagcgcgacccccagcggccttatgagctggtgatcgaggtgcgcgaccatgggcagccgcccctttcctccaccgccaccctggtggttcagctggtggatggcgccgtggagccccagggcgggggcgggagcggaggcggaggg

SEQ ID NO: 32720 - DNA, 2300 bp, Homo sapien
ttttacatagttttgtgacttaattacacatgaatataaaatctataattctatatgaatatatagagatatagaaacatctgaactggtaaagaataactataaaatatgaaagctctaaatttaaaataaatttagagatagaatcatggtacattattgtttcagtattccatgtgaaaattttatagcttaaatgtagtcagtgtttgattaatgaaaaaattcttcatgagtcagccttcaaaagttaagcttgccttttacttttatgtcaacaatattaattattaaatttagtaagacgcactttcctttcttttatatattttttctactgttgtgtatgccttgttagaacacattcgagagaggaaaaaaatcagagaatataagataatctttcaagcaaaaaacagaattgtcacagctcccctcgccctctaaactatgatatcaaaacatcatatcaaagcttcaacattatatcaaaatgtttgcccagttcaaattagaaacctgttttgaaatactttccttaatttttaactgatcttatattcaatgacagtttgagctgcactgtgttattaaagaatagactaaaacttaacatttgacaaatgttcttcatcaaattttatgtaacttaagtggaaatttttccctagatttaactttaaaatacatatatatacacacacacacacacacacacacacacacacttaggtcctgatatgtacatttagagtgatatattggtatcactcatttgactgttatcaaattagatattaatatatcatattccaatcagttcatatatcaaaataatgtatgtaatgttccagccttttgaagtctctttaaacatatatgaagctaacagatcatatgtaatacaaaaagcacataaattcactaagtgcagcagtaacattttcttaaactttggcattactacattaatattttgaatgatagactattttagtaaggaaatgtttatacataatttaactggaaaaaagtctgtttgttccaactcttttttttagcaagaaaatgattttcttgttgagtcactctgctttaattaaaatgtttcacgcatcattttgcaatcatgggtgaatatccacatccatcttccttactgcatgcattgaaaataagattatactcacttcatgtatagtaattatattgtcatttacctcaaagacattttctttaattatttaaccttttatatcattgtatataatctcctttgaaccaacttttttattatatatttgtgtattagttattttcatatatcctaggaactagttatactaacttacattttagttatcatcaatctacaaaaccaaaaccagaacttcttcctaatttgcgggacaaatagaattgtttaaggataaaatgctacattattaggtcattaatcaacttatctgttgcatccaaagtaaattagaagttacaacagagtaaggatatgattcttgtaagttggttaaaatgttttcttccaatgagggggactataaaatggaaagtgcaaccaacaaataatgaaggtttctaattaagcatttactagattaatatatcaaggaattttaggataggttttctctttaatctggtcattctaatatccaatcttacataattttatatacatcaaagaataatatccatcgtattagacagtatttcgtcaataaattatttcagaaaaaaaaatcatgtcatttactccttgttaacatggttagttttagagcagtcaaagtcaaaaaaaatttcctgtggaaacagtgtcttaatgtttcaaaggtatgtcaaaagacaatttttagaaaatatttcatccacatgtagaattctaatttttaacgtgtgaacatagtttggtgaaatcatcttaaatcaaatttaaatatcacatcagaattacttcacagatataatagcgtcaatgatatatgtatcatcttttcttggcaaatattaaggaaatatgtgtattttattttttaaagatattaaatgcactgcctttatcaaacattgcaaattaagaactatagtagaatatttaaatattttaatttctcattgttttatttgttaattggattgtaatttgccatcagattctctgtattatagaagctatcttgcttcttcaataagaggaggaaaaagaatctcacaattcccaatataatctttaacaactgtacgttaattgtaccattttaccttctaaacattattta

SEQ ID NO: 32721 - DNA, 2300 bp, Homo sapien
cgtggaaatctattctcaaagaaataactcctcaatcttccatctgctattctcctactcctcagagattatttaggccccctcccttccctacacatcaagcttggggatttgcctgcccaggactggcaaattggctttactcaacacgccctgagtcaggaaactaaaatatctcttggtctgggtagacactttgactggataggtagaggcctttcccacagggtctaagaaggccaccacggtcatttcttcccttctgtcagacacaattcctcggtttggccttcccacctctatacagtcctgtaatggaccggcctttattagttaaatcacccaagcagtttctcaggctcttagtattcagtgaactaatggtcttttaaaaacacacctcaccaagctcagctaccaacttaaaaaggactggacaatacttttaccacttgcccttctcagaattcaggcctgtcctcggaatgctacaaggtacaggccatttgagctcctgtatagatgctcctttttattaggccccagtctcattccagacactagaccaactgggactgcgcccccaccaaaaaaaaataaaactgttatctctactatcttctgtctagtcatactcctattcaccgttgtcaactactcataaatgccctgctcttgtttacactgcctgtttacactgtttctccaagccaccacagctgatatctgctggtgctatccccaaactgccactcttaactccctcttaaagtaaataaataatctttgctggcagggctatgctgaacctccttaggcactctctagttagatgtcgtaggtcctcccaattcttagtcctttaatacctgtttttctccttatcttattccattgttttttcaattcatacaaaattgtatccaggccatcaccaataattctataagacaaaggtttcttctaacaaccccatgatatcaccccttatcacaaaatcttccttcagcttaatctctcccactctaggttcccacgccgcccctaatcccacttgaagcagccctgagaaacatcgcccattatctctccataccacccccaaaaattttcgccaccccaacactttaccactatttcattttatttttcttattaatataagaagataggaatgtcaggcctctgagcccaagctaagccatcacatcccctgtgacctgcaggtacacatccaaatggctggttcctgccttaactgatgacattccacaacaaaagaagtgaaaatggcctgttcctgccttaactgatgacattatcttgtgaaattccttctccttgctcatcctggctcaaaagctcccctactgagcaccttgtgactcccactcctgcccaccagagaacaacccccctttttcctttacctacccaaatcctataaaacagccccacccctatctcccttcactgactcttttcggactcagcccgcctgcacccatgtgattaaaagctttattgctcacacaaaacctgtttggtggtttttcattggctcctacaatattattattaccacttttttatatatgaggaaattgaggcacaatatgattaagtgacttgttgaaggtcacagaaatgactaataatgcttatctctttcaaactaaacaccaatcatgcacattttttctttaaaaaaaacagtttaagggttaagattgtgaaaggaaaatatcttgggccccttcaagctgggaactgctcagggcaaatctgcctccattctattcgaagtcatccctctgctcacagagatagaggcacagccatctgtctctcacctaccagtgacctggaagcccctgaggggagggagagggggcggggggagggcttgctttcagttttctccacctttctggaggaactaacgtacttcttccatatattgattgatgttttgtgtctccctaaaatgtataaaaccaaactgtgccctgactaccttgggcatatgtcatcaggattcctgaggctgtgtcatgggtgcacaccctcaaccttggcaaaataaactttctaaattaactgagacttgtctcagattttctgggttcacattttggtaaccacagggggattctgagtggagatacccctgacctttgacaaatatcctgttggtgcttggtaccagcatgagctaactttatggttcaaaccaataggacaatttgccgtgcaccccctccagagaatccctgagctccaaaaatttggttgagatc

SEQ ID NO: 32722 - DNA, 2300 bp, Homo sapien
acagagtttgacagatagaaaatcaactatttgggggctaaggtaaaatttagttatcttactattgcacccaatggactcacatacacacacacataatattttttcctattcatctaatatagattttttttttaccttaacctccatcatggttatataagtccttagattttttaaacttttattgtactctattctttaaaaaggtacaatatgctacaggtttgttatacttcaataacagggaaatgaattaattaaattaattgggtgaatacattaaatgacttacttttagtgaatctattccttttcttcacaattggctgcaaaagtccagtcgtttaataacaattgctacccacacccttaacccatcacagcctgagaatcatgggacacactgtgtgggagggagccgtggaaagccaggatgaatggggacagcatgtgagggcctggtcaggcacctgcacctcgtgtcactggcttctgggagcacagaatcaggctgggcacagaggcctcttctccacccaggcaccagcaggggagctccatccaaaggaagccagagctccccgccaggctagccaaggagcatgaggggccaggcctggctggaggaaggaagaggagaaaagaagcgactctgatctgtcaccacacttcggtgctctggcctgcctctgccacatccggctgctggggagctggcctcggccctctgaggggccactggcactcaaatcggccttgatttttcggccttctcagatctcactgcctcatcatgggctttctgctactctggtagctttttggcctcttggctttttcgccttttgtcaaacatgatcttctggtacaggtacttctccggcttcttcatcatcatagtggccaggcgcctggcctcgctctcctcctcctgggccagctgctgctgcttctccagcttctcgtgtcctgctatcaccctgggcttcttcccctccgttctctgctcctccggtgctgccagccaggccttttcctccgtttccgaaccactctccccttcattttctcccccttcatcaccatcaccttggttgtcttcctcctcctcctcttctgactcattcaagtttcctgggtcctctccccgctgcagagccagaagcttcagcttctcagatgggatgtaatctccttcctcctcagtcacaaagggtgaagaatgtaggggtagctgcattgcagggaagtactctgctccagggaagtgcagtctagcgttcacggagtcaaacaaccactggggctccacgtagtgtctgccaataactgaggtctgctgcccaggccagtcgacaatctggtgggtgctgcataggtgggacccatgcacaaaggcttttcccaggatatgtccccccccgcaaaactcctgatgacgaaggctagggcttcaggggacacctgtcagttaacgaagaacttcaagccctcaaaaagcttcttgtgcttctcctgcgcctccagctccttcctgtggtcctcctcctgcaccgccaactccccattggcgggaaactcatccacctcggcctcttcctctgtgataggcaccaccgcgcgggccaggctggcactgagggcctccagtttctccactgggctctctgagtccagcgcgtaggtgccctcactggctttcccctctgcttgggcctgaccctcagcttgaggggatagtgaacgttgagcgactggcagaggctgaagttcatcaatgaagcccagtagggtgctgtagaattaggtgaaggtggccatgactctgtagtccacgtctgtccggtggtcgtgggagaaagcacagggggtgatccacacgatgggctgtgccagcacctcagcctggtagtaaatgcgtttgatggacaggaagaccttgctcggggcacaggcagcgatgatgtaatacgtgaactccgctgcgagcctgcagcacagcggaacgatctgcacatggcacttgtcagtccgggggaaggtggaaaagaggaagcacgtggagaaggcggagccgcccaggtccccccgggcgtcgatgaatgtggggtaccattccttgatgatgtggtcatgtttgtagtcggccttattgtcctttagatgttccacggtgttccgctcgctcttctcataggcctcccggggcttccggacagacaccttgcattctcggaccttgttgacgatgaattcttggatgagaaacctgatatcttccatgaggtaagaagttt

SEQ ID NO: 32723 - DNA, 2300 bp, Homo sapien
atgagtcaacttggctatcatatcatacctagttattcaatcaaacacctatacctagattagtataatcaacatgcacagtcagtggactaaaagattttcttagataatctggtgggtcgattcagtcagtgaaagtccttagaatggtactgagttttcctggaagaaaaagtattttactgttagagtgaagcttttgcttatggttgagaatttccatcttttcttcctgatgtactactctacagatctttgactgactagggggctctagaattgtttaagccaaaactttacaataaatcccttaatttatatcttctactggttccatttatctggctgaactatgactgaaaatgttagttatatatttggtggcacatctaagattaaacaataacccaaacatacaatgaaattccctcccccaaaaatttcatagtctaagtattagactgagttatatagatagacatatctgtgcattggctcatttaaactcattctgtaattatttcattccagaaaaaaataacccgacacatttatagatcaatacaaatttgaataaacctgacatcattaatttgctttaaaaaattattctagaaaaatattaactgaacccagttaaggcaactgagggatatatggaaaaggtttatacaagttaagtgaaaatcagacttaatattatagagattacaaaaaatgaaccacatcaatgtggcacacacaacattaagaatgataattttacgataccattcgtgagataaaaaagacatagcaggagaataaaaattagagctgaagaaaataacacaacattgtgaatagctatggttcttacattaacgaaaaagtgatgagctataatatgcatgctcatgagctcttatctatccatgcccattaatctcactcagtttgaaggatatcaaaccaacaacttcttaagaaagaaacaccagtctcctgatagtctctacagtttctgaaatttatataggaatcaacagagaactttgcaaaatgaaattccatttgctcttctgatcacaattcgatatgaaaataaaagagaaaaagaaaagaatataaggaaattgagctagaataacacattgaaaaagaaaaagcaggtatcatccccagaaacaataaatacatcttgagaagcaatatggtgattctctctgtaaatgtaccttcctttttcttaaaaactgtgaaagcaaaatcaaatgatttgctttgtgcacctggcaccagacacaattagtaatttttgagtatccttaggaagcacagctcttttggagaatgtaaatgctttcagctcatttcaataaaagacgctctgtccctttttgagacaacggatttggagcagttagataaaaccaggctccctatgctcagaatgtgattacagctgctgtgtgggcagagaacagagagcacaggggccctagacatcaacctgagccctgtgatatgctttgggttaacaaggggaaactcaggtgatgcttccagatttcacaaggcagttagtgcaaataggaatcactgaacaaagtggggctgccttcattctccaagtcagttgcaacaatggcatcaggctgcagcctcaggtacactgaattgctaattaaggtcttagcatatggaacttgcagcaatctcacttgtgtatactaaaataggagaaaaatcttatgaaactacaggaaggtttttgcttagctttctctcaaaatgacagaataagttgttgatgctttttgtctctgcctgcctctgagttatgaaaatagcattttcaatttcgcacattatctcttcagctatcacgaacaatgcggtccattttcctcaagttccttgtcatcagcaacacctggaagcaagttgaaatttagattgttttgctttgttttatttatgtttacttagaatgttacacttttccgacaaagaattctttaaaatctaagatcacattcaaataggtaagctatttctacttcttttaaagttaagtataacatcaaaattaatagaacagggaggagccaagatggccgaataggaacagctccggtctacagctcccagcgtgagcgacgcagaagacggtgatttctgcatttccatctgaggtaccgggttcatctcactagggagtgccagacagtgggcgcaggccagtgtgtgtgcgcaccgtgcgcgagccgaagcagggcgaggcattgcctcacctgggaagcgcaaggggtcaggga

SEQ ID NO: 32724 - DNA, 2300 bp, Homo sapien
tagcaaggtacttgaatatagccatttaagactacgagagtgttcaagaagatctgtagtgcaaggtagtctattaaagctaatgtctggaaacttgcattcacttttgccacattttattgatcaaaacagacagtatccctcagattcaagacaaggaaatataaacttctcttctttatatgaaaattttcaataaatttataaatgtttttaattctgacacagtcacaaaagtagatctcatttggtaaatgttttaaagtaaatattataacattgcagctaaatgtatgaagtaaagagcttgagaatttgagaacccggtggactatcagtagggctatagcttagataggaaaaagggctgttagataaggcagaggagacagacaagagttagatcatttaggacattaaagtcaggataagtaaattagtaactaaatattgcaaaaatgtgattccctaagtaacacatttaaattggatgtctccagcaaaagaaaaaatcatcagggtaaacagacaattcacagaatgtgagaaagtatttgcaaactatacatttgcaaaggatccagaatctacaaggagctcaaaaaaaaaatcagcagaaaaaaaacataatcccattaaaaagtggacaaatgacatgaatagacaattcttaagagaatatttacaaatggccaacaaacatatgaaacaatgctaaacattgctaatcttctgagaaatgccaataaaaaccacaataaaatacccccttacccctgcaataatagccattattaaatatcagaagacaacagatgttgtgtggatgtggtgaaaagggaatccttatacatccctggcaggaatgtaaattagtacaacttctatggaaaacagtatggagatatctcaaagaactaaaattagatctactattctatttagcaatactactactgggtatctatccaaaggaaaagaagtcattatatgagaaagacacctgtgtatgtttatcacagcacaattcacattagcaaagtaatggaacaaaactaagtgcccatcaactgatgaggggataaaaaatgtggacttttactcagccataaaaaaaatgaaataatgtcttctgcagcaacttggatagagttggagatcattattctaagtgaagcaactcaaaaatggaaatccaaatattgtatgttctcacttagaagtagaagctaagctatgggtatgcatggacatacagagtggtgtaatggacattggaaactcagaatgggggagggtggaaaggggtgatggattaaaaaaactacatgttgagtcacaatgtatactacttgtgtgatgggtgcactaaaatctcatatttcaccactataaaattaatccaggtaatcaaaaaccacttgtaccccaaaagctattgaaataaaaactatatataaagaaaataaacaaattgggtgtctcaccaattacatttctttcaaagcatcgtttgcttgtttatcaacatgtgcagtatactagtaaaatgtatttttgtggtttttataaatttttgtctttttctatgctttatctatttgaaagcaattaataaagtggcagagggtgtcgatgtgtttacctctgcctctccagtgcctgacatagtactggtaatatagcttgtattcagtagatgcttattgaataaattcttgtttggaataaataaaaattgccgctttattaaaattttgtacataaatgcagagcagagcatctaagaacaactactgtgaaaaattttaaagaattcagttggtcacaaattcagtgaagtcactatggctattaagggattaggtgacaaaaaaactgaataggatgcattaaaaatgaaaaggttaaatagaggagtggtgttccaaacgtgccagtcagatcacattggcaacgtgagtccagctctagtcatatttttagagggctagagaatgacatgagaatatgtaagtgtgacatatgaaacacttgaaggaacttggaatgttcagcttgtaaaagcctgagggacaaatataattgatatcttcaaacgttgagcagctgtcatatgtaagatttttccctctacttttctcaagaactttgattaataatatgtcaaaaatatattttacagttaaagtaatacttaagcaatcagaatgattactctataagaaaaaaagaattttaaatgcttctgccggtttttctttaggtttttatagttgcttcttcctcttacacctggg

SEQ ID NO: 32725 - DNA, 2300 bp, Homo sapien
agttctacatggctggggaagccaaaggaaacttacaatcatggcaaaaggggaagaagtcacatcttacatgctggcatgcaagagagagccagagccttataaaaccattagatctcttgagaactcactcactatcatgagaacagcttggggaaaccacccccatgatccaatcacttcccacctattctctccctcaaggcatggggattaaaactggagatgagatttgaatggggacacagagccaaaccatatcaccatcttttctttaattgcttcaaataaattaaaagttatggttaggaaatactctctacccctaggttgtaaaaaatttcaatttaattattattttaatacttatatatttaatttcaaaactctgacccatttggaatttgtcttgacagatttggtgaggattatacacaattttctcttttccatatgatgaattattgctttaaacattattaattagtaaaggctccatcatatcacttaataatagcaccaattaaatactaacacctggaggtctggaggtggctgagacctattctatctgatgtgatatattttgctgtgaatctgaaaactatatatacatatatcatttgtcttatatttaggatatagaggcctggaaaccgagagatggatttaaaagtacttcctctcaactgtacttcaaatggcccttcagattcatttttctcctgtttaataatgtcagctctgttagtttagagatctacttcccaacagaataatgtttccacccagggacacagtggttgcatttagtggtaagtcaggattgtcatcctagttttttgtactttctgagtctctgagccaatagagaagttactgtactggcttgagtgatcagctgttattattaagaagaatgtgaggtggagagggggcaggagcagtagctcaagcctaaaatcccagcaaaagatcactggaggccaggagttcgagaccagcctagatgacatagagacctcatttctccaaaaaaaattaattaggcatgatgatgcacacttggaaggctgaggtggaagaatcacttgagtcccagatgttgaggctgtagtgaactgggattgctcccctacactccagcttgggtgacagagcaaggcagaaagaaaagaaaagaaaaggaaagaggagaaaagaggagaagagaagagagaaaagaaaagaaagaaaataaaaggaaaaaagaaaagaaaaagaacgagggggttcctgttacatataacggcaaaggaggagagtggatggagtctagaaaattgtttagattaccatttggtactttatgtccagtggtaaaagttagtggaagactatgtcaactaaatacaaacaggagaactaaagctcatcatgtgtcaaaataagggttttgagtcaccctggcaagcacagacccttcagtaggtattttgactgagaacaatggaaaatataacagctagtggctgctggaagttgtaagtaacaacaatgataagattagaagaactactgaaatgtccaaatctgaggcactattcaagagtcattcatattggattctatgtaaaggcacacactcacagcacaaaactagtgctagaacaaatatgaaatatcaccccaaaagttcttcagtgcagtctcctaagctatgatttcataactaacaaggactgtgaaaatgatacaaattttctttgttctatagtctgtctatgccatgatggtggtcatgaaaatcaaatttatcagctcccaatttatcagctaaattgacaggatgtcaatttagatttgtacctgagccacaggaatagtgatcatcaccaaaagatgaaagaactctttcgtaggggagaaagataacccatccctgtttatgggtaagagggttgcattatatcaggaacatattactgttgcaattcctgctgctttattaggtttgtttgtggagtttcctagcgggagaattaggaaagatatcatcaaaaggttccttctgaaaacattccagttccctttaagtatgcctttggtgttgtggattctagaatgctaatctttgtctctccatgattcccacatagcctgggtcctggataggatttagattccacagatactctcacagtgccatttggctgtagaaaagaactaaatgtgaagaaaagcaggatataaaacatttatttgctggcatgtatagaaatataactggtgtcattctgctgtcagcatgtcagaagatt

SEQ ID NO: 32726 - DNA, 2300 bp, Homo sapien
tgaagctctttttcacaatgattatttctgttcaagcccactgtcagaaataaaagagctttttattatttttactttttaagcataaaaaaaatccgtatcaaggtaatcaaatcgattgctcttgaagttttttggggggtagacttatcaaattctgaaagaaaattttcctagaactaatggaattaggttacctttgaattctcaccccaactttgaatagtcactaattcctttctttgctcttttggtgtttgcaaaggggttcgctaaagcctgaattgatataattattggctcagattgttagagatctaggccagatggctatgggtttctaaagtcccccttgcttgtggtagttttcctagtttgcctatagggtttggggatcagcaatttgaaagggctacaaacttgtaaaacagtattattcatgggggcagaatgttcatcagcgtgacccagtactaaatacattcattataggcatttctattctgcacaatttgccacacagcactgatttcaggagggggaaaaaaagacaatggcttataaaatgcttttgaatgcctaaaaagaaggagaattcacgctgagactcctctgctttcttttttggaaagagccttcttagtgactttagctgagctctgctgagagtaagcaaagtggaaaaatcagaaaattactttttttatatgtttctggggggcaaaatagacagtgagaaaaaataaatggaaaaaagtgacaatgacattctgtgaaacagcaaatatgcaagcggatgaagacagctgaggaataaggaaaaaggtatgaaaaaaagcagcaaaaatggagccacgatgataaacttaaaaggaattgcagagcagaaagaacatcataaataatcatattttcaaataagaataccgtatcagtttctgtgacctggatagagcacaagcctcccatgatatttcctagcattttgatgcatacaaaatgcaattttcagctcaggcatttgatttgtcagtgtaaacaacctttggggtttttaaaatacatatctgaagtgttttcataaataatgcatatattataaaaatttgacttgtaaactattgagtccatgtcccccctgtattcactgcaaagactagccatgtatagatagtgccttttggtagaaattggcatgctaaagcttgcagtgtcttttacccaagataaataggatttttttgaagtacaggacaaagaaatattacaaacaattttgcccaaactcaaggaaagaaatcatacaaggtagaactatattgttaattagttccaaattctgaggtgttcccttaagtcttgctaattaagagaaatgaagagtgcaagatagccctttttttatcttcaaagaataaagatgaaagaaaacagaaaatgaaacctctttacttgctccgttctttaaaaacagagccccaagaaaatctgcttgtgctcctggaaggagaaaggcccaagtatttacagagggagtggggaaggaggtggtctgagaagcataattagaagcaagttttcaaattgtattaaattcctccaccaacaaaacgcacttagaggtattttaagttaaactagcacttaaggactatgaaaagcaagatgattacatgtctgtggcagaagaaagggcaattaagaaaacaagaagaatttaacgtgccatataaataaaggcgaccagaagttgatttaaagtttttcttctgtaatttgtctcccctttgtcatggcacgctcagagaaagtgaatgcagtagattgaaaggcggagggggagtggggaggaagaaggaaggaacagggaaggactggctcccatctcctcccccagcccccaccagcccatctccccttctctccctcgcgcacccacccccgccttcctccttctccgtctctttctctctcccaccctccactctcgccctccctccttgggtgactccatcagcttttgatttggaagcacgctgattggctggaagcgattcaacacacgctgggcaagagctttgtctgagttgaagtgaagttgtacagattttagactggagtcagcaatcacgggtgtttagtctgcagccgagcagctaaagggagaaagaatcgctcaggaaagacacactgcagactccaccggcaccctgcaatagatggattccgactacacaagggagaaaacgcggaggtgacactctcctgcctggaaagaggacgaacgaccaaacaaacgc

SEQ ID NO: 32727 - DNA, 2300 bp, Homo sapien
agcaaaaagcctgaaactcttcaggaggtaaggaagctatggaaattaggcatctgcccaaaatctaggataaagaataaacacttaaaactcattttaacatctactttgaactgaaaagaaaagggctcatgagaacatttgaatataggaaaaggacaattttcaagactgtgaacttgaacccatttgacagcagagaatgtgatctcagggccatgtgatactggtctgtcttcattaaagtcccatcagccctaccaagatgaaacaaactttctaaattttcctttactcttccaactgccatatgtgagctctcggtatggacttgcctcgggaggatttatataggccttttgaacttctaacagagtctctcttttgagtaaccatttaaaagatgattaaatttaattagactgtattttttcctttgacatgtgccttcaaagtccattttattacattcttttatcctagcagcacactaatgctctcgggtgtagggcaccttcagatgcaggaacacaggagggagatatttatatactcacttaatcccctgggagtattttaggaatggccgacatctgacatccatgcctgcccagcaacactgcctgagctaatgttgctcaggaatcaactcagacacatgacaatttggatgagtaatctgagccctccatacacctgtcctagataggggttcaaggtgcccttgggttgtatcatctatttataccctaattatttctcttttgatgtttttcttattctctgaatttattgataataactacacttcgatagtgtgtccggaactggtgggttcttggtctcaccggcttcaagaatgaagctgcggaccctcacagtgagtgttaaaagttcctaagggcggtgtgtcctgagtttgttccttctgatgttcggatgtgttcggagtttcttccttctggtgggttcatgggctcgctggctcaggagtgaagctgcagacctttgcggtgagtgtcacagctcttaaggcacactctcgacttgttcgttactccccggtgggttcgtggtctggctggcttcaggagtgaagctgcagaccttcacggtgagtattacagctcataaaggcagtgtagacccaaagagtgagcagtagcaagatttattgcaaagagcgaaagaacaaagtttccacagtgtggaaggggaccctgtacagttgccattgctggctggggcagcctgcttttattcatcctgctgattggtccattttgcagagagccaattggtctgttttacagagagctgattggtccgttttgacagggtgctgattggtgcatttataatccctgagctagacacaaaggttatccacgtccccactagattagctagatacagagtgtccactggtgtatttacaaaccctgagctagacacagagtgctgattggtgcatttacaaaccttgagctagatacagagtgccgagtggtgcattcacaatcccttagctagacataaaagttctccaagtccccaccagattcaggagcccagctggcttcacccagtggatctcgcaccggccgcaggtggagctgcctgccagtcccgcgccgtttgcccccactcctcagtccttgggtggtcgttaggaccgggcgccgggagcagggggcggcgctcgttggggaggctcaggccgcgcaggaacccacggcgggggagcggggagaggagagcagggaggagactcaggcatggtgggctgcaggtcccgagccctgccctgcagggaggcagctaaggccctgcgagaaatagagcacagcagctgctggcccagttgctaagcccctcactgcccggtgcttgcgggctggccggccggctgctccgagtgcgaggcccgccgagcccacgcccacctagaactcgtgctggcctgcaagcgccgggcgcagccccgcaagcaccgcgcgcagcccggcaagcaacgcgcgcagccccggttcccgcccgcgcggagcccacgcccacccggaactcattctgtctggcaagcgccgcgcgcatcctcggttcccgccgcgccgttgccgccgctcctctccctcctcacctccccgcaagctgagggagccggctctggccttggccagcccagaaaggggctcccacagtgcagcggtgagctgaagggttcctcaagcgcggccagagtgggcgccaaggccgaggaggcgcccagagccagcgagggctgccagcaagctgtcacc

SEQ ID NO: 32728 - DNA, 2300 bp, Homo sapien
gatctatgaaatgatttgcaaataattcagaacaatactcataaataagttcagtgaactacaagaatatatgaagaggaagtttaatgaaatttagaaaacatttcatggaaacagcaataacactgacaaagaaatagagacaataaaaaagaaccagatagaaattctagagatgaagaatgcaatgactgaacaacagaaaaaaaattaacagaaaacttcaatagcagattcaaacaagcagaagaaaaaaatcagctgaaagaaagaacatctgaaattattcatttagaagagcaaatagacaaaagaataaaaaagaatggagaaagcctacaggaattatgggacaatcaagagaccaaacttttgcataaggaggagaagaaagagaaaaaaggccagaaaccatatttaaataaataatgactttcctaatatgaggatagatgccaacacccaggtacaggaagcagagagagctccaattaaattcatctcaaattgagtatattaaaacacataataatcaaactatcaaaaattaaacacatataaaaattgtgggagcagcaagatgtaagagatacatcaaatataaaagtgtcaatatgactatcagtggatcagtggatttctcagcagaaatcctaaaggtcaggagagaatggaatgatacagccaaagtcttgaagggggtgggggaaactgctaactgctaaccaaaaatactttatccagtaaaactatttttccatattgagacagtaataaaaattttcttacacaaacacccaagcttagagagttcatcatcactatacttgccttataggaattgttaaatggagttctttaaactgaagcaaaaggctgctaattaataacatgaagcatagtaaatcacagaactcaatggtatacgtagagcagagccatattcaaaatactatagttctgtaatgatggtgtgtaaaactattaataaaaattgtaggtaagataaattgccaagagatatacattataaaatgatgtaaattttgacatcaaaagcataaaatatgtgtgtggagggtggagagtgtagagtgcgtataactttctgttgccttagcaaccactttttaatgtaagtttaactttttattaccagaaatagggccccgtcacacttggcacagtttcctatactatactcacctaaatggttccagccagtgaccagagataaaaacttagaggcatctctcccatgtagtaggctgggctcccagcttttctctcacttattttgaatagaccattcagacatttgcctgtgaattctaagtgtttaccttccagtcacagcgtaacctcctggaaataatgactgcttgctttaaaaccaccagttacagctggtggtttccctacaggaaaattgtttggataatgccctggacccaataaaggcactgacacatgggtcccttctctttctctctaccagaaccccctctatgtgggtatggcttcctgacatgccatgtaccctccagggtctgtgagtactaaaatctcttaaactattatgtggtggttgtgtcactgaagccacacctgcaatctgacccctgactgtgaagccaccgaaaggagactcatgcaggtgaatccctgggtgatgctcttctgtctggacatctggtagctgctgaaaacaatagctatcaactcaaagagttttatccaaaacaactgatgtagaaggtatgattatagtcaaagcttggatacaatatcattgtctgcccactgggaatggatgacttatttcccgtatcagatggtccagttggtatctgatggcactactacttgccagtattcaatcaagctatttcgcactggtgcctacttctgctctcaggtgttgccttggggatttgcttgaaattgtggtggctgtagacagctctatgagctcttaaagttcttttgaagctgtcagagagcaagtcccaatataatcagggtgtgttttcctttgtgacatcattagcttttcttgggatctcaaaggaccctgtgcagcaggccactatttgaatgtgtgttgctccttgtggcaggtatactgttccaatgccctgggatctctgtagtggtcggtactgtattgattataaatggtgaagtcctagtatcttgctagagtgagctggccaggatggtggagctctaccaccatttcacaggttatagacaggggccaccaggtttcaggaaagcagcaatgacccctcagtaat

SEQ ID NO: 32729 - DNA, 2300 bp, Homo sapien
cagattttggggtgcttagaagaggtacactggtgcccttagcagcaatgtgcagctttgcaaacattctgagtggtggcctctatcttacatgaaagtacaatccttttggtttttagtctaacatcagccatttttcttcataattaaaaaaaaaatactgtgaggaggaaaatgttatttaatattgaaagaataatcgtcctttataattcattcagtttcctatctgagtggggtctttggctcaacttatgagttcagttatttataacaaaatttaaaattaaagtgtgacactgtgttaattagagaaagttgctgttccctgagattcctagtgtcctacttttacctcatatttcttcagagctaatatgtttctcttactgggaaagaagagctgctccttaggtccattaatcaggaaaattgtgtgagtgaaaggagatgtaggaggaggaagagaattggaaagaaaagaatctctatttagcttccttctttgggagttttagcaggattgcatgaggaaaatgatccatttttgttttttgaaagacattaacaactgagaaaaagtatttattttggttttataaaaactttaacttggtgtagctgaaaccaattatatagaatttagatagataatttaaaaaggagaaaatgtagcctcaattatttggatggcaaagcattgaggtggtgtcattttctcaggtgtcaacataacagaaaatggttctgaccttttccatgctactttcctaatggcgatttctcatttctttctttgatcatcctcaccatacttgactcccttctttccctgccaacctctcgcacacaggctttttgtttgtggtttttgttcaaaggttcagaagcttatttaatggtgcgtataaaggtagcttcagggtaatgataacattcaattcttctcactgaatccaaaaccacatgtaactatagccaaaaatgatatctaggatttcttttcttttcatatttgttttttcttgacacttggttgagaaagttagaagggtttaaaaatgttttgcctttttgactattgcaaagtaaatattttaatttagcttacatttttaatgcattttaaatttataataataacaatagtttatataatgtggaaaaaagtcatacataatatcattactttctataactaccattctgttttcctttacaggcttttgctatatacatatttttatgtaattgtaattgtgtaattttgaacttagaaattttttttggtaattcaaaggaacaacatgacaatgaaggatatgtatcttttacatagttcaaaaaaatcacctagtgctaatgagaatcagaaaatgactattttctggagtcatggtgaattttgtattagtcacactcggatggtgatttaaaatactggtttattatgagtagtaagaaataattttatcttttaatgttgaggaaggcttatagttgtgtgtatgtgacagaagtataaagtgtagaatctttaattttgtaaatattggatttgactgtattgccttataaaaaactcaaaataaaaaaataaaaagcattacacaaattatgaaattcaaactgtgttgttataaacaatgtagctttaggatacattctactcacaaaacagtcgcatgtaaaatgtttttatacacgcattaaagaaaaagaaactccttaaaatgaagtaactatttcctgtttcattttgtttgaacagcttttgttgctcactacgagttgctttaaatctctgggaaggtctgttccgaatttactacttctggattggctaaaatctctttaaagtgtgtgctttgttctctaaaaagcttaggtcagttgagcaacaagctcctcctgtttttttctttttttaaaaaaaagagctgagtaatgctggaggcttctcatgtggctgatgcaaacctggagaatttgcatcatcatttagctgtagtaagttggtgtgacaggcaggcgcttaaatacaagcccatgaggaagctgagctggtttgtaatgatagggcggcagcagcagcagcagcagcagtggtggaacgaggaggtggagaattgagagcacgatgcatacacaggtgtttctgagtagtaattagatcgctgtgaaggaaaaagcacacctttgagttttcacctgtgaacactatagcgctgagagagacagtctgaaagcagaggaagacatcgatcagtaacaccaagagacaccaaagttgaaagttt

SEQ ID NO: 32730 - DNA, 2300 bp, Homo sapien
tcagaaactgatagcccaaaatatggggctttgaccggctgaatggaagcctcaaggtctctctgacctcactgcccagcaccatctctcccaaagcacaggatgaagttgaagttcctttatctggctacaatccgaacccaccaaaaggaacaattgttttttcttcccctccttgtaagaccaaaaatgtaaccacctgaacagaccctttcacaagataatgtgcaagttcatccctgtgccctgatccattcactttccctagtcatctcctcaacagaatgcctctgctcccctctccccaagtctgttggccaggatggtagacaagcttctgaaccccgttgggggtgtgtaatcactctgtgattctccccatgtacatgttaataaatgcatatgccttttctcccattaatctgccttttgtgagttgatttttcagcaaacttcagagggcaaagggaacatttttcccatggtccctatacccatatatacccactacctagattcaaaatcaacattttgctatatttgcaaaacacttttcataggctaattttattatcacctttttaaaaaaattctttttacaagtactgctccttgtggagcaggactactcgatagacagtgtgcccagagtagcttattatcattttttatttcacctaatgactaaggtatgattctatgttttatagataaggaaactgaaactgaggctttaatgacttccaaggagcttgtctgccagaagttgtaatcaacttgtgccagctgatctgtccacaccctctatccacaggtgttagatatgtaacctaggtctgaaaaatatttagaatattcttgtgatgaaaagcttgcaattccacaacacaggggaatcagcaaaatcatgggaaaaccaatagaatacatttctaactcatgaatcattcagagaaaaatccagtcttgggttttccctccccctcatcccatttctattcctgattagtcatcatttcctgcccagcctgtctgagatgtttcttccatcctttcttttccagtaacagtaacctggtgcgggtctacagtatctgttatctcagctgatttcctttctgccttttcatgaaccagagacatgtgatttccaattaaagcacagccctgaccatgtctttgctcagcttacaaaacgtcaacggctcgcagctatccaccgaattaagcctactataatccccttccttccacactacaacctatccacgcatctgtcctcttactccttagcttccatcttacatgactaagagttgtttccccaaatacacccttatttacttttttcatttataactcaccaccaccccctccaaagtttcacgtgggtaaattctagacctccacgtcataggccaactcaaatgccaatccttctaatgaaccttctagagagcccgggcctgttgtcatctctatagccaatctttggcatcttgtggcaataatctcattctaccttgtagagctttctggtctgacttcccttgccaccttctgctccctttgcctaagtataacacttttgaggaaaagaacgctgttttaatcatcgtcgcctcgcccacaggcggtgctttattgtgcttaatatcgtttaacgcatcacacactgccgagggggtcggaggcggacgccttttgctgtatccacacagacccgcgcaggcacacacgtaggccgtctgccactctgacagacacgtgtcccctgggccacagccctggaactgtctcgggattcccagcctgtgggcgcttccatgctggccagcggaaggggacgcttttttcttcagaacagctccaacggatacctcttattttagaccgcctgcggattctatctataaatcagcctaagccccgcttccttttaaaacaggattacgccgggtcgagggagcctggcgtggccgcgcagtggccgggtcccgcggattcccctccagctcccgcttggtagcgcccgctttgtcagcgcgcagcgctcgccgggcgccctgcaggtctcgccaggtctcacagcagacggtgccgacgcagcggtgttgcacctccctctccggctctgctgcccgggatttccccagaacctgcgccgcgcgagaaggagcctgggagcatccgcccacactgcccggacagtcggctcgactcggtgccctcggccccagccgggctccgctcctcgggcgcgcgaggggccgtggtggcggcggcgcccggcatgtttc

SEQ ID NO: 32731 - DNA, 2300 bp, Homo sapien
aatttgttgaataagtgaattagtttatgacggttcgaagatcttcattttaataatattttataaaacctgactattaaataaatcagtaacataaaaagctcaaatagacatttaagcagtagtataaaatatatgaaataattcatcttttttctttgtacatctgtagactgcacttctgtaactattgtctattttctgatgttgacagaccaagctttacttggtgctcctaaactatatgattccagcttgttgtgcttcacagacatatttttcttacggttttcttgaccctgttttttccctaaacatgctcaaggtaccaactttgaatttcattgtttagttgtatgagaaaaacttgacagcttggcctcttcctattctctcattcacttctcaaaacttttttcttccatttttctcttttaacttcccattgctttacctttgacattaaaaaaaatcaaccattttgcagtttatcatactataaatataatagtagtaaaatggatttaactttttttataacttctaaattttatagaagactgttttgtaagagttttgaccttgaagtaacaagacactttgtaacctttgttaagtaacttcttggggcctcagtttcccaatgtgtaaagtgaaggagtggactaactgtggttctctaataactagctggagtgcagtggtgcgatcacagctcactgcaacccgaaactcctgggctcaagaaaatggcctgccttagacttgagtcgctaggtgcacaggcccaccacaatgcccagctaaggatgatgcttactttaaattgattggcaataaaatataaaagctaccatgtcccatacatggcaggtttacctaattcaagaaagagatccttatttaaagaggagttgtactttggaaatagcatgtaggttctttttttgggagagtgaggatcatggtgataggggtagggtaaaaggaccaagagaataaatgaatattaggagaaatgagaaaaaatagtcatgggctatgtaaatccattctgatgctgcactcatgttgggcaagcttttataagatgatatcgcattaatattaccactgaaaacatttttttctctacacagttcagtcaattcggatcataaaaattgtcaccttgttattttaaatttgtaatgccagatctttttgtttattcagcaaatacttattgagcacttactctgtaggaggcactgttcctttatgtaagttttgtgtgcagacaactttagcataaccctttgtttcaaacaatttatgtattattaaattctgaaaccagggaagcattttaatgaagcgttattcgtcattatattggtttgatttcctgtgttcagtaaatttatagtcattaaattggcgatttatctcccttgtccattgtattttaatatgtatttgtaattaggttagttttcagcaagaattacttttttttgaagtaaatgacaatataaatttgtttccaagtgagccaaacagaaatgaaagggtacatgaatttcatgattagcatattgggggagtctcatctccagaggttggtgtgttctgtttactaaatacccgtttaatgtgctctttgacacttctgttaagggaaaaggacgaagttggtctcagaaagtagttggaaactccttattttccaagtaatgctttcagaatatgttctaggtatgactttgttggtgttcctgtcttaaaagtgcagatgtttcaagtgaactggttacatgttgcataaggtttgaaaaagccaaaagaagttaaatagccacctttatttacagctgcaggactaggtattagattgcttccaggaagaaaatatgattaatggctcttttccagaggggggacaattgcagacttttcttccgcagagcgtgaaatgtgcctcttcctgccgaggggctgtgtcctcgcgcggctcccggagccgtttcccagcctcaggtgtctctcgccgcaggctgcggccgctctctggagcaagcgtccgggacttcctgtttgggcgcggggcggaaggatcgcgttgccagctgcggcggccgccacagccacagccgccgccgccgccgccgccgcccctgcccctgccgcccctgcccctgccgttaggtggtggggtttctcagcccggcggcgggaggcgggccggcctcggcttcctgtcggaggacgcgcaaggatccgggcgtcggagtgtgtgcgagtgcgtgagtgtgtgtcgg

SEQ ID NO: 32732 - DNA, 2300 bp, Homo sapien
gcccatgtgtcccttcacaactgtcttctctgattctttcctctcttgactgtacaacacatatgggatcccctgtgtttaagggatggccaaggagcagctgtttgcagtcatgtgaccagagcttggacctgtaggctttatatatgtgtgcatatgaagtccttcgtataaagtggagctaaaagtgggaagagaaaaggagttggctgcagacaaggggaaggggtatggattttccttcctatgtccctacgtaacatgaagggaacctgagaactcaaaaatagaacttggcctttcaggttattattagtcaagatagaaggatggaataataatttaacagcttgatttagaacttttaaaaatatttagacacatggtatgtaggcttccatttgtattcttgtcccaggccccttgaaaatgagggttgagcctgcaagggggaattgaaagggagtagccagagagggaaaagataaattcaaggtagagtttcaagaagggagtgattaacagtgtcagatgcttcagaggcagcaagtcctatgaagacagaaatgtatccattggattctacaagcagaatttagtaaaagtttcagttgagtggggatggatgccaaactttgatagaaggaggagtgcttgagaaattagaaagtggagacaagagtataaaatataaaagatttcttatctagaaacttacctgagaaaggaaggaactggagcagtagctggaagggtatgcaggataatggaagaggacttttcctttttttttttttttgagacagggtcttgctctgtcacccaggcttgagtgcagtggcaggatcacagctcactgtggcctcaacctcctgggctcaagcggtcctcccacctcagcctaccaagtagctgggactacaggtttgcactaccaggcccagctaagttttttattttttgtagagacaggggtttccctatgttggccaggctggtgtggagctcctgggctcaagtgatcttctgccttcctctcccaaagtgttgggattacaggcctgagccaccttgcccagccaacttttctacttttaagatgagaggatcttgcaaatgcttatatgttgagggaaagaagtccaatggtagtatgagaaggttaaggaaaaagggaataattgatggaacaaggcctacgatcaagtgcttaagtcaatacattagcctttgaaagaaggcggactatttgaggaggcttgggagttagaagtagggcttgggatgtttggatgggtgctgatgctaagttggtggggtgacatagcaggaacatgtctaatagtgactcaggaggctgaggtggcagaatcacctgaggccaggagttccagatcagactgggtaacatagcaatatcttatatttaaaaataaaagtaaaaagtaagaaatactgacctgagcatggtggcatatgcctatagtcccagctcctcaggaggttgaggcagaaggatagcttgagcccaggaatttgaggctgcagtgagccgtgatctcaccactgcgatccagccttggtgacaagagtgagaccccaactctaaaaaattttttttccttaaacattgttttatagtagttttttgggctagtcctatttttcaaacttgattttatactcctggggagcaggggttatacctgtagccacttactaagaacctgttattagaacttgcccaatggagaaaaaaaaaagaacctgtttgaaatgcagcccataatatggagcataggcttcatacgttgattctgtcctcactcaatatttgttatgtagtggtgaattaaaattttaagtttgataaaaacttctgatttctcaaaaacctagaaataatttattatattccttatgtgaatgtgcgacatatggctttggaagtgatttgttttattaagtatttactatctcaatcacatctgtttgagcatagtgctttttaatataattatattaatattatcttttttcccctcccgctggcagttccaaagaactactggttcagattttagctcttcccaagttgtgaaaatagtgaaggatgcttagactacttaacatacaaactgtaagtaaaatttatttctgctattattatatatattgggaatagtaccttatatggtgatagtatgatgggactgtggaattttattattttttcttcttaagatacaaagactttctgttccattttatgtttataagatcaaaagggaggctaatag

SEQ ID NO: 32733 - DNA, 2300 bp, Homo sapien
gtgagccaccgcgcccggcctttttttttttttttttttttttttgagaaggagtcttgctctgtcgcccaggctggagtgtagtgttgcgatctcggctcactgcaacctctacctccggggttcaagcgattctcctgcctcccgaggagctgggactacaggcgtgtgccaccacgcccagctaatttttgtatttttagtggagacggggtttcaccatgttaggcaggctggtctcgaactcctgacctcaggcaatccaccctccagggcctcccaaagtgctgggattacaggcgtgagccactgcgcccggcccagagttgctttttaagaaaggaagagaagactcacccccaagaaaatagaggcaacagcagtattaacaaaagaaagagatcattacattcttaggctcttcagggatttaaatctggagcctcctgcagctttctgacatttgagccttactctagggtgatttccacggttcccacgtccctttcaagagaacagctatcacttatattcctcagtgtttcttctttgctccagactggttgtgaagccgtaaaaagggtaacgctggagcccagaaatcagctggtgaataccgcgccaggtgccaggtccatcgcggcgaggctgcaggagccctggaggggagcaaaaggagccccgcgcgcaccggacaggctgtgctctttgttaaagaaacaaatacagaaaacgccgcggcggggaatggtggtggtgaagaaatagactgaggcgtttgtatgcattaactgtgcctacaaagcccattaaagagacgctcctacacagggcaacccacggcaccgtgtcattggcttttgtgcacttgaaggcgcgtgagagtgccccgctcgaaggctcccctttgtgtgaaagtgtggaaaccagaagcgtgcagccactgctgggttttcgttttcgaattcgcaggcacttgggccaaaatactcccacaccagaacactctctcattctcgcaccaacaacactcagacttgagttacttctccgttgcggaccgcgcaaggagcgacaatggctaggtgcgagtgcccgcagctccccgggcagctccaaggggccgcccgccgcgctccgcagctgcgcgctgggcccagccacccgacagccagcaaacgccggcaccaaccgccgcgcggccgggctgttgggcgggtggtaatttctgggaatggggcggggtcgcgggtgtactacgcccggcttttgctagcggggaggaggagctggcggcgccgaggggcgcgaggctggcggggcggtgcgccacgtgcgtcaccggccggggcggggccggcgtcgcgctcctgcccgaacccccacctttcactaagccaaggctgaggagtgggaactggaaagaccgggctaggagtttttgcaaaacctcgcccccctgtaactgtcagactgcccgactgtggggccgtctccggagaagggcgagagtcctgagttggggatgcggtgacggcggggcctgcgggggccctgagtggcgagggtgtgtgcgtgcggtcccggccggcgggggaaagccggcgggcgctgcaggtgcacgcgcggccccatcggcctcacacgcctgccccgtgcggcagagccccctgcaccaatccggggctggagtggagagcgagatcggggagccctgggcaaggagccggacaagtgacgagcgtctttacctgggaaggcgggtttgggagaagttgggcgaggagaagagggcgggattcaagacagcaaaagaagcaggttcggcgggctggtgggggcccgagggcggcggggccccgcggggtataaatagccggcccgcgtttgacaggcgctgcggtgactggcggtgccgcccccgcccccccgccgcgtggggaggggaggagcactctgagctggcggggagggggaggcggactccagtgtcctggtggaggcggcaggaggccgagggggaggagccgaggcggggggtggagggagggggccgggagcggagcggggcgggggcaaccattgctcccagcgccaagctctgtgtcgccgccgtcgcctaggcggttgggggtcggtggggcggcgcgggcgggggtcgctgcgcggggcggcgagcctctgttttgtctccttctctccctgtggagcggctcgggctgctggggaggccccggctccctccggacgctcggccaacggcggcggctagtccgcggccctgctgagagggaaaagga

SEQ ID NO: 32734 - DNA, 2300 bp, Homo sapien
aagatttgaaaagaatttgccatcaaaacggaaagccacaggagcagctgagtagatagaaattcccttcaacttgaaaggcatgagcttttaactaaggaaaataatctggagaaatggaactatttatctcacagttcttttatatcccagctggtatggccatattcaacctagagagcatgataacctcccactggaccgtaccatctaataagagatggtgggatataatgaatccggccatgtgccacactgaaaggcagcagagtgtagcaggagagccttgagcttcaccttaggctggaagtcagaatctagcactgcctcctccaactagctgagcacattttatatcctttattttttttactttattttttacatttcatatctaatgtgccttttttttttctttctgaaaaagaaacagatgaggttttgccatatttgccaggctggacttgaactccctagcacgagcaatccttctgcctccacctcccaaagtgctgtgagccactgtgtgtgattttttttttttttttttttttttttgagacagggtctcactctgtcacccaggctggagtgcagtggcaagatctcagctcactgcagtcttgacctcctgagctcaatcagttctcccacctcagcctctggagtagctgggactgcaggcatgtaccaccacacccatctatgttgtaaactttttttttttttgagactgagtctcgctctgtcaccctagtgattaaactagttaactctctttctgagtatcaaaaaaccaatctgatcattggcttgtactcttcttatgagaatatgttaaatataattataattaggttcaggactataacttctgagaaacgtctatttacatagcaaatgaacaaatattgtgcctgttacatgccaatagaactttaagctagaagtattatgttcatgtcctttttgttttttaattcatgaccaccagtaaatccctggacattcccacccaccacctggtggtggcatttgctaaagggaataattgccacctccctcagagggttgcagtgaaaattaaaagagataatagatgtgaaagtgctttataatctttcaagtgccaaacacacataagggattattatagtaggaaatggtgtcttccaaagagtaatcatttagacaatgttataaacgtaataaattattggtttccatattcaaaccatgacaagttcttgtagccacgatgagacggaaaactaataatttagtatttttagttgatgtgtttttttgttttgtttgttttgttttgtttttggggtttttgttttgttttgttttgcttttgagacagggtcttgctctgtcacccaggcttgaatgtagtggcatgatctcggctcactgcgacctccgcctcccgggttcaagcgattctcctgccttagcgtcccgagtagctgggattacaggcccgcgccaccactcccggctaattttttgtatttttagtagaaacggggtttcaccatgttgcccaggctgctctccaactcctgacctcaagtgatccgcctgcctcggcctcccaaagtgctgggattataaacgtgagccactgtgcccggccgctgatgtggaaatattaatttcacatcccatagaggaatatacagtgtttttgatattttaaagtcgttttaacagtgagctgtctagaaattcaaccattgtctgcagattttcttacgattctgagcatcacccagtgcgctaatggaaggctgaggctaccccttcgctcttctcatttttaagaaacttccagctatccttccctctcctaggaaagctaacggaatgcaggagataaaatggtttcagattacatccagcgtgataaactgtgtccttgtcttaatctcgtccaattcccaaaacatttccagcttgctgtgaggagttacattcagtggtacagaatgagccaggcaggcgacggcgacttgtaggttccccatcccttttctgagatgccgcggtcagctctagagacctcagggatagcaacagagctggagatgggttaggggaggatggtgaggactacaaaggtctccccacctcccgggggccgcggaggcggggctggatgaaggtcgacgtgcctcctccgggcggggcgctgccaggctctcagcctctctgtggaagggcagcctgcgcctgggtaccgaggctgctgcgcggcggacagcgggcgcgatgtatctccgcagggcggt

SEQ ID NO: 32735 - DNA, 2300 bp, Homo sapien
ttttgtagagatagttatctacctatgttgcacaggccagtcttgacctcctggactcaggcaatccatttaccttgttctcacaaagtgctaggattagaggcctgagccactgtgactggcccaagtcctaagtttgattcatagtattctcatgcatgctgtatcaataaaaatagggattttttgttttgttttttgcattttatactgtttttcaattcttgctctttttttaccttccttgggagatgtgattttttcccagtggaaaaatcttggactgaaactttgcttttctagctgctaactcaaatcctctctcttttcacctggatcataaataagattttagtgttcaaattctgaagatgcttacatgaatgttatgaagcaacttctaacaaaatattatagatattagttcctagctggaattacttaatcaggattcttttctagatgcagtttcacatacagctgggtactccaagtgtacagttcccatcagctctaatatggtgagaaaaatgtgcttatacttcatcactttcccaaaatacacactagtaaaaggatacaagggccaaagctctgaaaaagaacaaagcagtctttctcaatagcagtactgaaattagtaatttgcttactggttctgaatactctgactaaagatagcatctgtttcaacttgttggatactagcaaaagcttcatcaggacaagcttccaacggatggtgtagaaaggatatacaactgacaggttgctgagtggacaataagtggcgaaccaacaactggctcagcacattcattgggtagtttacttacttgagcatgagtccaggaggctcaaactaggttacaaactaaagtgactcacaatttagcaatccatttagccaccatttgcatgttaaaatgagccagaaaacacagtgcaattaattgactttttggtcaataatttttggttaaaaaagatcttaaaataacattgctaaagagaatataggagatttgctaacatttattttggttttaaaattaatgacataaagtttaaaggattagttttaaagggtcaaaatgtattgtctgttacctataaatatttttactggtctttagacatcagattgaactgaattgaatgtacaaagatctggctcaactgtgcaagataaaacctattcctcagaacgatgtctttaataggcaaaaccaaataaattgtttactactaccagacacttgtttaagcttctcagcaaccctataggttttatgttacagatgtaaaacttaggtatagagaggttaagtaatttgcctagaaatcatagagctaaaaagtggtgagcagaatggctttgaacgctgattctacagcttatggtctagggtggtccaagtctgttaggtgggctaatgaggatcactagatctggagtcagaagacctcaaactgtatcccacctctgccatctgtgtgatcttaagcctacctaaggcactaattctacttcacaggtttgtgaggcttcagtatgatcgtgagtgtaagtggtaagtgttaagagatcttttcaactgtaaaatataatatgtcaccttggatgagtagctgtcttctttaagcttcatctgtaaattgaggcttataaccacggcatgatatgtgctcgttttgaagatgaaataagacaatgaatgtaaaccatatgatacattaatgcaccgtgcctggaccacagaattcaatccaaatgctagttattattcagcacgacacttttctttcttctggctcatgtaggaaaattttaataaacctcttgatgaatagccgtagagatggggtgaaaaacccccagaggacagagaataggtaaactcttttttcttttaattattttcttcctaattccactgtatagacagaaggctgaggccggggtgctagagaaccttgccgtgctggaattcacgttgacgcccccacggagctctgctgcagagccctcgagtcccgcacttccggccgccaggtggcgctggttctgttgccaactcggagagactgagctgggccacgcaagatggcgccgtccgccttgctgcgtcccctttcccggctgctggcccccgccaggctcccgagcggccgtgagtatcctcctcgtgcaggccgactcgaccctcagattacccctcctaaggcggacccagcccacgggtgcaggaggcggcagcggcccgggttcgtcctgcagtgaccttcgccggcagacg

SEQ ID NO: 32736 - DNA, 2300 bp, Homo sapien
tttatttctttctttttggttaatattttttagagttagcatttggaacatagtgacatgcaagcacatggggtaagatgaattaactatcatcagcagcagcagcggcagcatatagccttggatatgttaactttctgaaagcatggctgttacttacagtataactcaaatgggatctctatttgtgaaattgtggtgatcagagtaaatatatatttttttattcaattcaggctactgtgtggtcagactgttatctgtaggtgcattttaactagcaaatgaatcagttaaatgttgaatcagactagtatttgccgagcctttaaaattgccatttctttgtcatcacccaaaaagaatgtaacatttgccaaactctatttctggctcatctaatcaggtactcaggttctggtggaagctactgattgtttcaaagaccagaaattttcttcctctgaaggaaaatagaatattctttacaggagaaatttagagaactatagcaaatagtattgctgtagggatttttggatatgaagccagaaatttggatatgaagccagagatttggaaatccaagctaaaactatcaactgcatttagactattttttctgtctttcaatagttcagacagttgaaagatctcttggggcagtgaattttgcaggttattactaagtaacagcttaaaaatgaattataagcttgttcttagttttataaagttaaggttaaaatactggccatatttcaaactgaaacatagtttcctgtatatatgatttttctcaaacttttgaagagagatcacagaatttaaggaaactccaggatttgactgttaaaaaccttatttatgaccccggtgaagggcgaggacaatcaatatagcagctacaaaacccaagtttatattgggaaacatgtatctcaactcacacctttcagggacagttaagagaagtttgaaaattaaaatatctttgcaaataaatttaaaacagtaaaaaacacgcacatattgtttaataattcatgatgcaaagaatgctacagagtgaaatcaggatttggaaagaggtaatcaaaaaccaaaggttaaaagtggctcatataacttgaaaatttttagatcaatggaatgccactttgaaaaagttttacggtcagctgttaatgaaatgacttacatttttggaaggactcctattcggtatgtagtctgacctcgcctactcgagtagttccctctagtatccttgccagtctttggcttctaagatctgagaatttctggggatggggagttcgagtcacaatattaagaactagtttgaagccagctccagggtagtctgtctttaagtctccactactccgctccaaggtgactcataaggtcggtccgtcaactctgcattatatggcctcaacaacgaaattaaaacacatactttaacctccagagcctcctttggcagtgcaaatatgtcacttcggatctgactaactacctttccaggctgatcttaagcaacattcaccaaattaccgatacgacagccaggcccatttcatcggtcaagctctttcacgatttccagactctgttaagcccctttctccccagggctgttaacaagtctccactgcggtgaagcttttttcattttccactccgcctctgctccttaaattaggcatttcgtccataatcaactacagcgcttctcaaacacctacacctgtattttagcactttgggctcaaacgatgatcacacagtgtgcgagactctttccaaggaatgaaaggtcgatctagcaggaaggcgccagagaggctgtttttgatgaggaggcggtctgaaccgtacttgcctagcctcccgtagctccgcgggcgcttcgagggtaccacgcactgaaatgatgggcggggcctgccccgaccctcccggcctccacaggcaggccagcctccaggtttcccggcaagctccgaaacccagaggaggtggggaaaggaggtcaccgcgcctgcgtgttaggaagcgtgacccgggtgggaaaaccctccgcgtccgccattttggctgcctctgtcggtctgttcagttaccacgtgaaccgccgacggagacccgtagtgggggaggcggcggcagcgttaagtgagaaaggaaaaaagacaacgaggaaaaaggaggtgtccgggtagggcaacgcggcgacacccgaggcctggtggtggcggcggatcgagatattcaaggctgaagcagctacg

SEQ ID NO: 32737 - DNA, 2300 bp, Homo sapien
agggggcagctctaggggtttagaaggctgtgaaactacttgttttgtcatctcctttgcttacagttcctttctggaaatgaatctcgtgttaataaaattatttgaatgcctttagaacattagattgttctgctgacatacattctttttaatgtgtattgctgggcatgatggctcatgcctgtaatcccaacactttgggaggccaaggtgaacagatctcttgagcccaggagttggagaccagcctgggcaacatggcgaaaccctgtctctacaaaaaaatagaaaaattagctggacgtggtagcttgcacctgtggtcccagcttctcaggaggctgaggtgggtggatcactgaagcctgggaggttgacgctgcagtgagccatgattgcgccactgtactccagcttgggtggcagtaaaaccttgtctgtctcaatcagtcagtcagtttatataggtaagctctttttgcaaatgttaaattatcagtaggttttatcttgtctttgtatataattgccatgtttcattggcctcatcattaggtaatttaactcctataggctgggtgtggtggtgcacacctgaagtcccagctacctggggggctgaagtgggaggattgcatgagcctggaaggttgaggctacagtgagccatggttgtgccactgtactccagcctgggtgatagagcaagaccctgtctcaaacacaaacaaaaataaacttttgtaaactttatcagagtattcaactgctaagattttatttttaatttattcagcagtgtgtgaaagtaaagatttatctgatacagttagaacagtattaaaacaagaaatgaatcgtctttttggagcaacgaatccaaagaattttaatgaaacttttctgaaaaggaattctgattcattgccacacagattatcaggtaatcactttattttatccttagccttctaaaacaacttcagtaattttaatgaatcaacaataatataaggtacatgtttttagaatggaagaggcagtgtgtatatgttacattgtgatcgtatgaaaacaggcagcttaaataagcttcctaagctgggcacagtggcacataccggtagtcccagctactcaggatgctgaggcagaaggatcacttgagcccaggaatttgaggccagtctgggcaacataatgataccctgtttcaaatcaaaacaaaaccaaacatatatatatataatatatatatatatataatatatattatatatatatgcgcttcctatacattttttaatttcttacggcaaaataatcactacaaatcaaagtcagtggtctcttctggttcagcattggcattacaaagaagcaggtgtaactaaacttaaatgtatatcataaaatgaaggtagagctttcttttatttcttttttcatcattgggctcttaaaattcactcagataggaccatcgtcttccatttctcattcttatgtaggtatcagagttgacagtgctaaacacctgaaattatcttcacagtttgtgagaaatctaagtcaagggtctgtgccaatgagccaaaatctgacctttatgggaccatgtgggtagtacttttcaaatacttggcttaagcccagcagctttgtatacctttgtggaatcctgaattcagcattttggctcacactgttgagataggatagtcccccaacctccacattattctgcttatttcagaaagaagactatcatggtcctaccacaaaaatacaagtattattagaatgcttgtgtttcttcatagtctcctttactgtgcatgtgttgcatatacattctattttattgggtagatatatgtggtatacctctattgttctctttctttggatggttaagctaatccccttagcattattattttttgaataacagtatctcaagtagctgttcccattcttctaataaagtgccacaccctctgcatatatatcttgtttgccttttatatttaaataagtagaggataagatgttggttttaccttgaaataaatttcctatttccctctcatttagctgccaaaatggtatattacttagatccttctagtcagaagcgagctatagagttggcaacaacacttgatgaatctctcactaacagaaacctccaggtaaagagtttttcataatctctctgtaagaatacttaactacttttttcaccaagagaaataattgggtatttatacacactgttttttaaatcattatga

SEQ ID NO: 32738 - DNA, 2300 bp, Homo sapien
ttcttctattacaaaagtatctttacatacttatcttaccctaagccattgaaattgttccattttaagttgtactgacaaaggatccaaatttacagtttctgctcagctgtgtagcaaagtattaaggaaagggttacatgttcacactttgaggccaagtggtagtgactccaaggacaaaatgaacagtcaaaaaacagggctgtataatccatccattctttccaacagtagaatttcctccaattatcaattctggagattctggggttattcaattaagaagagtagcacatacttcagtcacatgaggacactctcaaaatacaagttgaaaatacaaaactcctcataacaatgtcaagtgccaacaatgatttttaaaatttaagtagggctgaactgtgtgtaactggtgaaatgttcaagttaacaatccttacacacgaaatctctcacttcactgacttaattcattatttgctgaataaacaataaacttccagtcagtagtcaagagttggcaatctagctggtaggacataacatataatcatgaaacagcaaaaacagtattcaaagattaaattagcaataccccaaaatgtgtgttagagttagcataaagaatttctgatgtagtttaccaagagctaaactaaaaagtccagaatacaaaaaacagggatgcaatgatgttagtttttttcaccatccttgaaattctcccattaaccacagctctgagttttcaactgctctttgtccttaaatcttcagattccctcctttgaatgggataggtagagcagattagaagaaatatattccgaggctctctaatagtttctggatgattaaccttcatgaaaataacctcacagataagtaattaggatttttcagcccatttctataaactaagtaaactttttttctagtgaacataacttgatatattagtgactgtagaaagtctttctacagcaacaggaattatatcaaggcttttgcaaattcctggcaactccgggcatgtttaagttctactactcatctgttctgactatattttcatctgatggaataagcagttcatctcctttcctagaacttttagtgctctactgtccccctcactttagttaaggtctgccatgtcctcctctccgacagtccttgactttcccaatggcatattcatctgctcaaacagatgtcactgcaaaacaaaacaaacttttaacaaaaagcaatgtttgcatatttggggccttttgtatgacaatattgcacgtttcctcagaaaaattcacggagattctttaaggttgggggtttaatctattgatattttccttaggtagacaaagacaacctctaagtgcgctcagttaatctttaaccgctacatcatcgtcacccaggcactaagacataactagggcataatgagttttatttccaccaggggcgcctagtaactaccaggttcaacgctcccaggtggccgacatgtgatgtgctctactgtttgggctggggatattagctcaacaaactctggccacaaggatcacgcggatattcttggggatgcctagcgaaatgcgctgtacctaggcctcgaactctcgcctgctctccggtgggcggtctcgaactccagcctgctctccggcagcccacagcaatgcgcctgccaagaccttaggctgcaaaactcgccacggcccagagctcgcctccaagtgcgccccgcacagggcaagctttcggcgaggactcgcgtcccacccatctagccctggccgctgtcccaactcccgcagttcacagaggcggcggcggtgagcgcagccgatgccacatcctcagcggcaagctgaagaaacctgtctcctctctggggcgaccaaacgatacgtcgatgccggaaccgacccgacgccggagccgtcggctccgtccttaccgttgctctccaggtacacgcccccgtcaaaggcggctctgcggccctctcgcgagagagtgcccgtggtacctccttcctctcagttgtctgtctctccccgcccccggagtgattgcgcggcttcctccagagggcgggaaccttggacgtggcggggctgggtcagtcagggcgctgggcccagcctctctgcaggctggccttccgcgctgccgtgaagcccccgacaggtcccacgcctgcctaggtagaccggcgccagcccgagtgacgcctggcgtgtggccgcgggcaggcggctccgtgcggcggggcgggc

SEQ ID NO: 32739 - DNA, 2300 bp, Homo sapien
agttgggctccaaagcccacgtacttcccagattcctgcttctcccaatcttaactcccttggaacttcagaagctccattatttttcaccccaaaggcttctgggccaaacctaattctggtgaaaaatgtttagccttttattctatcttttcttctgcaagtatacaaatctttctaaattccctaatacaaagcaactccaaaaccaccactgagagctcatatgggacatgaaatactaatgtgaaaaattaaaagacagaagcaccaaagaaaggttaatttcttttaacccagcttacttcacctctaccatcattagcagtataacccgttggggtggggggcgatgattagggaactgaaaaataaattgttcttgcctctaagatacgagggtaggaacgtctaaagcaagcctgttctcccaccactccccatccccaccaagagactgagataaagacgatcgctgatttaaagcagtagtataaggcaaggtggttccacctatgttttaaggagtggcatcaacaggtggcatttagtggtggcttgctatgaaggtgtgtctaaggtttataccatcaagaggcctaagccttgtcattgatcctcattccactgttagattccaacccctcagaacttcaaacctgccctggggcctatactaccttctccactattactgtcactcagtgtccccagtcccagggaccaaaaataacgacttaaagggaataaagaattgggcgtgtgtctgaggtggcatcatgagaaatgcttttggcaacctgagtaggaactatcacatatagaatgtttctgcaggaaaatagatttttctaaaatcagtatcataaagaaactactacagcaaaactgtatgcaagagaatacctaagtacttcctcaaaggcaataggctttacttccacaacatctaaggcactgctcgaatgaatgtttaataactattactgattaaatgaattttccattctcgcgcaatttcactgtttttcctccgttcatatttgactgactcccagcacacgacacacacagtaaatgggtcggtagataagccctacactcctgaactcaaagtgtggtccacggactagctgcacctgcatcatcagcgagattattaaatcatagcctgcattttcaaaaacaagatccccaggtaaatcgcatgcacaatgaagtctgagaaacgctgccttagaagtttgcagtattgcaatccttccaatccccaactccaatctcatcagcgtgagaaaaaaatggagcgcacacacaccgtgcacacggccagcgaccagcccacggtggggttgggacacctgtcaccctgtcctccccaacagttccccatccgctcaccttgatgcgctccccatcaatctccaccgctcgttctcggaaatccacccctatcgtggcctcggtgcggtcggggaagcggccagcgcagaagcggtaggtcaggcatgtcttgcccacattggagtcgccgatcacgattatcttgaagatgcgggagcgggcaggaggcaaaaaccctgaggcccctgacactgccccgctggacgaaaagcttgcctcgagcgacgactccatctcctcagccattcccccgacccgccccaaactgaggcggaggaaaggagacacagaaaggctgagagattacgccaccgcaagagcgcgcgcccagccggccagttcggctgcgcaacttcccaggagccaccgcccaccagccccgagcgcgcctgcgcaccttcccgccccgcccttgcccgcacaggtgtggcacccgcccgccccgccgcacggagccgcctgcccgcggccacacgccaggcgtcactcgggctggcgccggtctacctaggcaggcgtgggacctgtcgggggcttcacggcagcgcggaaggccagcctgcagagaggctgggcccagcgccctgactgacccagccccgccacgtccaaggttcccgccctctggaggaagccgcgcaatcactccgggggcggggagagacagacaactgagaggaaggaggtaccacgggcactctctcgcgagagggccgcagagccgcctttgacgggggcgtgtacctggagagcaacggtaaggacggagccgacggctccggcgtcgggtcggttccggcatcgacgtatcgtttggtcgccccagagaggagacaggtttcttcagcttgccgctgaggatgtggcatcggctgcgctcaccgccgccgcctctg

SEQ ID NO: 32740 - DNA, 2300 bp, Homo sapien
gaaaacctcacagcaccaaggggacagttggacacttgcaacatgattcctcccctctccttcactcccacacgtacccacccaccatgaaactgtgtcttctgtacgtcttgagagatttcttccagcctcccagccctgcctcactgcctttgagtaagagaataaagtctttttgctgcttccttcagctttcagcattgtttttcaccctgaaaatcaactggaaactggggaagacgagtatctggtatgttttagtgcaccagtataatatgcaagggagggggtgatatgtaaaaaggttaaatgagaaaaaatatcatataattcaaaaccagtgagtgaccgagctcagtaaatgatggctttttaaaaatcagatataaaatcctgtttctgtggttcatgtttgaaaatgatgtaacctaaagtggctctttcatcttccactgcacgtacaccttctctgtttagccttggactcccagtatctgcactggaggactttaaggaggtcaaacctaagccaagagacttcagagaggtatagactaagctagagggtgtcttgcttgagccaaagaacctcagagtgctctagcctaagccccaaggaccttatgtcaatgtagactaagcctctaatctggaggaattcaggctggctggctgggctcccaagacacctctgcaggtgagcagcaccaggactcaagtctcctaacttctggtccaggaccctcccctttctaaaacagtcaaaggggctgaaattcctggaagtgtgtggggctaatgtccctagcattgttctctttttcatagaggaaaagctgactttaagaaacaagccggcaatacttgacaaaaatatctaccatttaagcacagagccaaaagcaaggagtagtctcctgggcgctggaagtattttgaaatccccaaagtctcattcattgatcagaaaacaaaatggaattactttttttttgctccctcctcccctccatgcagtagctgttcttggcgggtgcccagagcggcacccggtaattccacggtacattgtgtacatttacatctgtttaatcggctatttacagtcgccctttaccgccacctgtaagaggcagcgccataacgacactaagtggccgggccggaagccgggtgcccaatggttttctccacttgaggacgcctgaatctgtgaagtggttggcacttggagaaacagagagacagctggggacatcacacgtacagggcgggaggcgcgggaaagaggcgcgccagacggagggtccttccttcctcgttagctccactcggcggctccttttccattaccacagcagcaaggaggaacctgccgagccttcggtgcggcttgtttcctgcctgacagagagcccgctgccatttggatttgatgaatttctgaatcacccgagggcctggcgacccgaaggagggcggggagtgggggcgctggggtggacccgccatcctgcggaatccgggccagataacagcccccgagctggggaaatcggcttgcggatgtgatgcgggaccgcgaggacacctgcgctcccttgcgtgtcgcactcgtgcagctcccggtggcgacggggtgatgtgggggcgagggtgagaggaagtccaggcgccagagcgtcagaaacgcttccttagcttccctggcactttggaggttgtctcgagggaacacggacagtgcacgacggactttcaagttgctcccggcacaacgggaggtcgggagctcggagcccctacgggcggtccaagtgtccgcgagaagcccgcagcgcccaggaccgcgttgagcgctcggggcgcgccaagccgcacctaagcaaaagagaaacgctgacgggccggaggcgggttggctgggacgcggaatacgcgcggccccggagcgcctttcgttttaaggagccttacttctggaaagggacagggaactgtcaatcagcgagggagggagcgcaccggcgctgggtgatgtcagcggatcagctgctcgataacaaagagagggtattacaggagaaagttgcagcagcggcagcggccaaggcggcacaccggagcctccgaggcgaggggcaagtgggcgaagggaggggggacgacggctgctgccgcagcagctgaaggccaaggaattgaaagggctgtagggggaggcagtgcgagccagccccgactgctcctcctcttcctcctcctcctccaaactcgcgagccccagagctcgctcagcc

SEQ ID NO: 32741 - DNA, 2300 bp, Homo sapien
catctgggccaaatccctcaggagcagggccatgcgggggttacaactgttcatgcaacacaacagattgggcttaagctggccagggcagtgacgggcttttcatcttaattgtagttgtctgtgtcccaagaaaatgttatcagcttttcagaaaaactttcaagagactcgagcaagtcaaacccaagctgccctccttgtctgcatatcctgctctgttttcccatttgggaaatgaaaccagcagcagctgagagggagaaggttctacactcactggttttctccactcctaccactccctccttccccctcctctctgtcaccctgaagaaatctccttctggaataaggtgtcattcatccttgtcacctccagtatagttatgtcagatgcagtgaggtgctggatttagattacaagaagcgggaggattcttgcaaagagaggacaacatttgcttaactatgccaagggtccccttgtcccccgaccaagagggccttcatgctccctcagcttgactgaactttaggcaggattcttcctaacctcccttttttttttagagcatttcttgtcattgtacattttttctctgcccctttgagatgtatgtaaatctcttcaaaagcctcctgccagttttacaatccaggaatgtctttctcaaggacctgggagccctccctttgaaatgtaatcatcaaaggagatggcacccctgtctcccagtctttgtggagagtttttgtgggagtctaacttcagcaggacaccttcctccaagtcataaaaccatcccttgtcaaaagatagaagtttattagcaaacacaaatggcctacgacctcttcacaacatcctctggcatgtttcactagcctttaaaagcctttaaaaactttgcaccctctgcatcagcagcattgagttcacactgagttctagtccctctctcctgttgcaataacttcggataaacttccttgcgtgtttaacttttccaggcaagtaattttttttctaatactaattagaaaattttgctttgatgtccccctccttacacctccaaaatctgtctcatttctttgtagcattggtcctcaaatttcaaaaagcatgtttttacataacctggagggctagttaaaacacatttctgaggatggacgtggtggctcacacctgtaatcccagcactttgggaggccgaggcaggcggatcacttgaggtcaggagtttgaaaccagtctggccaacatggtacgaccccatctcaattaaaaatatgaaaattagccggcatggtggcacgcacctgtaatcccagctactctggaggctaaggcagaagaatcacttgaatccaggaggcagaggttgcagtgagccaagatcgcaccactgcaatgtggttaccagcctgggccacagagcaagactctgtctcaaaaaacaaacaaacaaacacgtttctgaagcaggaggcctgggatggggcttcagaatgacactttcaacaagtttccagatgaattggggctggtctagaaaccacacctttagaatgacgttagcatgttttttgcacagacaatcttaactccctgaattccctttagttaatggagactctagtacaccatcctgcagtggggccatttccatagctggtgaagaaattttctttcccacagtcttcctcctctctttttcatacttttccctcttttgctttctggccatatgccttcttttgctttcctccccttccacctctaactcacagcaattctcttccctctaccaaccagcctgttccaaaaaaaaaaaaaaaaaaaaaaaaggtccccttttattccttagggtagcacttgtttttgttttttaacatccaaatccttcttggagccccttcgtattctctctctgaggaagacggagggggcttccctcatcctcccttgttacctagcaacttgtcttcttcctgacaagtcaccaccctgccaggatgccagctgatgcacacacaataaagggaaagtgagcagacaccaccactccagtccactcatagaggaccctctgcgcattagcactccgatgagtggcttgctatgggcaggtcccccagacgcctctcccccagtaagctggccacactgctcctccagggatctcagagagatggcagcttgtcaagttcctgagtcgctgggtatgtactgggaatttcagatttaatccctaattacatccagctcatcacctttgtaataggagcca

SEQ ID NO: 32742 - DNA, 2300 bp, Homo sapien
ctgccatgtactgaagcccaaaactattaaactgagtatacaagaatgttttggtgctgccccagcttcttggctctactttcttatctaatcttagttgtcaatgatttcaagagcaaacagccaaggaagcctgaagaccaacagaaactttgagcagacctggcttgcaactatttataaattaattttgttattccttctttcctgtatatgtgtagttccatgaattctactttgaactggttataacatcttactggttccctcatgaatgagttacataaaaattttgatatgttttcattttatgttgtatgaaaggcatgatttttgcctctgaaagtattttttaacattaggtacattatatgctaagtacttgtctagatactttatgtgtttattttgcagacacacagaacacatttgtatatgccaggtgctgttttaagtgctctataagtattaactaattcaatccttagaataggattatgtcatttaaacttctcttcagctcttattagccctatcttattaaatggaggctcagagaggcccaaggttgtgttattaaattgtagggtctgtgtgaggctgaggcaactgccctccccagaagacactgggagctccctgctagggactaaatgtttgtgtcccctctgcaattcatatgttgagaccctaacccccaacgtgatgttatcaggcatttggcagataattagctacaggtgaggttatgagcataggcccccataatgggatctgtgcccttataagaagtgaccaggaagcttactctttctctgtctccaacatgaaggtgtccttctgcaaaccaggaagagggccctcaccaggaactgattggccagcactgtcatcttggacttcccagccttcaggactgtgacgaataaattgctattgtaagccacccagtctatggtatctttgttatagcagcttgagccaagatataccctctaatggtgctgtaggatggggtgaggaaaggcccccagctctggtttttgggaagctgcatctttatttttattatttgtttgagacagggtctcactttgtcacccaggctgaagtgcagtggaacgaccttggctcactgcagtctcaggctcctgggttcaagcaatccccttgcctcagccccctaagtagctgggactacaggcacgtgccaccatgccctgctaatttttgtatttctttaagagatggggttttgccatgttacccaggctggtctcgaactcctgagctcaaaccatctgcccatttcagcctcccaaactgttgggattacaggcatgagccatccttccaggccagaatctgcatctctaaagagcagattctcctgcctcagcctcctgcgtagctgggactacaggttcgtgccaccatgcccagctgattttttgtatttttagtagagaaggggttttactgtgttagccaggatagtcttgatctcctgacctcgtgattcaccctccttggcctcttaaagtgctgggattacaagtgtgagccatcgcgcccggccggtttatttttttaaaaatggctgggcacagtgacttgtggctgtagttctagctacttgggaggctgaggcaggaggattacttaagcccaagagttggaggctgcagtgagctatgatcgtgccaccacacactccagcctgggtgacagatcaagaccctgtcttaaaaaaaaaaagtatgattattatcagagtctctaggtgacagtgagaggcagcctggtgcaggggatagggcacagttgtaatctgctagactgggttcaaatcctaaatcggccattcagagcgtgaatacattagaactggcttaaattagcatttaaaatgtcaacaggattaagtaagtagttccttctcactttttccacaggaggtgagaaaggtctcagcaaggccctaggagggaagggcgtggggatgaaagggatccagagagtctgtgcattggcagagaagatagtgtaactggcactgcggctggagggctggtcccacagtgagctacagccctgcccgctggccgtgggagaggcttaaaacaaacgccggaagcaactcccagccccataaagatctgtgaccggcagccccagacctgcctgccttcctgacttctgttccagagcaaaggtcattcagccgcttgaatcagccttttccccccacccggtccccaactttgtttacccgataaggaaggtcagcattcaaagtc

SEQ ID NO: 32743 - DNA, 2300 bp, Homo sapien
gagaatcgcttgaactcgagaggcggaggttgcagtgagccgagatcgcgccactgcattccagcctgggtgacagagcgagagtctgtctcaaaaaaaaaaaaaaagcatttttttcatctatagtctgtgagaccctaaataagaggacatatcagacagaacaggtgaagagactggtaacccatcagtgctagacaaataatctaaatcattaaaatgaggaaggtttatacagtcaaaggactcaatggtgatgtaagccccaagtaactgattgaaaactagactcagatttaatctctgtgttaaccgctgaccaatatattttcattgtgtagtttatatagtttatatacattaaggagattggtcctccattcagtaatgtttataaattatctgcttttttattttcttgtttctataaaaataccactctttggctgggcgcagtggctcatgcctgtaatcccagcactttgggaggctgaggtgggcagatcacctgaggtcaggagttagagaccagcctgactaacatggtgaaaccctgtctctactaaaaattcaaaaagtagctgggcatggtagcaggtgcctgtaatcccagctactcaggagactgaggctggagaatcgcttgaacccaggaggcagaggttgcagtgagccgagatcatgccattgcactcaagcctgggcgacaagagcgaaactccatctcaaaaaaacaaacaaacaccaccactcttcttaaacctaacttgtttattaacaggttttactccagaattaatctcaggattttgctaagccttcatattttagactagaaaagaaaatcagtgaattgctttcaagctgtgattggttgccagtgctttacaaatagtctgggtagttgcaacaccaatgattaagaaaaaaggtaaacattaaagccattaaaagtgatgaaattgagtattggtgtgtagcagtctccatgctgcaatgaattcctatacaattttaaatcctagtactttagaggtatttggaaatactgatttttttaaataagaaagcagagttaaggtcacagttgcataaggaagattcttcatgactttcatggtcacttctccgtgggtgtgcacacacatgcccacacacaaatgcatgcttctgttggattggtgcttctaagactaggagcatatagcagtttaccatgtgtatcatgtaaggaaatttacttgggagagttataaatccattgaccagaatgggggcttatgatagttgagagcaattagaaggaaaagagtatttctgtgacaaccagggctaattagaaggattagtcaatctacccttgcttccaagcagggaatgtctaatcaaagagaaagatttttggaaaaacaggaaatggaaaattaatttgagcctcctctccccagattgttttagatgcctcaggaggggctctttttttttttttttttttttttcttgaagtcagttttaccaagaaatttcctgaagtaaagacgacgagtgattccttcgttttgggatgactgcccctagtgtatagcataatgcagagtgatggaattattagtgaggagtcctaaacgtgggattaggagtcattgaggtagaaaaaccaggctggctcatttcacatcttttgaatttggaaagctatagccacctcgcattcagctataatttttttaaggatagaaatgttttctcctagttatttcatcaggtgatttgcacaccaggatcccaggaatccagcatccttatcctgggccaggccagtgtctccatcacttgattgatgtgtgatgggtgtattgaccagactggggaagaggattttgtttttttcctccatgtcccccacaggcaacttcccagagttacatgctcacttattaatttctcagtgaaactatttaaacaggcagctgtttgttatactttatcaatacgaggctttgtaaacaagaaaaatgagtgcgatctaacttgaaaatgccctgtagagaataatcctgttttgtcagacagaggatgggctgaccctttgggttttttcatgtttaattcctactatttattccataaggtactaagaaggtctgtgggaatccttgatacttacctgggcttagtttagctctaaaaaagtagcacaggagcaggagacttgatgagaacttaaaatgaagtgtctggctaagaccaggatagtcgagttgctcatgaaacctctggattcaccgctgggtaaatct

SEQ ID NO: 32744 - DNA, 2300 bp, Homo sapien
attacaggcacgtgccaccacaccagctaatttttgtatttttagtagagacagagtttcaccatgttggtcaggctggtctcgaactcctgacctcgtgatccacccgccttggcttctgaaagtgctgggattacaggcgtaagccaccgcgcctggccaaggtacaggtgttaaagaggcaataccattattccatttaatggaccctcttttaaaagagtaataataataataaaggactgtaataagcattgtttaaaaaaaaaaaaaaaaaaggaagccacacatattcaaggcattccaacccccaaaaggtttaccaactacttgaaaggggcccctcttaaatgtgaggtctcttccctcatacacatgccgtttcttccttagtcaagtcagcccctcctcttccatacgtttcatccactgcctctactgacaccatcctattgtaaaccctctaacaaaaagccaggagcttccagttgccaaatcccaggagactggtccttatctcgctgcatgtgattatgctgactatattctccttagtgtttactacaccactctcctggtgctcctcgccaactggactgttcctttttcatctcctttgaaggatcgcctccttcagaaatacactgaatcttgtgtttcccaaagttcctgccattgttcttctcttttcctgctatacgtgctttgccaatttcatccactctgaaatttcagccatctgcaatgtctatacccgcaacccagacctctggctaaactctagtcctatacatccaaatgactaccagacatcccttcagaatggaccataaatacacccattaaacgtcgcatgtccaaaaccaaacatcttccctccaaaacctaaattggctagtaacaccattttccaagccagaaaactggaagtcatccctgatttctctcagtcccccctgtctactcaatggactccttaatatattttgaaaatggtctcctatctccatctctacccactactcacctacttgaagcccttcaacatcttctgctgagtattctgtaacatcttcaccgacctccctccacccagtcttggtctcaaacctatctttcgtatggtcatgatgacatcacaccctcgtttataatcctttgatagtttctcttctcctatgtcatagggcttatgcttctgagcgtggcagataaggccctccacgtcctaatgccttgcctctctcaccagcctcttcttccaccactttacgtcctgagctttctgtttcaacagcaccaaaacactcatgattccctgctcatgccctgtgttttgtaccttcatcctccatccatggagccctcaggttcttgcaggggaggggcagtaaaccagatggttgtcacttcaatgtttagcccagcatctggctcctaagcggtgccatgtggccagtcagtgataaatgatgggagacagtatatggtatgtccaaaaggagtgacagaaagtgtggagggaatttggactcacattgatagtcactgcaatggggcctaaacatgctaagcaccttccacacgagaggtatagagagccagcaaaagctcgactcttccatctaacaagcaccacaaacctagagtcatgctctacttttttggagaaaacatgttggcttcccactgagcctgccatcatgaggcacaatagtgggcatcttggtggtttgctaataataacagctgatatttatagaaggctcactgtggatccagaactttactgaaaattctacaagaactgtatctctcagtcctcacatcaacactatgaggaaggaactactgttacccctgctttacaggtggggaaatgaggcccagataccaagtagctgtactaaaagcacagagatttaacctcctggaccttattcaccagaacgcaagccaaacctccatatacattttacttacttcccaaaattttatgtgtacatcaagagctgatcataaatagaaggtcaaagtgacctattgtgacatcaaatcttggagccactttaatgtgacttcactaaattgccttcgtccagtgcctcacagacagcatcccagcacatcatggagagctaagtgacagaacaggcagctcctcttctccctggtgaggccccttctgctgtgccctggctctcttttgcccctcatttgtccatattcctctctggtttgctccaaactcctcctcctaccttcaattaagatggtgctttagaacaatacaaggtaag

SEQ ID NO: 32745 - DNA, 2300 bp, Homo sapien
taagatccaaagttcttttattcctggctattttagaaaactggggtgtatttttaccctaaaaactaattcttaagatttattgaaataatacaaaatgacttataattaacatctcacaatcaagatttatagtttactgattattagagaaataataatttctccatcttaatttttaaaaatatgtatatgcaatggtttaagtccatattcaagaatatttgatccttagttgttatttttgtttttagataatatcgggaaagataatgtgctttaataaaatggaaagtttagattgatttctgcagttgctagtccattttaattgtacttattgtgaattcattgaaatggaaagaaatatatccagcaataaagtaggcctgttatttttgcttgtttttgttttggtcatgacaaactgtgaaatgctgtgttttttctatagttctagtctatgaaatctgcaatctttccacttgatttacgaaggaccttaattactgctgtcattagcacctagtgttcaaaacagtctgtttaaatgtactgttagtctcacctccaagtccctgcttgctttatttttttccaagggtaagtaaaacaataattgacttagtaacaacaatcattatgtacagtgagttaaatattacacatttttgatgcctatttctatttatttagaatttggtatttgtgtgttcagtctggcctagacttggaacaagtgtccgtaagtagcgctgttactagcgcagacttattacctgggttttaaaaacaagtcactcatttgcctttttctttccacatggatagggatgacagacaactgctgtaaagcttcaatgtttctgcctggtcatgcacagttctgcaatataatgcataaatgtataacaacaacttgggatcgcttgatactttccttggaataaggaaaccctaccaggcgcgtccccgcgcacgcgcgcgcgcatacacagacacacacactcacacacgctctcacgcacacacacaggtcaaaagttgatttatttctgagatccccccagaatctttcttctctccgtcgccgacggctctgggcttctcggcggggcggtagtgtggttgggggcgtaggaggggcgccgggcgccgaggcgacggagacgggagccgggtgctggtgcgtgccgcgcccgctcctgccgggtgagagtccgggccgggttttgcgccgtgtccgcgggcctgtctcacggcctccagccgccgccgctgccgtgtttactgagctcgcgcgtcctgatatcactccgctggcatggaggaggaggaggaggtggaggagcgagaggaggaggaggaggcggcggcggcggcggcggcgagcagttgatcattgtgatggtggcaggagcagcggcggcagcggcagcccagccgagcgttaggtgctgctctctgcgcggcgttttgcaaaggacttcaccgatctacttttgcagtcgcctcggactgtccatgtgtttacttcccccagcccgaggattcgatatctaggttcctgtgaaatgcaactgagcagccaaagtactttgagaacacggggcggcataaacaccaaaacttttttgtggaaggaaaatgcaataagcaagcttgccgttttccgatgcggtgtggagtgagtgtgtgtcgcgcgtgtccgcactggaggcatatgcttgtgtgtgtacatggggtgtgtttttcggtatgtagggagaaaatgcttgccaaccaccggaaatctcctggaatttattagaaaataatggattataaaaagaaggcaagcaaggagcggatctccccttgagttgcaacccgatttgctgctggctcagtttgttgtgattctttttgttgataggtgtctgatggtattccgataacgttccccccttttcttccccttgagcttttacagtttaaaaaaaggaaacaaaaaccaccccaaaatctccccccccgtttttttcgccccgtcgggatcgccgtttccatccatgtgcttgcgtctcccccgcgttccacttaaactattttaatccttggacccaaggaggaggctgataggggggtggataaaaaaagttcttccaaaatagtgtgcccggggagcaggatgggggatttcgcagcccccgctgctgccgcgaatggcagtagtatttgcatcaacagtagcctgaacagcagcctcggcggggccgggatcggtgtgaataatactcccaatagtactcccgctgctc

SEQ ID NO: 32746 - DNA, 2300 bp, Homo sapien
ggaggctcagccaggagaatcactggaacccgggaggcagaggttgcagtgagccaagatggcgccactgcactccagcctaggcaacagagcaagactctgtctcaaaaaaaaaaaaaaaaaaaagaattaaactacggtgaagagagagcaaagcgaatgcagagtcatagcttcccctctgtggcgaagccatgtgtttcctgagttaatagagatattatttagtgaatatgtgaaaaagataaaggccactttgctacctctttttctaatttcttaaaattctctacatattttcagaatctgaacgggctcttttgctacagacgtagtccagttaaattttctgactgagacttgaagaagggcagtttgatacagaaatttgtatattaactaaatagccttcagaaaaagtgtggcaacttcaatgaaatatacactctcttaagttggttttactgcttagaagtagcctcacaccgtattaaatattttgctgcccattttgccatatatccagtgaatattaaaaatatcgttcactatatagaactgattaattgaagaaaaatatagcttcttatcgctgacattatgaggttagaaatagcatcctgtgctaatctgcaatgccaagaaatgaagatggtttaaatcagatctcatgactaatgcataagatccaaagttcttttattcctggctattttagaaaactggggtgtatttttaccctaaaaactaattcttaagatttattgaaataatacaaaatgacttataattaacatctcacaatcaagatttatagtttactgattattagagaaataataatttctccatcttaatttttaaaaatatgtatatgcaatggtttaagtccatattcaagaatatttgatccttagttgttatttttgtttttagataatatcgggaaagataatgtgctttaataaaatggaaagtttagattgatttctgcagttgctagtccattttaattgtacttattgtgaattcattgaaatggaaagaaatatatccagcaataaagtaggcctgttatttttgcttgtttttgttttggtcatgacaaactgtgaaatgctgtgttttttctatagttctagtctatgaaatctgcaatctttccacttgatttacgaaggaccttaattactgctgtcattagcacctagtgttcaaaacagtctgtttaaatgtactgttagtctcacctccaagtccctgcttgctttatttttttccaagggtaagtaaaacaataattgacttagtaacaacaatcattatgtacagtgagttaaatattacacatttttgatgcctatttctatttatttagaatttggtatttgtgtgttcagtctggcctagacttggaacaagtgtccgtaagtagcgctgttactagcgcagacttattacctgggttttaaaaacaagtcactcatttgcctttttctttccacatggatagggatgacagacaactgctgtaaagcttcaatgtttctgcctggtcatgcacagttctgcaatataatgcataaatgtataacaacaacttgggatcgcttgatactttccttggaataaggaaaccctaccaggcgcgtccccgcgcacgcgcgcgcgcatacacagacacacacactcacacacgctctcacgcacacacacaggtcaaaagttgatttatttctgagatccccccagaatctttcttctctccgtcgccgacggctctgggcttctcggcggggcggtagtgtggttgggggcgtaggaggggcgccgggcgccgaggcgacggagacgggagccgggtgctggtgcgtgccgcgcccgctcctgccgggtgagagtccgggccgggttttgcgccgtgtccgcgggcctgtctcacggcctccagccgccgccgctgccgtgtttactgagctcgcgcgtcctgatatcactccgctggcatggaggaggaggaggaggtggaggagcgagaggaggaggaggaggcggcggcggcggcggcggcgagcagttgatcattgtgatggtggcaggagcagcggcggcagcggcagcccagccgagcgttaggtgctgctctctgcgcggcgttttgcaaaggacttcaccgatctacttttgcagtcgcctcggactgtccatgtgtttacttcccccagcccgaggattcgatatctaggttcctgtgaaatgcaactgagcagccaaagtactttgagaacacggggcggcat

SEQ ID NO: 32747 - DNA, 2300 bp, Homo sapien
gcctcaaggattttgtgagaatcaaatgtgatcaaatgagataatgtaggtgaaagtactttaaaaagcctaaggtactcttcagatgtgaggtcttactcccttgtatttgagcgtttgaaggcattgaaatcattaattggagcactgctgtaactgtgctgtagagctgtgatttggccttttttttttttttttttgacagggtctcactgtgttgcccaggctgaaatgcagtggcacaatctcagctcactgcaaccttcacctcccaggctcaagcgatcctcccacttgagtctcccaagtatggcccgtttttcagataggaacttagggttacacttcaagggtaaagcttaacgtagattagagcatattcaaatctcatcttaaagaatatcctcacatcatgttggaatctggtaaatgctaaaatactggtgactcattgcttccccaatgtccttatttggtagcatgcaaataaaaatgatcattttcagatttagattttctcaaaccgtggtgcgagcagctatttttacttttgcttcagtcaccattctctgtagtagaaagtgtatttagagttgtaaaaactgtttttccatttgcagcctaaatttaaatataggatacagccaccaaagtactctcctggtcagatacaggagtcacgatagtgaaatccaggacttctgacatgtagtcctcatttccatccatttaaggactccatatcgctaacttcacaagtgcttcatgagaccatttccatagcacttccccttaggacacctcaattgacttgcagatgttctattgctaattctcttaacagttgtatttgagagtggtgggtccattggaaagatatctgacttgcagaaagtgaaacctcacccagtcatctgccttctctcttacaggccatgggacatataccctgtacttggctccacaagaaatgactgatgtcaccaaaacatgagcaaatcttagaaccctaatttcccaatagttgttgtcctgtcccaccaaaaccaaaagttgggcatggtggctcacacctgtaatcttagagtgtgggaaggccaaggcaagagtatcacttgaggccaggagtttgagaccagcctgggcaaaataatgagacccccatttctacaaataagtaaattaattaaaagcccaagcctgctatcacatttctccaggggtcagagctggagtttacctcctgctcaagacactggctgctgggtcagaggagattcggacacatcacctggtttaaccccaggactctatgtgaccttcatcccagccctgactcagcagcctgccctgtgactaacttcctgtgactgggctttcagatgttgatgttgatgatgtccctgccaggataaccggtccagattggccagctgtgagaataattcaagtgggtttcaggtaaatcactttctgatcaccaatctctttctctttgataaaatatcctgtgtctcttggggccaggttggtggcactaactcactggatgcttatgtttatgaggcttttaggggtagttagatgaaccttgccagttctcctgtcctggctgccctctcttgtttcagattttgtgatggactggaacacttagacccagaatctgacaccaaagcctgatgaaacatggggcagtgcctggccaccgaacctgcccccagagcaggtggctagaggcaggaaataaagaggatgctggtaggtgttgcaccttaggcaacagagtgtgctctctctgcctaaagccacctgccctatacccatcccagatgggggcttggtcagtggggcctcctccacctcccctccccagactctaccatctttactggggactttggccccagtaaattcttgcaacatatgaaatgcccagtggaaatgcaaaataatcacgtcatctttcacacatttatggtatgttggcaatgtttctaatagccactaagggacaagagtttatctttctatcttacatctcataaatctcttcctttttttcatccctagtgtaaattgtgcttagaccaataacacatttaaaattatagagcttttcatcactacggagatgctcttgcctatgataggaacgatggctacatctgaagctgagcaaatttatcttttctcttcgtctgcatcagggtgacctctggaaggtaagtgaaagattttcacttagctgggcacaggctttgttcaaggcatctgcttgtaagagccagtatttaagg

SEQ ID NO: 32748 - DNA, 2300 bp, Homo sapien
ataatagaatggttaagagcacagaccctacagccagagggcaagaagtccaatcttagctccaccacttgcttagctgcataacattctgtcactttttaaactctctacatgcctcagctccctcatctttaaaatgggaataatattagtgcctacctgtaggactgttgcctagcacatagtaggcattttaaaagtgtgtgtcattatttctaggactgacagaaaatggatcagccaagagaggaatttttatgcttcctaaaatactggtccatgattatatacagagttgctagaaaaagcagctcatgtggttgccctgagcctgtaccctgtagacctccaactacagggagtgtaactaatcaaggacctcagctactgtgctctgaaatccataactacatttgtacagaggtctcactttctgccagctgctcccagccagtaactaagtgctgtgtgaaaactaagggaggtcatttctgggagacatgggactcctcttatggtcaactttggctcaagtattctttgacatctttgtcaaaatttctttattctgatgatcaagctggaccttccattccactttgtcttcacttcacttcactttgtcagacttgcatcatgggctaatgtccctccaacctttctgcctccctccctattttatctcatctttttaatcccatcttggtgtctgattcttagaggacttgaactaacacaatctagcattcaaaccactcttagatatgacatcctattttccaccatatctcccacctcttatttacctgtatctcatactcttggtttctgcatgtgcccaataccttcctgtctctgagcttttgcccatactccttcactgagaaagcactcactacctgaccaattttgcctgttgaatcccacttttcattgatcatgcatctcaaatgtccccttctctaagcctttcagggtcctgtcagctgcatatatttttttcccttctgtaaacctccaggattcttgtttttgaacacttttataagcttattaatagcaaataaataaaccttttattttgaacctccaaagtgctcagcttgtatagaataggcacttaatatttgcagaatataattgaaaaattgggggaattctattctagtgaatttaatttttaaaattcaggatttccaacagctcacatccattctgcttgatatagtaacaatgaacttgcctgaataaaaaaaatattatatgtatcaaagcacagtgcagaatgtagcatgtagtaacaattttaatatctgcttaaaatgcttcatcaaatttggctatttttttccgcaaaggagtgattatttgaaattctaaaatagttttgctttgtgtctgtatacaaatgtgaactagggcacctggataaatagttgtaaagaaatacttcctcctcaaacaaagggtccctgcctaagggctaatgaagccaacatctctcctcttgggctcaactccagaaacagaaaagggagaccttgctgtttcaatgaacttttacaggatgaggtgtctgaacagtaatatgagagtgtattgatgagctcaatatataatcttatttcttcatgtatcttatttcttcatatatatttcttcttatttcttcaaatatttcttcatatatttctacatatatgtatggcatatatgtatggcatatatgtacatgtatgaatcttatttcttcatacatgtaccaggcagtttccatttaatcctcacaacagacttatcctcatattacagatagaacattgaggctctgagggtttgtgacttacccccaggtcatgctctggtcattgataaatccttgagaagtttaccgtgggtatctaaaagatatgttaatcatataaagtcaatttcttcccccaaccttatccttacgctttttggacaatttccttgagcaattcagcctaaggaaacttgaaggcagggtttggcatctagccagggtacagcagccgtgccagcacagcagcctccggtcaagggttgtaagtcattaacttgggtctcctaccacttccggttaagaatgcaacactcaggtgagaacttctcaggtggaaagcaggaagagggtggctagtgcaaggatcagatagcacctgcttggaagttcactgattaatgatttaacaagggcggtcacatgggacaactgctgcttttctctgccctcatttttcttactaacaggtctgaaaattgaacaagatggacgg

SEQ ID NO: 32749 - DNA, 2300 bp, Homo sapien
aaactaaattccaaatgaaataatgatccaaaatgtgacaaacaaaactctaaacttttagaagaaaagcgtatgtctgtatatcgccgtagggaagaaacagcacgattcattaaggaaagatgtaaaatattgattattttaaaatttggaagttttacaaacagaagagaagccatctctaatcaagttaaaaaacaagccacaggttggcagaatatagtaaaactctcaaaatataaagaattcaggccaggcgcggtggctcacggctgtaatcccagcactttgggaggtcgaggcgggtggatcacgaggtcaggagattgagaccatcctggctaacacggtgaaaccccgtctctactaaaaatacaaaaaattagctgggcgtggtggcgggcgcctgtagtcccagctactcgggaggctgaggcaggagagtggcatgaacccaggaggcagagcttgcagtgacatggtgccactgcactccagcctgggcgacagggtgagactccgtctcaaaaaaaaaaaaaagaattcagacaaatcagtaagaaaaagacaactcaagataaatatatgcaaataacgtaagtaggccacttacagaagaggaaaactgaacggccagaaaggtttttaaaaaatgtttaccttcactaataattaggtaaaataacattaaaacaattagataaaggggcatattcatcaagaagacacaaaatcctaaccacagtgctacaaaatagaaatgaatcaaaaattaattgaattcaaacagttcattactccctgctctgcaatttgtaaaacaactatacagataatttaagtatacagaactcaggtcccaaacttttcagtatattagaatcacctgggaatcttttaattattctagtgaacagaccacacctcagaataaattacagtcttaaggagtgagatacaggcattagtatttttgaaagttacgaaggtgattttgaaaaaaggctggcaaatttctgaactattgatatagaagacctgaacaatcctatcagccaacttgacctaatggacatttgtagaacattgcacccaataactgaagaacatgctttcttttccaatgcacttggaaaattcatcaaaatagactccactgtgtatcatcaaacaaatctcagcaaatttaaaataattgaaacagtaaaaattattgtctctacccacaaattaaactagaaatcagtaacagaaagatatttgtaaatctccaaatagttggaaatcaaactatgtacttctaaacaaaccatgggtcacaggggaagtcacacacaaaaaaattagaaagtaattttaaactaaaatgtaaacataaaaaggcagctcttgcatgactcagctttcagcttattttcagctttcagacttgggaggctgaagcaggagaactgcttgaacccaggaggtggaggttgtagtgagctgagatggcgccattgcactccaacctggacaacaagagcgaaactccatctaaaaaaaaaaaaaaaaaaaaaaaaaaaaaaaaaaaaaaatcccccttctgaataaggaaaggctataagtacaaatagaaaccactgagattgcatagaaatatttgattataaggtgaacattcatgcgacctggactatgtgaatattgataatatagttcatctaaataaaggcacaaaattacattttttttcctagagaatgggggaagtcctaattgaaaactgtacaaggcaatatattatgtgggggaagaaatgataaataatgaaatagagaacttccaatatctttttgatgttccagtctggcacactctcattgtgcacatacaagctgctattttgtcttaattagagggttctaaacgtactgtggatatttaaggtgaaatatgctaaatggaagcatttttgataactttcaagtataaccaggtgtgttgtctgatgctttaagctcattaatttgcagaacatgttccatctcattcctaaataagaactcacattttcttttttactcatttttttcacttgaaaggttattgaattcattggagaatgaatgctgttctgaatttggtgagtaaagaatataacctatttgttaaaacttgatttcaaaactagacgtaattgtatactacagcctagtatactatactcaacagtataccatatagctatttggtaaattaaggtgttcatgtatactttctcaagattataatttctgataataaccaaaagtaaataa

SEQ ID NO: 32750 - DNA, 2300 bp, Homo sapien
acagttactatactaatttacactcccaacagtaatgaataatagttttttccccacaaccttagaaacagttattcctcacccgacatctttattgtataccaacttccaggtaccctttttttcctaattttctttttgtctattcttgtgtcaataccacttttttaaaagttgctttaaaatagaattaccatatgattcagcacaaattaacacacacttctgggtgtatatccaaaagaactgaaaagagggtctcaaagagacatttgcacacccatgtccatagcagtattattcacaatagccaaaaggaggaagcaacctaagcgtccactgatagatgaataaacaaaatgtggcataatacacataataaatgatatatagaactattcagccttaaaaaggaagttctgcaatatgctataacatggatgaactctgaggcattatgctaaatgaaataagccagtcataaaagggcaaattctgtattattccacttaggtgaggtacctagagtagtcaaactgataaacacaaagtaagatgattactgccagaggatgaggggaataggaaatggagagttgctctttaataggtatacagttttagtttggcaagatgaaaagagagattggttctggagattggttggagaacaatgtggaatgtatcttatactactgaagttaaaaatggttaagatggtaaattttattctatgtatatttcactacaattaaaaatatttaaaaatactgttctagcaaaaacaaaaggttgcttttaatagtttctcttgatctttggtgtcctgcaatttcaccgttgcatagaattcttatattaatcctgctcaagaataagtacttcttgaatctgaaaattcaaatattccacaatcttggaaaattcttagttattactctttgaatactgcctgcatccattctctctagtctctcttttttggcactcctattagatttatgttggattttttttcatttatttagctcctacattgcattctagtaaatttcctcaaactgaatattgcagtcgcagccaaatgcatagttctcaaaacactgaatagaagatatttttatatagctcttaaaatgattaaggcgatgtgtcagcaaactgtgccagaagtaaaaagtcaagaaacagggagacataaggcttgtctctacagcttaggaggctgtgccaaagccaaaataataatgtattgctgtggatgtctaccttgtactcaacgaatattaaagcaggatgccgctttgtgtcaagtactagattacgatgaacggtgtcacgaagaacactccactcttgataccgtatatgtgaccttgagcaagaaatgtgttcacgctcaggcttcagttcctttctgtgggttgctgtgaggctccacaggggtaaggtaagcacaagtgctatgcctcagtaccactagggtattttctcaattctaaaatattaaatggccacgcactacagatttaataatagtttcggaggaggggcgtgaggagaggaacattccactagctcaactataagctttccgatttcggaaataagaaaaatatgaaaaagtctgcttttagaattaaggaacgacggtgtcgcgttgactttctctgcttggttcgcaaacgctcttttctcgaacttgaatgacttctctgtcgctcataccaacctctttcctgaatgacttctctgtcgctcataccagcctctttcctgattttccacactgggattctcactccaattctcaggtttcctgatagacctgatgagccgcttcaccagcgccgcttagcttcgcttctttactgtcattggctgtcgctgttccaggtcccgcccacagcgacctcaatcctgattggatgtcagtgtccttttgttatggcaaaggtggatcccggtgctttgagattggacgactggggtgaggcgggcagctaatgcgcaggcgtgtattctcgagtcaggattggcgggcgagcggctgggacgggatgggattcttctcacggcgcacgttctgtgggcggagtgggcggagctgccggggtcagttggtccaagtgtcccggcctgaggtgtcggccggatccctccttctcccggcgcctcaagcggaaggtgagggccgtcccgggcagcggagggcctggccccaggcgactagagctgcatcctcagtacctccgagggcctggagggcggggcgggctggacgcggccctgcgcaccgg

SEQ ID NO: 32751 - DNA, 2300 bp, Homo sapien
caatttataagctctggaaccctgggcaaggttaacacctcggccttaagtttcctcatttgtaaaatgtggataataaccgtacgtatctcatgggtttgttgtgagaatgagtggatagatacaatgtgttggcaacagtacctagtacatagtaggtattcaataaatgtctgctatcgtcttctctaccttttagctctaatttgggcaacagaaagaatttaaagaaaaccatctggtccagctgcttcattttacaaaatcaaggccaaagatgacaatggcttactgaagaccacagaagtagttagcaacagggccaagactacaacaaatgcccagtgttttttccaccattccaccacaactattgtcacatctgagcctgcagattttgagactttttcctaatacccgtccatcttcagccactcaacttttctgcatctaaaattgatttcaccatctgtcatactggagaactactaagactgctaaaataatgtcttcgtgcattaatgtgctaaatgctttgcatatgttatttcatcaaatcaacagaaggaaactgcaatttacagatatggacactaaatttcagaaagtctatatatctttcagaaaagctgtttcagaggtttcacagccaatgtctctaccaagaatttgaacccaggtctaacttcacagtccatgctttttccattatgcaatggaaaaaactttaatatggccctaatcttaagtttgccaaacattttgctaccactgatgtcaaactcctctggaatctttactaagcaactgaaaataaactccattcccttcaagctacggaacttcaatataatgtctgttcagatctgttcaagttctgctttgacttgtcctggttaaataaatccagtttcaaattccacaagatcaaggaactgtttggccaaatgaggatttaaatggaagctatactctcagagaatggctagctacactgattttaatcaggaatagaggtaccagaatacatgggcacagctttgggtcctcgggcatagaaaacgtgttggcaacctggaatggcatctgtccttattgttgcgtaatagtgtgaggttgacacactgtataacagaagccctgcctttcaggaatgtatcctctttctcctttccaaacctttcttcccaaaacttgttcagcaggactctgggggagaagacgatcaggaaacaaacccaggtgccgctttcgccgcctggaaaaatggtccaatccttattttacggctctctaggctccctccccacctcagcctcccctcccatctctcaggctctcgcagagcagccacgggaaggtccaggcgtgccaggtcccattccacccaaacgcccctcccgcagtccaattccagagccgagagctgcaaagcggctcccgacccaggagctgcggggagaaagctacacgatgtctgcgtcagggaccgcgagaggtccctctcccaaagaacgcctgggcctgacaacgaaaacaggagaaaaagaggtcgcgcaagggttctgccgggagccaggcctccgccgcccaccaaatgcccaggcccgagaccgctcctcccgggcccccggtgcgcagggccgcgtccagcccgccccgccctccaggccctcggaggtactgaggatgcagctctagtcgcctggggccaggccctccgctgcccgggacggccctcaccttccgcttgaggcgccgggagaaggagggatccggccgacacctcaggccgggacacttggaccaactgaccccggcagctccgcccactccgcccacagaacgtgcgccgtgagaagaatcccatcccgtcccagccgctcgcccgccaatcctgactcgagaatacacgcctgcgcattagctgcccgcctcaccccagtcgtccaatctcaaagcaccgggatccacctttgccataacaaaaggacactgacatccaatcaggattgaggtcgctgtgggcgggacctggaacagcgacagccaatgacagtaaagaagcgaagctaagcggcgctggtgaagcggctcatcaggtctatcaggaaacctgagaattggagtgagaatcccagtgtggaaaatcaggaaagaggctggtatgagcgacagagaagtcattcaggaaagaggttggtatgagcgacagagaagtcattcaagttcgagaaaagagcgtttgcgaaccaagcagagaaagtcaacgcgacaccgtcgttccttaattctaaaag

SEQ ID NO: 32752 - DNA, 2300 bp, Homo sapien
tgatgtgtcagaacacttcacgactctaccattcagcattacattctgggactcctccgcttgtattattaaacactacatcactctcaaaagccataccccttgtcttatttgcagattattctttctcctctgacattatcacattgtattattctgatgaaaagttgcctattaaacaaattataaatattatattcaatcatcctttcaataagtggcaaataattttggagatatgttaaggccttaaatttcaaggttagagattagatttcatgctgtgggtaatgaagggtcattggaaactattgaatgagctgaggattaaactacgaagtgtaggtgggaggctctgaaggggggcaactagttaggtaactctgaacaacagtttctaaagtagtgagaatctaaactagagaaatggcacagggactggagggggtgaggacctcttttagatgattttatggagttagagtttaatttatggaggcagtgaatgtagcagccaaagagtaaaaaaatgttctcaaggttttgagtactatgtgaccaagaagatactactaaatcttgcaaaaattcactattcttacatttttagttttcagcttcctcactgcaaactttgaatggatcctttaaaaaatccctctctagcagttcaagtgtatttgttatgggccacagaagtatgttgaataatagaagtcagaaggacggaagaaagaaataaagggtataatattgttacaaagtatctcaaacaaaatgtctttttaaccagtaaattttaacactatccaaacactctcccagagatgacaaagtcaaaagtttagaaatgctggtcttaattagtgaagcaatgtgaaaaaactcagtgatcttgacccctagccaataatgatacgttgtgcacggaatgccaccaaacccttaagattgaaactcttcaacaagggtcttagactcacaagtcaattaaatgttgttaattaatcttccaataaaattaaattgttataccaaattcaaagtcaagatttactataaaatattaagtagtaaaattaatattgatccaatatataaaaggcaaagcagcttgtgattgcataatcatagcataaactacgtttatgctaagatttatttcaatgtgtttgaaactacaggctctgagagagacaggcctgatttacatcccgtttccactgtttacatgttgtgtaacttcgagcaagttgccatcagtttcatcacctgggttgccacgaaggttaaacaatgaatgtaagccccttagagcacaatgaacacaataaatgttagcagctcttattaatagtgttgttcgagagaaaaagaacatattgttttatatacaatgtatttattaacacttaacgcatctgtatttgtcatatacacacaccagacaggaaagctccttattaatcaccatgactgcagatctgttaacatctagaactctggagaaaacctagagccctaatcttgctgcacttattactggacgttgttcataaatatgatttacataaaattcaggacccaatcattgcgcaacaggaggtagcacggtctgcagagagggcgggagctcagaggaggaaaagtcttcggacttgcagggggaattcctcctgggctaacccgggagcggggtccaggccacaaccggccggcggcggcacaggctccatgtgcggctccccctggaggcggttgagcccctcggagcaggagcgcgtagcacacacctcgggccgccaccgcctcccgcccgccaccgcacgcgcacgcgcggttagtagtcgctgctgcgcggccgccggcgggactggtctgaagagacgcggggaccaagtggcaacgacttggacatctgagctgtcactgccgaaaacaggccgcaagagaggtgcgtgagcagcaggccgcgttcccgctgtcccgctgccctttgcgcgcagattggggtgaggaagcggagtcgttgctgcttcccccaggcaccccgttactttgccgccagagggctgaaccggtcggggccaagtgagggtggatgttgagtctggcgatggggctgcagcgagctagggtcttgactgggctctggcggccccgtgggtggacgcaggaggtggtgccacctgggaccctttgtgtcttcagcaccgccgcatccacctgctgcgcccgggctggggcggacgagcacggggacagctaggtgcctagcccggccggcctcccctgcgggc

SEQ ID NO: 32753 - DNA, 2300 bp, Homo sapien
aaattttttgtatttttttgtagagatggggtttcatcatgtttcccaggctggtctcaggcagctcggctcaagtgatctacctgcctcagcctctcaaagagctgggattacatgcatgagccaccatgccaggtcacctttcctgctttttatgtttttctagatttctgattactctagtccctccaatcttgattacattgccttggtctcttcccaaatctctcttcaactttgatgtgtcagaacacttcacgactctaccattcagcattacattctgggactcctccgcttgtattattaaacactacatcactctcaaaagccataccccttgtcttatttgcagattattctttctcctctgacattatcacattgtattattctgatgaaaagttgcctattaaacaaattataaatattatattcaatcatcctttcaataagtggcaaataattttggagatatgttaaggccttaaatttcaaggttagagattagatttcatgctgtgggtaatgaagggtcattggaaactattgaatgagctgaggattaaactacgaagtgtaggtgggaggctctgaaggggggcaactagttaggtaactctgaacaacagtttctaaagtagtgagaatctaaactagagaaatggcacagggactggagggggtgaggacctcttttagatgattttatggagttagagtttaatttatggaggcagtgaatgtagcagccaaagagtaaaaaaatgttctcaaggttttgagtactatgtgaccaagaagatactactaaatcttgcaaaaattcactattcttacatttttagttttcagcttcctcactgcaaactttgaatggatcctttaaaaaatccctctctagcagttcaagtgtatttgttatgggccacagaagtatgttgaataatagaagtcagaaggacggaagaaagaaataaagggtataatattgttacaaagtatctcaaacaaaatgtctttttaaccagtaaattttaacactatccaaacactctcccagagatgacaaagtcaaaagtttagaaatgctggtcttaattagtgaagcaatgtgaaaaaactcagtgatcttgacccctagccaataatgatacgttgtgcacggaatgccaccaaacccttaagattgaaactcttcaacaagggtcttagactcacaagtcaattaaatgttgttaattaatcttccaataaaattaaattgttataccaaattcaaagtcaagatttactataaaatattaagtagtaaaattaatattgatccaatatataaaaggcaaagcagcttgtgattgcataatcatagcataaactacgtttatgctaagatttatttcaatgtgtttgaaactacaggctctgagagagacaggcctgatttacatcccgtttccactgtttacatgttgtgtaacttcgagcaagttgccatcagtttcatcacctgggttgccacgaaggttaaacaatgaatgtaagccccttagagcacaatgaacacaataaatgttagcagctcttattaatagtgttgttcgagagaaaaagaacatattgttttatatacaatgtatttattaacacttaacgcatctgtatttgtcatatacacacaccagacaggaaagctccttattaatcaccatgactgcagatctgttaacatctagaactctggagaaaacctagagccctaatcttgctgcacttattactggacgttgttcataaatatgatttacataaaattcaggacccaatcattgcgcaacaggaggtagcacggtctgcagagagggcgggagctcagaggaggaaaagtcttcggacttgcagggggaattcctcctgggctaacccgggagcggggtccaggccacaaccggccggcggcggcacaggctccatgtgcggctccccctggaggcggttgagcccctcggagcaggagcgcgtagcacacacctcgggccgccaccgcctcccgcccgccaccgcacgcgcacgcgcggttagtagtcgctgctgcgcggccgccggcgggactggtctgaagagacgcggggaccaagtggcaacgacttggacatctgagctgtcactgccgaaaacaggccgcaagagaggtgcgtgagcagcaggccgcgttcccgctgtcccgctgccctttgcgcgcagattggggtgaggaagcggagtcgttgctgcttcccccaggcaccccgttactttgc

SEQ ID NO: 32754 - DNA, 2300 bp, Homo sapien
ccatgctgtgcaagagatcagtggaaattattcctcctgtccatctgaaactttgttgggagggttaattcttaagcagcttttccttctctgtttcccatgctcccttgtagaaatgggatgtcagcttctgcccacagccaggtctttttagaacttgtgtatcatgcatgactacacagcaaaggaatgagggaaccctcttttctcaggcatctaccgcaactatccttccctagacctccataaccatttatgctaacacgtgtaagtacatttctttggacaactaccagtaattcaatctgctttgaatatatttctccctcaaccatgggtgtaacttaggatcattttggaagctcctatctgcaagtacctagggatatatatcaaaatgaaaggcagaggctttacatcaccttgtccaacccatggctggtgggcagcatgtagctcaagacagcttcgaatgcggcccaaaccaaattcgtaaactttctcaaaacattatgaaatgtgtgtgtgtgtctgtgtatgtgtgtgtgtgttttagctcatcagctatcattagtgttagtgtattttatttgtggcccaagacaattttccttccaatgtggcccagggaagccaaaagattggacatccctgccctacatactaaataaattcagagaaggggaaatcagagtggtctgctgtagccaggttttgattcatgaaacagatgaaacatgagacctgacgatgtggaaaaaatttcaatggtcagagaggacactggacattgtgggcagggggcagacataaagagaaaaggcacagaaggagagaagtgaacatgacatgttcagagtaggattgaaaaaagagtctggcaggtgccagaggcatgtaagggcgccctgggagatgagaaagcagtgagtggccttcgattgagtgggtccattttcattcaggagtggagctacgtaaacaacagtgacagctgactgtggtgaactaggaagagtatctggtattgaagtgtggattgcagagggtagatcctgcagacagtgagaccagtttgaatgtcactgtgatcatctgagtattggggatagtagctagcaacagaaacacaatcctttaggtaactaaagattttataaataatgagatataatgaaccagagtccaaatgattgtaagaagaactatgatgccactgataaaatcaagggactctgggaaaacagctattaatagcttggtgaggaagtttggacatcttgaatctgatgtgggacattcaagctgaagggctgggtaggcaactgaaaatgcaaaaactggacctcaagtaagaaggcagtgaaatgctgagtatggagatctctctttatgctgaatagcttccttctcccaccctaatcttccctacgttttctccaacctgctccacagcctagaagccaggtttggaccatccagtacatcaagctgaactttcttgtcttctggttttcagtagagctcagccaaaggcaagcaccggcaacagactgaaggggtgaaggagaacatagttgaggtgtctctcctggctccttgttttgagatctggctgggtcccggctcaatggaaagtcacagctcctagccattagcacatgagaacacgcaggctatagtggcatcctcaggctggggtatgttcaaatctttcttccccttcaaggggacagaagccagcccttccaacgtgcagggctgatttgaagtagaatgttcagatattataacagactgccagtgagtcctcaatgagaggagagcttagaggggagagatcaaggagtccatagagagtctcatcctactgatgctctagtgtttctcagcttgggtaaagctttgataagccactcgaggaaagtcacctaacagttattgcgcacccaccacgtgccaggcaatggggcgctttccctagtttatcgtttttaacgaccagtagccctggccagcggtttatagcacgcgctgaaccctagagcaggaagcaaaaggtgcagaagttctgtggcaaggcggcttcccagggcgggtgtgctggggacccacgcggcaccgcggggagggggctctgcgcgctcaaccccgtccctggcattatccgccgcctccacccgccggcctcccgcagcctggccagggccatgaggaccaagcaggtgaacttgctgatcaccctggtcgccgtcgcgttgttcagcttctcttgcttctccatctacaggataactcaa

SEQ ID NO: 32755 - DNA, 2300 bp, Homo sapien
tcaacagttccatggctgtttagtctgagaatccaagaaagcagagattcctcagtactactaaaaaatataaccaaatttccttcctctattgcctttggtttgtatgtaggtgtatctgataaggccacgtagatgcacacaggttgagagacctagggacctagatggagaaggtcccactttctccatgaaaccagaatcttaatcttaggatataattaacctttagctagccacaagaaagaagaaaaccaaagagaataagaaatagagatggacaatctttcctgagaaacaggatttgtttaatgtatctgccagttacatgcaagtgaattagtggaaaagggaagaggcaaaaggtatgcataagaagttttaatgtacagtgaccctgcttataataaatgcagcttaatcaatttctctggttctgacaaaacatatcagcattctcttctcttggggaaagacataaatggaagtgggcaaacaggcagcagggaaacaaggaggagagagttcctctactgcactgcctacacttagtatagcactttgaaaaggcaaaaggattacatatagaattatctcaccttctactatgtaaaagtttgtgtaataatggagatcctcctgaaatagaagttagtttacaggtcaatttgccaaatcggctgtgcactttgcctttctaaatcttttaatctataattttaaaaattacattagatgatagttataagttctctttaagatttaagattctgtgattttactattgtagtgtctatccagacttcattaccaagttcattgttggtatgggacagggatgacggcttatgcaccctgcacatggctagtgttctacaattagtccattttttaaacgctggttgagatgtgggaaagtatgtatcacttgcttcaattcaaggagttggaaggaatatacatatatacacttgcatataatatttttggaattagaaacaagaaagtaatactggttgcttctgagcaaggtgacggaggtatcaggagttttgggtggatggggaaatttgttttcagtatcagttgtcctttgtatttatattctactctcccccttgctctttctcctccagccaccccggccttcttgctcttcctccaacatttcaaaaaccctcccaattcaaggtctttgcacttgtcattctggtgcctggatcactctccctccagatactcccacagtaaactcccttacttcgttcaatgaggccaaaatgccacgttaataatgagacttccttgaccacactgtatgcaatgacttcccccacagactccccattaccccttagctaacaacccctatacccttaacatttagtagcatctgacatattaaatatttggctgtttgtttcgtgtttgactgccttttggaacactgcctgtgctaacaatcaacaaatacttgttgaattaagaaacttactgcttgaggtttttaaaaagtaatcacgaaattactttttcaacaaaaacaaccagttagggaataaacatttgataaattaacttttagacctatagtattataggataaagtccaaacttcgtttctcaacacatggactttcctcatctgccacgtattggccacagtcaagtagccggttcccttttctcgtgcataaagtggagttattcataattacttcacagaattaagattcaatgcagatgaaagcgcttttgtaactaaggcactataagttaccgtaagcacagggtttcttccgcgcttggagcctaggaatagtacaaggtgtcaacccgcgctaaggacctgaggttcaaggagggaaaagtctccagcgcagcgctaggaggcgctactccggcgcggggcggggctcctggccgccgttgccagggaaaccgtctgggcgtccctagtatctgagccctcgcgcctgggccactcagctcgacctctctccagcgttagcaataggtggagcgcgggccaatcggaagaggccggaggggcggggcgggcagtggccctgggaaggcgggtccgcggcctcgctccctgacttccgggtcgcggtgcttgaagggagtgttccgtcgtttccgttgccggctgtttgcagtggggaaaccgaggcagctcctgctccccctagttcttccgctcctgtgaggtggctgctgtttcttttcctcttgccccggatgcctcggtgcggctgcactgagagcgcgcgggctcgcgagccccgcggggttct

SEQ ID NO: 32756 - DNA, 2300 bp, Homo sapien
tttcccgtgaaaagcatgcccctttcattgcatccatatcatgactaccaaatacctcctctatttcttcctcttttagcatgttaaatgcagcttcctaagctctctatctggatatcaacagtattctctccaaataattctaagactttaaaaattggtttaatcttcttacccctaaaatcaccccccttaccaactgcctcatgacaatcattggtactgtcactgagcttgcaacccatgttcttaaacatagagtaatctttgactccacatctaatcattcataaagctgtattgtctatcaaattaaatctgacatttatgtgagagcacttcatagtctgtaaagcactacacaggtgataacatgaagctacactcataatggatttgcaggctctgcttctcatttggcttctacagcctcatccctcaccaacttcttgccctacctctctctttcttccccatcacccaatttcccagtcagtcaggccaacagaatgcattctatatacgcgacttgctttccccaacatctttgcctgtatgcatgccacttatttgcctcagttgatctttatttcaacaagtgtttgcagaggagaaacctcgctggctccttctcctttctattttttttcagaggctacccgtcaggtcaacattgcctttttcagggaagctctgcaagcctgacctcccttggaagtgccttaggactggcttcttgcacagtacacaacctttacttatagagggtttggagattattctttattcatgtcttatttctcctgctcctggaggagatgactctgacttccactgactcttttggggggcttaagtcagggttgagtaccagaggccctaaatagctggacgtggattctggtaatatcaaatccatctttggcttaactgagaggttctgaaagctgggacctgaccttgtccatttccctctttctccagtttcctattatttcccactgttttttttaaaagttttttgttttcttaagttttcacaagaataaacattgaaaataaaatttgcacaaagatcgaactaggaaaggccacacaaccaacacatattacatcattataggtaagttagcagggagatttcagacctgggctagctctggaaccacattttacactgttgaaaataaaagctggagtacagatgactttcccaggttcacagagttggtaagctggagagctgcacctggagccaagcaacctgccctgtcctttccactgcaccctctaagaaatctaattagaaggaacaggtggtatctcattttgtacggtgctttagcaatgtactatttgctttctagtgtgtctattgtctcgtttgacatcttctctcaaaaagtgatgaaacgaaacgctctttttgacaagttcagagtgctcttggttcctgtgtgggattcttccaagtctgaatttggtagtgggaagagaaggaatccggaggaaggaggatgagaagtttaaaggagaggaaagggaagcagagaaggccgcaaggtgcctgcaagatgtctggggagttggaggaatggaagagtgccccgctcttccttctgggagagctccagctaggcagaacctttcaccaaggctctgatatcgtgctggtttccgaaagccccagccgaaggtgtgcagccaaagggtgacagaaggtgaggcacgtgcgggggcgcgggtgctgaccgccgcggtgcgccctccctccgacgtgcggtgtgcggggcgcagacaaccagcggccggcccagggctttcggggagcgaagcagggctcccgaggcaccgagcgagaatgggaatgggagggacccggtgctcccggacacgcccccggcaggtcccacgcccgggtcttctgagacctcgcgcggcccagcccgggagcggcccagctatataagtcccagcggaagaccggaacgcagagggtcctgctggcgcgagggtgggtaggaggggacgcggggactcggcccccaacaccgcgctccgtctgcagccgccgcctctgcaccgccgctgcccggcggtcggttcaaaaaacagaaatcgggtttgctgcccggcggacaggcgtgaagagcaagggaaaggaacttcctccaccttcggggctggagcccttttcctctgcatctccagtctctgagtgaagatggggggcctgacagcctcggacgtacacccgaccctgggggtccagctcttctcagctggaatagcggcgtgct

SEQ ID NO: 32757 - DNA, 2300 bp, Homo sapien
attaatttgatgatttcatatacattgtgaaatgattactataattgagctagtttaccatatctattacctcacattgttcccatgattttttctttttgtctttttttcttgttttttttttttttttggtggggagagtttggtgagagaacacttaagatctaccctcttagcaaatttcaagtatacaatacagtattacattagatcttcagaacattttcatttcttataactgaagctctataccctttgaccaacatctctccatttttccccttccttagctcctggtaatcaccattctagactctgtttctatgagtttgactatattagattccacatacaactgagaacatgtattacttgtctttctgtgcctggcttatttcacttagcataatgtcttctgggttcaaccatgttatcaaaaatgataggacttcccctcttataggctgaatatagtatcccattttgtatatatgccccattttctttatccattcatctcttaatgggtatttagattgtttctatatcttggctattgtgaaaatgctgcaataaacataggatgcagatatttcttcaggatactgatttcacttcttttggatatatgcttagagtgggattactggatcataaggtggctctatttttagtttaaggaatctctatactgttttctgtaatggctgtagcaatttacattcccaccaacagtgtacaagggttcccttttctccacatccttgctgacacttgttatcttttgtcttttttatcatagccattctgacaggtatgaggtggtatttcattgtagttttgatttgcatttccctgatgattagtgatgttgagcacctttaaatacacctgttggtgatttgtataccttcttttgagaactgtctattcatttcctttgcccattttaaaatcaggttgtttggtttaggctattgagttctgtgagttcattatatattttgtatattgaccccttatcagacatatggtttgcagatattttcttccattaagttgctttttgattgcttcctttgctgtgcagagctttttagtttgatgctatcccacttgtctgatttttgcttttgctgcccgtgctattggtgtcacatccagaaaataattgccatatcagtgtcaagaagcattttctttctatattttcttctactagttttatggtttcaggaattgaaatttaatttaatccattttgcattaattttggtacatggtataaaaaaagagttcattttcattcttctgcatgtgaatattcagtcttcccaacaggaatgtaattaaaatttagattgagaggtagatacttgcatatagggtttttctgtcttgaagaatcctaaactgtaagtatctcaaatggatgattctcagtataaccctccatccccatccccaacacctgaggaacttctgtcaacaatgatgactcaccactgttaggaatactcttaccactctgcaatttgaaaaactccaagtatctccctcaatatggctattaaacccttcagagctaacacgttagcaggcagttttcagacttattttgagagacagaacctcctatttcaagtgaaatcttaatgaaaccacaataaaataaaagcaaagctgctggggttgaagagagtgatgagaaggtgaagcctcagcctggcttgttatgatgacctccccacctgtgctcctaagcagcccttcaggactgtctgtgggagttcctcagagcatggttttgtagcttgggaacctctaccttaggaaagtttttaagtagccagcctactatggagctgaaagagggaaggaggccacaggcaaattcaccagtctagccacgattgcaacataccacatctgtgatttcaccttctcttgcaagtttcctttgagaggtaggaaagtaaagcagttcaatcataagctgtagttgcaaaccaaaaggcagagctctcacgtttttgatactgtatctgttggatatatctcaggtgccatcaatgagaaggccacacatcctgggtactatgaagacctagtggagaagtccatggggaagtataatctcgccacggaggagattgagagggatttacaccgctcccttccagaacacccagcttttcagaatgaaatgggcattgctgcactaaggagagtcttaacagcttatgcttttcgaaatcccaacatagggtattgccaggtaaatgtcacaggtggttttt

SEQ ID NO: 32758 - DNA, 2300 bp, Homo sapien
tttcacagggaaggtggtatttatgctggacctggaaaggttgacttgggaagattgagagcagattttatgggttaagattcagtgcagatttcttttctctttcactgagagcctgtggaagattataaggtgggaatactgtagtcagatctctgtttcagaaagtggccatgtgaagtaaattggagtgtggagagtgttgtcaggatgccatttgagaagctattatatagtaattcctggactgtgtagagggactttgggatgcttttgttagaagaataggataaagacttgtcttggggctgtgcttgcatcgtaagcccaccatttgctgttatgattattgtctacatgcttacttttaactagaataggacagtgacagagattatagaagactgaagccctttctcctgccatccactcagcagcatcacaactaccggcaacagggtgaaaggtctgcagtggaaataagactcaggaaatgatttcaatacataatgcagagagaatcaacattacttcatgtggggggaaaagaatgatagttgagaaaaggctcacaagagactttgagacttggtaggattcacgaaacagaacagtctgattccagatttcaggcatgtagaatgggagggccataggcaaaaaggtgggaaagtgcagaaatgacatgttcaggccccaagggtgcctcaggctggctggagcacagttactaacgggacatttgggtaggatgtagtccagtgagaaaaagttgcggcattggttggatccaaaaatgtacatgggtctaggctactctgggcacactgcctgtgggttaccctgcttcacaaggagcagccagtctgcaataaaaataaaaattaaaacattaaaacaaacaaagtgtacatgatctagatttttggactttatactggtggtggttagaaaccactaagtattttggtaagaattttgtggtcaaatccattttaggaagacaaatttttagggagcatcaaggatgcactagaagctttaagagcccaaaaagcaggaattctaggtatgaggaggcagttgcaattttctatccttgggctacagagagctcagtcatgtcaatgagaatctgagaagttggccaaggctacacagatacagtgatgcggtgggagcacgaatctaagacttgcatgctctaaaggtcatgcattttcagttctaccttgagatcagagaaaatgaagatgaggcgggagggatttgaggattacaaagtcaaaggtggaattcaagggagcattttccatcgagatatatgtagaagccaattttcagggaattacagaggaactgggtaacagtgaaatggcttctcaagttattataatgattgaatggtagattaacctggtcacttgctatgcagatgtttcatttcctgtctaactgtccaaaaatcctgcatctaatataatttttgctctcatatctaccccttttctgctcagatgattactcgtttttccctgtaggctccccagtgttattcatggccctgagacagtgagtgtggagctgagtgtcagttggtgacatgtgtttggtctttctttcctcactggctcattcatgatgaatttttattaatcttggagaaaggcagaagttgacttttgagacaattctaccataataagcttagtaaaaacactaggactagcaaaatctttgtatctcttcatttgtaaagtaaaactataggcttcattcctagtaaacttaacaaaataaaattagcaccaataaaaatataataaaatctatattatgtgaaaatattttagtacacaaatactactcaataattggcttagaatttgggggttgccattgaagggcattcctcaatttttttttttaattctagccttagaaattttttcttctggaatatgtacatctctagtcatattaataccagttgtgtgctttgtgttttattccttattagggcatcattgcagaatacaacaaaatcaatgatgtaaaggaagatgatgacacggagaagtttaaagaagccattgtgaaatttcataggctgtttgggatgccagaggaagagaaactcgtcaactattactcttgcagctattggaaggggaaggtcccccgtcagggttggatgtacctcagcattaaccacctttgcttttattcttttcttatgggaagggaaggtaagtcatctaaaatttcagcaggaaactttggaaagtctactgaggttt

SEQ ID NO: 32759 - DNA, 2300 bp, Homo sapien
ctccgtatagctttccctcctcctgggtttagagcaggactcctttggaaaggggacctactatccaacaaggtagggtagataatttctttatttctctattctttatgtctgctcttacacagaagagtgaggaatggtaatatttctaggttttgtagcttcctttgggaagaggggttttagtttctatgacctgcctttagtttccatgactcactttgggggagaaagagaggtgggagacaggagggcagaaggaggtcagagagaaactgcttctgaggcctttcaatctcctttagttcaaagtactcagcatgccaaagcaccatgctttgtggtatcattttccaaaccccaacatggtattaaggcacttagagtttttaaaaataccaattatatcaagtaaaagaatacctatggaaacacttcaaaaatataaaagttacatgatatattaatataatttttgcatatgtatgacttataatcttattgtttgctttttatttgcagattttgtgactgaaggcactgcactgtgaccaaaagtgccaaatgagttttttgagtctgtgttaaatacatgaggtttccactgatgcctggaagaagcagatcagtctgtgtggtaacatcaagggaaacttccattccttgagagcccaagcggtaggaagcgaacagatgaaatggcagtctcattagaatggctggtgatttgctcattcgactaattgaaggaattcaacaattcaagtcggagctacaaaagtcacaattttgaagcccacacaagaaggtttcatttgaatctctgctcatttggaaagggaaaagtccctaggattgcccagcatccacaacaaagcagagtctgctaaattcccatcatttgggaagaggaacttttttttttttttttttttttttttttttggctgaactatcctccagatctcctgggcgggaggaaaaaaaaatggtcatcagatatgtaggcagatgggctgtgatcaccactggaagctcgaagtatttggggaaactgaaactgtctagggataaagctgccctggtttgtgtgtttctggtttcactgattaaaaaaaaaatccatctaccaagagtggataaattttaaaattctgccatgcccagttttcgaagccccaaatgcgatataggaacagctgtggtgtgaattagttggtctaagcttttgggccgcttccaacttctctattgctcacgccctacaggtcaaggaaagaagtgatgtaatgcacttagctaggccactttaattacaatggaatggagaggggggaggggtcacaagcggtgacaagtttagcgcatgacttgccctggggatgcaggaaacaaaaacatcgacgaccattggctgcgttggcttccgaccccgggtctctaaccgagctccaggtctggaaccttgaaacacttttcctgggaaaaggggtggcgctatcccatagagcgtcaaccttaaacacaaacagcacacacgcacccacgcaggctggcggcgtcctccctgctgggatgggcgtcgggcccagtgcttggcacacggtccccaggagcttcccccgaaggttcccccgaagccagccacagctgctcagctcggcgcgcggagcccgcggtggtaccgagtccgcacaaacccggacccgctccaagtgagccgcgttgtcgtcattcattcgcagtgtccggagcgtccttccagcggggagctgggcttccctagtggcgcctgcggccccgacacggcgcgttaaggcgcggcgacttcgggagctcgagcaggtagagacgggaggggctctggagctccagtcggcgccgcgggagcagcagcgccggagcccagcttggccctgaccgcggggccgaatccgctcgggtggcccttagccctgcctggcgctgagccggatcccgggactgagctataccacttcctcctcctcccgctcccttcctcctcctcttcctcctcctcccgctcctcccgccgccgtgggccgggagccgggctgcagagtgccaggccgggcgtctgcggccgcgggctctcgcggggcggcgacgccgcggggaggatgctgcttgccgcgcccgcgtcctcaccgtcctcccgggccgcctgctggggctttgttgtggcccggacgccgcgggccaccccctgaagtcgcctgccgccgccgccgccgcacctagcggacgggcgggcgggcgcgcgtgtgcccaggagtgcg

SEQ ID NO: 32760 - DNA, 2300 bp, Homo sapien
tctttcagaggcaggatccatttttgcagatagctatgacttgtggcaatcaggcttcgtagcttggggaggtagagttacttgacatgtatcatgtaataacagcctttgagacttggcacaactatggtgctgagaatgaaaatctaaatgattgaagttttaagtccaagtaggagttggtttgttttgccttgtttaaaaattgctgttagtcacagagtttgcaatctctggataccttcaaatcctagctctcactgtgggattcttgatctcagaggtgtttatttttcacagtcagcataggcttgcgccactgactcctccttcagtcggctttgcccaaaacaaattttagtattactggtattaagtttagtccagtggaattagaaggataattcaatagcaacagaaatataaattatattccattcccagagagagaatgcgctttggattgtttagtcctctgattaacgagtattttctcttcctgccaagaactaggtgaatcaggaattgattgcatatgcaagccctggccacagctgcacttacaggatgcctcatagacgatgaggggtctgaaaggccaacccgaggctggcagatctgaccccaaggaggtcctgctgcaaaccccctgagcctttgccattcactacttaccaaagtttgtttctggaggattttcctgtagctttgatagtttaaaaaaaaaaaaaaaaagaaaaaaaaaaagcttaaccagaaagtttctctttcagaagaaaggggaacagcccttccttatagccttctttacctcccccaaagaagagactgacctggagacctggtagtctacagatgagtgtcagagggtgtgtgtaccctctagaagcaaatgcagactgtatgtgtatttgcagatgtgcatttttctatagcaagagtctagactagcactgtccaacagaaacgtaatgcaagtcacagacataattttaaattttctactagccacattttaaagtgtaaaaagaaacaggtaaagataattttaatcatgtactttaacctaatattgtttcaacatgtcactaatgtaaattaatgacatgttttacatgcttttgtgtactaagtcttctaaatccattgtgtcttttacactcacagcacctctcaatttggatagtcacatgtggctagtggctgccaattggacaatgcaggtctagagttcctccagtattctcacaagatcccccgacccttacaaaagaaaagaaggttaaaagcttaattacctccagggagaactggacaccacccaagtcgcctaatgagaggcccagaggtccatttattttgtagtgaataaagattcaggcaccctttttaaaatttctgcttgaactttctaaccatatcattgatgtccatgaccatttgttgttactcctctgaccagttgttacttaaaactcacacaaaccatgctgatttggtgctgaaacaaaattatacccctcacttctatggcaaaccctcggactgatatgtggcacttaggagccaaagagaactccagactgaaatcacccaactttacctcaaccccttcttcttgttcatggttggtgaaagtcctttcccagtgtcccccagtcccacagctgtagtgaaaactcacgaacttgggaggaaagaatgagaaatgcaagactttatgtggccttcttgaaaaagaatctttgggggcctgtgatcatccggtctctacttggtgaattatgaccacctccaacagccagcattttactccaagtcagcatccacctgccaccccaatgctatggggaagaaaaggagcatttgcattcactcaaaataatttagggtcacctttaggaactgctacctcctatgtggctagtccctttggaagagctgagccctgactatgaatacagcttttgaacattgacttaatctctagggttagatatcccctgcagtgtcaactctggtcatctacacagggagaggtagagtctggagaaggcagaaaattaaaagcggcaaaggtacctacccatttttgacatcacatggtaatgatcagaatcatggaggcaaagctctgtccaaaaatgttcattttgttttgttttgttttgttttcttgtttttaacatttccttcatcctggtgaaatatcctggaaattcatagatctgggtttggtcatttcaaagctcaccatgcccagtggccatttcagttactgccctgacatccctgaggct

SEQ ID NO: 32761 - DNA, 2300 bp, Homo sapien
cacggattcatgccttattagataggttgtaatcagttactaggatcatttattttatgttcagactgtcccagatttggccagtgggagccctttccagctggctcttctgtctttttgacatactcccatcatgcttggagcatttcctttcaagaggttatgggctcactctgtactttcccagtgtcagccctataatcagccagcttgcttttcgtggaggatgctatttagaaacgaagatcttctggccactggatgtgccttttgcttttggcctctgaatggagagagctatggtatatatgtgtgcacacacataaatatatatacatatagtttttgaaaaattatttcatactcattgttaatccaccctaaagcctcaaggttatttacagctctctttctttccatatttgtaaattccttctccaacagtaagaaacctcgctcctattttactcagtgttttacttattagcccaatggccctgtaattaagcaatcttccagccatgctatttccttgaccctgtcatctctttagcacctaacttttccaaaggaaagaaggggtaagggatagtcacacattcttaataacatagcttctccaagtcttccagctggagaaaaaaaatgctaagcgataaagaagactggggaaacactgtgggttgctaaaggcaactgctcagaacctagccgggggtttctagcagtggactcctccctcagatctctggtggttcaggaaccagcagccaggtgtctccacttttgcctccttggcagtaagcgctataaaaagcactgtcccaattgcctagaagcctattttctaaaatgaataagctaggaacacatacaaattcagcacatcaaatgccatagagacaaattcttctaagtagttcttcttgtgcctgcttctaatttgggtacagctgaggctctttgccctcccttaacagccatcagctgtttgtactgctgccggaaaaagagaagttgtactggtggacgttcattaacgaagagctgtaaacatgctaaagtcctggggaaaaggcagcctttcattttttaaatttaaatcatgaatgggtcctgggttctctgaaagagcatcaggtgggaaacacaatgtaaatgatagagaaccatcaaacaaatatttttagagactatatggcaggcatctcaagccaagggaaaggatatccaccaccaaaacgtctaattggtaaggcactctgctgtactacagttttaagaacactacactagggggactgtactgtctgctgactactgtaatctctatgcacagttggagagcgcactataaacaataacccaaacaaacctcccttgcctgttggtgctgcgagtcccctgttcccagccatgacaatcagaataaacacagtccagaaatgtctcacccggtttctcttcttacagagtgacaaaacacctattctataagaaaacgaatgttagatgtttgcttccaggtgggcagtaggaagcccattgttatacccatcttaacagaatggttgttagaccagcagcatcagcaccacctgggaacttgttagaaatgcatatttttggggccctaccacagatctactgaaccagaaactttgtggcaggacccatcggtctgagttttaaaactaaagatttgatagccactgccctaggtattccagaggtagctttggaaggacctcaataccaaaccaccttacactttggccttaggacaggtaatcagggagctcacggcagtacttccagcaaacgggagggtcgtttacgagaggcacatacatttgctaaatgtaacgctcaggaagttattcccgtactcaaaggtcgaggggtcgcttcctctttacctccacctagattaagtcgccgattgaggttgaatttgagacccgacaggggtcgctgctgcccataaagagagaccaagggaacatggcaagagaatcccaggggctttgacatcacactaagctcctccttgcacgcacacattatacacacacacacacacacacacaaacatacagacacacacacacggaccgcttactccgctctgcctgctcgctcccactgtccccaagcccgccccgcccgcggcaagtgcgtgcccaggcgcagccaccggcgagatcaggagcgcagcgcccgcagcctgagggaaccggcgcagggcagcagcggctgcagctggattcgcgcgccccagcgctcagtggcggcggccg

SEQ ID NO: 32762 - DNA, 2300 bp, Homo sapien
gtacactgataatattgtgtccggaattggtgggttcttggactcgctgctgacttcaactatgaagctgcggacactcgcagtgagtgttacagttcttaaagacggtgtgtccagagtttgttccttctgatgttcggacatgttcggagtttcttccttctggtgggtttgtggtctcgctggcttcaggagtgaagctgcagacctttgctgtgagttttacagctcttaaggcagcgcgtctggagttgttcattcctcccggtgggttcgtggtcttgcaccttcatagtgagtgttacagctacagctcataaaagcggcgcggacccaaaaagtgtgcagcagcaagatttattgcaaagagcgaaagaacaaacttcccacagcgtgcaagggaccccagcaggttgccactgctggctcaggcagcctgcttttattcccttatctaaccccacccacatcctgctgatgggcccattttacagagagctgattggtccgttttacagaaagctgattggtccgttttgacagggtgctgattggtgcatttgcaatcctctagctagacataaaagctctccaagtcctcaccagattaactagacacagagcactgattgatgcgtttacaaaccttgagcgagacacagggtgctgattggtgtgtttacaaaccttgagctagacacagagtgctgattggtgtatttacaatcctttagctagacataaaggttctccaaatccctactagattagctagatacagagtgctgattggtgcatttacaatcctttagctagacacaaaagttctccatgtccccactagattagctagacacagagcactgattggtgcatttacaaaccttgagctagacacagagtgctgattggtgcctctacaatcctccagctagacataaaagttctccaagtccccaccagactcaggagcccagctggcttccctagtggatcccacgctggggccgcgggtggagctgcccatcagtcttgagctgggtgcctgcactcttcagcccttgggcggtggatgggactggagacggcggagcatggggtggcgcctgtcggggaggctagggctgcgtgggagcccaccgcagggggctcaggcatggcaggctgcaggtcccgagcactgccccgggggaggtggctgatgcctggtgagaatttgagctcttcacaggccgtccggcagtgttgggggacccagcgcctcctccgcagctgctggccagggtgctaagcccctcactgcccggggcggtggcgccagcctgcagctccgagtgcactgcctgccaggtgggccggtgggcctgccgagccagcgcccacccagaacttgcactggcccgtgatcgccaggcgcagccccagttcccgcccacgcctctccctccacacctccctgcaagcagagggagcaggctctggcctcagccagcccagagaggggctcccatagggcagcggccggctgaagggctcctcaacgaggccaaggaggcgttgagagagagcaagggctgccagcatgttttcacctctcaatatagcttggctctgtgtcctcacccaaatctcatgttgaattgtaattcccaatgttccagaagggaggtgattggattatggggtcggattttccccttgctggtctcatgatagtgagtgagttttcatgagatctgattgtttaaaagtgtgtagctggccaggcacggtggctcacacctgtaatcctagcactttgggaggccaaggtgggcggatcacttgaggtcagaaattcataaccagcttggccatcatggtgaaatcccttctgtactaaaaatacaaaaaattagctgggcatggtggtgcatgcctgtaatcccagctacttgggaggctgacacaggagaatcccttgaacccgggaggtggcggttgcagtgagccaagatcatcccaccacactccagcctgagcgacagagtgagactctgtctcaaaaaaaaaaaaagtgtgtagcacttcctccttcactctctctctctcccgctcggccatgtgaagattgtgcttgctttccttccatcccttagccataattgcctgtttcctgagacctcctgtacagcctatggaactgtgagtcaattaaacctcttttctttataaattacctagtctcaggtagttctatatagcagtgttagaacagactagaacagctggagacagaggccctgtggccaagaagagta

SEQ ID NO: 32763 - DNA, 2300 bp, Homo sapien
gatctaattttatcttcctccatatggatcgccaatagtctttgcctcatttattgaataatacctgtcttcttactgatgctaatgcaacccataccatttgccaaatatccaaatgtatgtgagtctgtatctaggctttctattcagttgcatttgtctatttgctgacacctgaaactatgcaatattgttttaattactagagctttataataaataaaagtatccttctgcttgtataactaaaatggtctgggcttttcaatctttaattgttcctatgaatttgagagagcaattaaccaaattccattaaaaaaatctatatgaggatttgatttgaattgcattgaatttatagaatatttcagttccttataattttcatatcccaaattgcttattataattttgtcgttttatataatgttttagatttaccctatatattaaataaattgattattattactttttgtattccctcctgccttttaaattccattttcatcttgtgaagactgccctttgaaattctttcactgagtatctgtgaatagtaaaggttctttgtctttgtcagaatatttattttgccatcactcttggtagtgaatactggcaggcactacccagatccctcttcctcaatgaaagacttatttcctgagctgctgagagtgcagcaagccaacacaatccagctcttggccatcttcaggagtcctttaacccaaggttgcactcttctcctttggcagcgttcatccagtgactaaatgtcataggtgtataaaggtccagcccagttcccctaactcaagacaactctgaagggatatcccagattcaaaacgaggccttcactgagacgtcactgcaggtcaactcttccctctgctcaatcctgcttccatttctcctgcagatgttgttccccaaagcattccctaacatactcattatactcttctctgactcagagtatgcttcctggggaagccaacctaaaacagttggtgtcaggagtggttcaagttaggctaagatgggatttatgattcgaatcacaggccatgtgactatcaatgaggaccccctcggtggtaggtgtaggacacacagacctcggcacaaggtaacagtgcaatagttacaactttcatcagtaatgaaactggggtggtattctaacgtaactggggtggtattctaatttatatacgagtaggtaaaatgtatcaggcatttgagaactatgagggaaatagtaaccttaatgacagtggcattgactgttattgctaagtaaaattgattctttgaaaatagcaaaaggctgagatggttaattggctatcaaaatctaagagtaaattccagaaggcctctttggtccaaataaagaggcttttatctcctgcagggggagggcaggaaaagcacaggaataggcctggtactgaatcctaagtgcggcagagctccgaaagagattaggaaacccagcttggtcggctatgcaaaggtggaggtgcttgatcggaaggagattctgatgcagggggaggatcatcaggtttcagttaaaagcaggcagattacacattagaggtagagaatgtgggatgatttgttcacaaaggaatggaatccagagggcataacagaaataagagacaggggaggctggtacggaagttcatcaggcaactgaaggcacagtttgcgcagcaaccaagaaaaggtgggatgtgaggcacgcaagatgtagaggtggggaaaggtttccaacagaattcaacatgaatttgctgtttgagtcaattgatccagtaccaagtctgtgagttcattttcctcttccttttagatttctcctttttctaaaaaagtaaaactgagggggccttcccctgctttccctccttctgcttccctattttccctcgcattcccttccttttctgcagatcctctgcttaggaatggggcattggcccccgcaggagtgggcggggaaggggcggagcgaacagaggtgggcggctcccgtcctatgacgtcagccgtaaggcgctgctgtcgtaaaaggacgtccggtccgtctcctagtgtccggaatcggctgtcagcctccctggctgttagtaccttctttcccggagtcctggtccacgagttggatttactgctgtcgcgggtgggcctcacgccattccctgtccctcggccccctgagtgagtccggtctcccggcgaaagtgagcgaggtttgcccggagcgcgcacgaggt

SEQ ID NO: 32764 - DNA, 2300 bp, Homo sapien
ggtacaaatcttgaatatccacttttctggagatagaatatcaagtgctggtgtcgtctcccacctcaccattgctgcttttctcccacttcattgatctatctcctccatgtcaggcccatgtgagagctgagggcttggtttcctctgatagaaagaagacaaatacagttgacctggggctgtagaaccagaggatttgcaaaggcattattgcaatcaatatccaatcacatcagtttccttgtatatgtgctacagagcagttcccactctgtaggtcttttgctgggtcacaatttgatgtttcatctttatactctaggaaacaagtggactcatgaatttgaagggttttgtcttcctctcttagagtggtcctcttactcctcttctcattggcccctaattttattccacctgtggagacactccagaatcaagcctcgggttatactgggtagctgactgtgcagataggacaaatcatgatttgtaatcttccttcactggtaccctgctcaaataccaacactcgtgtgcttcctattgttgaaggtttcactctgtaatactaagggcagtatttgctcctgtactaggttcaacagtgtccttcaaaaattcatgtgcaccctaaacctcagaatgggatcttatttggaaataagagtctttgtgtatgcagttagttaaatataagtttactctggattagagtcaacctattaaggaccttataagaggagaggacacacagagacatagaaaagaaaacagtgtgacaactgagacagagactggagtgacgctgccgcaaccactttcttgctaggaagaggaaagaaaggattcttccctagcgtctttagaggggagacagctctgccaacaccttaattttgaacttctcatttccagaatagtgaaaaaattaatttatgttgtttaagccattcaattttttgtttgttttactttcatttacttaatctatttattcatactacatagataattatttactttttctttttattagtgatgtcctctcacaagaacttaagcttcaggaaagcaaggatatttgtgtgtgtgtatgtgagtgtgtgtttgtatgtgtgtgtatgtgtgtgtgtggtttatttctatactctcagtgcctagaatagtgcctgtcatgttagatgcttaattaacgttttgaaatgaatggaaggacaggtagattacctatatcaaagctcttcatagaacattcaattccagaagataatggataaataaggggaaatatgggacccaataattttatcctcagcccattcatgtataaaagcaataggaaaagattgttagatgtgaatgatctcagaaaatataacatgcatgaccatgttttgaaaaccttcctgataacaaaatttacccaactaagatgtggttcacagtacagagcttaagaatgtggaagctgctttctgaaaaaactaataaagtaaacattaattcccttctaattatggctaaggcaaaaaaaagaactattaatatggctttaaatttatcaaaaagaatgcaaatgttataaattattaagaaaagctgtacaatagaaaaagcaataagtattataaatttggtcagtagttttagaacataatagtaaaaatcagaaggaacaagattgtcctgtgttcgtaatttttcactctgggagactaaattttgttgccaaaaatcctctcatacaacattggtagtagtgaaaatttgttaaatcctgtgagaggacaatttggcaatatccataaactgttaaaatatatacgaaaattgattgcaaaaattattctagtttttcacactgacgctaaatgccctaccacacataccttggattcaagtttgctggggccaatggaatagtagcaaaagacacaagagacttgaagaaacatttacatgttccacctcctttccgtggccctcagtctcaccatgaaaacatgcccaggatgggcttctaggagaaatcctgaggctttctaggccagccaacagttagtcaacccccaaatgtatgggagaacccagctaagatcagcagcaacacctagccaacccacagcttacttacagcagacatgtgaatcaatctagccaagactaaaagaatcactaaaccaatatgtcatcctatgaataatagtaaacgtttgtcttaaactatcatattataggaaaaaaacctgatatatgaaattaccctgtgagtttatattaaagatacacttacc

SEQ ID NO: 32765 - DNA, 2300 bp, Homo sapien
tatgaaaacaaatttgaccaacatatttgggaggcaaatagtagagcaaagcatatcttatgactataataatttttagttgtactttactgttatttatgttttttatctccctactctgacaaaatgctttatatatcatttagtccatcttgttctagaacctactatagttgaaacccaataaacagttgtagaccaattttcttactgttatatactcagattatgccttaagttcaccctacaagtaaactttccgtcaatttcatagtgttgtgaaaactctctagtagctcagaacgttcttggtggtctcaatatattaaaagtatgcagtcagatactgatggccctgagtcctgcagacagctaacaaagctgaagcccacaggctagtgagcaccagctgagagcactttctatagagtttgtgggcagtccaagagagacaggatctgagatgtgatgatatgtcctctggcagcagcaatatctgatattgagctctgctaggtggtgctgagcgtggacacctgcttccttcaccggctgcagagaacacagtatccattaaaggagctgaaagaggtgctagaggagtttacatggcaggagtccaggaagctctgcaacagtccaaaatgaggttgggacacatgatacacttgttcatccctattctctatcttcacacatatgcatatcagtccttccgtggctgctatattcttgtggtgagatccaaaccagctgcagtcttgctctcccagtgcatgctcattctgcaaatcagagcttcaatgtattgctatgaaaaattctgactggtcttgaaatccattgacaccatcacaagaaaattcaacatgacatcgtcatgaacagaaatggatgatggcttcatattcttaaatataatttccaactatggtgaaattttgaatggttgtaaaaactgtttttgcatttttatacctcacttattttgttaatggagactatctagagtttgatgtaattctcatcaaaaagtccatcagtaattatttcaaatataaaactgatatcaaaaaattgagttaatgaaaataaactcaaatttttcataaaaatatgaaattatattatacggaactttatgtacatggaaagtgaataatttctattatttttctatttgatatttatcatatttatgtaattaaaaacataattaaattttaaactaaattaaactgcgctccaggaagacatcattttctctgaaccatgactctgaaaatttggaaagcaccgtacaagagggattttcagtgattcacaagagtgcaagattctgcaaagtactttcaaaactaagcgtgagatctttgctactgcctttatggcatgcaaatcactcagcctcaactcagttccttcctccaatgtaaaaatactacaagaacaacatctcacgcttccatcaaatgggaccatgtgtgatattttacactggactacacaataggctggaaaagtgatccgcagagaggctcattgctctaagttcactccctgtaccaactgtcttgcacaaagctgccacccgggtgtcttcttccaacatttcccctagttggacttcaaagtttccttcttgcagcctgtgcggggaccaagaggccggtctagagtagccgcccagcatccagatccgacatccttttccctttcctcaggaagacttggatgcgcgccagcccagcccgggtctccaggttcagctgcggaagcttcccacatggtgcccgtcgcttgggatgcggctatccttgtgccttctctgcaggtgtcccggcaggtagaggaggagaccggtggctggtgttcctgcagggcggggctggggctcctcgatgtccttgcgcttgccctgcaagttctgcgccccaggccccggcagggacggaaacaggccgggaagcagtgacacctggggcagtcagtcatccaggagccgccgccacccgccccacccccagtctccgcgggaggtgtttgtcttcgcctatgctcccggctctttctctttcacttttcttttcgccaggggttgggactccgggtggcaggcgcccgggggaatcccagctgactcgctcactgccttcgaagtccggcgccccccgggagggaactgggtggccgcaccctcccggctgcggtggctgtcgccccccaccctgcagccaggactcgatggaggtacagagctcggcttctttgccttgggaggggagtggtggtggttgaaa

SEQ ID NO: 32766 - DNA, 2300 bp, Homo sapien
cattttcaaaaacatttgcaccaagtgacaatagcccatgaacatagtgctacagaaaactatgatcagagagtggtaagagatctaccatatatcccctccagctacataaatgaatatcccttgtttaccttaaacaataagctacctgaggtgtttctatatttattttatatatttctataaataaatatattgtttaaatatatattaaatattgtttaaatatatatttctatatataaatatattgtttaaatatagtgtttctatatttacccactatctgtttaattaatgctttttgatagtgattgaaactaagatgtccaaatcttactgctacctctgtccctggcagctcaaaaaatatttatatagattattgtttgctttggaaacatttcaatataattaaccaatttgtcttattttaagcattccaaagaacttaaaggtgtttcattaaaaaagatacatatatttatatacctttgtatgaagtagttacctaatcatttttttttgttttgataagctgaaatttataggccttataaacatattgtgtagccttataagagaattaataccaacctcaggtcttatatttgtatgaatgaatttttaaaaatcattatagtaacccaagttattatagtttgtattggggcttatttagccttgatattgaatacagattaagtttgaggacatttcttatttgaaaatctcatattggtgtcaatttaaaacagtttgaaagcaattgctgaaaatgtcttagtgcgattaatgataggaagattggagatgtttaaagatatcactttctcagctgtacttaaattaggactgaagagatctgtagcggtcaaaagctggcaaaccaactgtttatttatcaaaaccgactagttatttatcaaagcaggtggttggtgattcaaatccatcaaccacctgtttttataaataaagttgtattggaacacagccatacccatttgtttatgtgttgtctatagctgctcttacactacagtggatgagttaatcactggcaacaaagtctacaagacttgcaaagcataaaacattatctggccctctacacaaagtgttaaccagttgctgctttaaacaacggtgacagttttgtggagtcttactgaccactactttcatactgttaggaaaatggctcacagtcatctgaaaacacactatacttggttgcatatggccttgcttgggttctgccttctgcctcaatgctgtttttctcctttcactcatgcctagaatatatccaaccttcaaggtatgattcacgtaacactacctttatgaagtcctatcataaagaaatgaagtaaaatttcctggacaaatctcccaatcgctcccttacatatagtttgaaatcccttgcccctctcttccttgtacttgcttggtatacacataacatgtttaaatccagttctgtacctattccaggctttctttccctttcagcttactgtggctggagaaaacacataccaccctaatgactaatctcactccacaaccattcacaacattgatccttcaaaaggtcaggctctcatactattctcccagttacctaaatggctattttgtgtgtcctcttccctctcctcctcctcctgtccccatcctcctcctgtccccatcctcctccaatcttcactttctgctcatgtctttttattttaattcactgagaaaatggaagtaatagtagaaaacttacacctacctaccagccccatcccccttataactcagcattccttcccgtgacagtagatgactcagccctcgccccctcttggaggtgagctaacatcctcatcttcacttgcttattagagaacattactctggcacttcccaccccctccaaaatccttaattccccctctctaataagtcagtcccatcagcatgcaaacatgttgttatttccaccacttaccacctgcaacaaccccctttccttcctcccttttggagcaggattcttaaaaacattgcctgcactagcatcttaaaaaccttttcttgctactttcttgtcagccatcccaggcaggcttctgcctccatctaacccctaaaagtgctattgtcagagtcatctgacatgacctccgggttgccaagcccactggtcagtgctgaaactgtgtcttgcttggcctgtcagtgcatttgatgtgtccatcattcccttttgctggatatacttcccttgactgacttctaga

SEQ ID NO: 32767 - DNA, 2300 bp, Homo sapien
aggatgaagtcacacccatatttgatttagataagtattacctagataactcgattaactagatttagataagtattaactaacagtattaagagttaatactggagtgacttttgagcctactaggatggaatgaatatattttgcattgtatgaaggatgtgaatttggcagagaggggagggtaggtgcagaatgctatggtttgaatgcctccaccaaaactcatgttgacatttaattgtgaatgtgacagttttaagaagtgggatctttaacaggtaattaggtatctctttaggcactttcattagacagggccctcatgaatggattaatgcagttatggagggagtgagtttgttattgcatgagtgggctccttattaaagggtgattttggctcagtttcctctctgtctcatgtgcttgctttcacttctacccttctgccacaggatgacccttagcagatgtcagtgccatgcacttgtacttcccagcctccagaactgtgagccaaatgagcttgtgtcccttgtaaattaagtttgtggtgttctcttatagcagcagaaaatggattcaggcagcaagcagagctataaaatacttctttttttttttttttgagatggagtttcacttttgttgcccaggctgtagtgcaaaggcatgatctcggctcaccacaacctctttctcccgggttcaagcaattgtctggcctcagcctcccgagtagctgggattacaggcatgcactatcacacccggctgattttgtatttttttgtaaagacggggtttcaccatgttggtcaggctgatctcaaactcccgacatcaggtgatcctcctgcctcggcctcccaaactgctgggattacaggcacgagccaccatgccctgccaatacttcttttcatctacactggcttccattatcatgattttgttagatacttttgaggacattttctattgcattcctccatgtttggcaaccacactctatggtggagtcttctggctaagcacttagtcttcttttacttataccagcaggatgtagttgagcagggtagtgaaaatccattgtgacattgtaaagcctcactgctataagaggccaggaatgaaattttcattgtttacaaaagtagcttcgtaaggcctaattaagaattatatcacccatggcattgctcaatcccaagtcaatattttttttttttgaaaaatgtggattcaaggataccacaactaaaagggatgtagggaatttaagaggctttggatgaaatgatgaagattacggtaaagttttataaaaaatttgaagcactgagataatatagacaaagggaataattataaaatgagagtgataaggaaggtttgctttaaataaaccaatcaatgagtgatttagatcatatgtaacaggaatattagatttgatatgttcttgtggacaaaaaggtatttctattggatacacctttgtatcttgcttaatacctaaataagtgttagctttttctttctatgagttatagacaatacattttaaagcagccattttttatatttcagaaacatctgaaaagtataataatttaattctttgtgtttatggaacttaattcagtgaatatttatgtcatgggttgtggcagattttggttttttgtggaagaggtcaccatgtatatactattttgaagggcagaaaatagttgtttctatttttgtatattttggttataaactgcttttaatggcatggagttgaatttagggatgtttaatcttcatattcttcacttgatttgagtgagaaaaaataaaattttcttggttataaaattctcaaatgattaacaatggtttctttaaaagactgaagatacatattcagtggctgtagaaatggctactgctattgtaaactggattaacaatcagtacttctacaaatctaagtatttgtttgtttttactttttactagtatgactctggaatttttcaattcagggaaataatagaatagaaaagctttgctaaggcattgtaatcagacagaactggcctcaaatcctggctgtcatgtacttgctatgggcctagagtagcttacctaaatgctactaaccttcctccataccattattgtaaagattaaaggtgatgcatctgttaagtaactaatagagtgcttattaaaaggtaggtgttcaataagtattaattccctccctttctttttcttactagtgcacttgtgtttttaat

SEQ ID NO: 32768 - DNA, 2300 bp, Homo sapien
acagggcatgaagtccgtgaaggaagtggtcatcatctttgtattatgctctgggatctacataagtgtaagggaagggactgttgacttgcactccaggtgacaagctaggacttggcaaaggggatctgtttgcagtcgcttatttgtacagctcccccatgaatcctgggacaggatttcacaattatctcttattttgtttttaaaataagttttcagggcagtaaggctcgaataggaggtttgacagggccaccttccttgcctacacccaacatgattcataatgccaaggcctgcctccatcacggtgggtgtgctggtgccttccttctccccacctgcctccatcctcatggctgagttttatagacaggacatatggagagaaagaaaaagaagacttctctttctaaacattctaggaaaagggaatattttaaccaaactgtcgctttcccccactatttcatgaatggtccagtggcacatgaagctaaccaggtgtcggaaaatatgctctgccttatacatacatgtttcgtcattgtgttcttttaatgaccctgtgaaatgattattatcatctctattttacatgtacaaaaaatagtaagatttggaagtgcttaagtgtttatgaatttactgttagaaatggtagatataagatttgaagacctatcaaccttactcctgtccatgttctttttccctttgcacttctaccttccccaagacttttatacacagcaattctagatcaaagactgtcaacttgttttactatgcctaccaaatagttgtagttttgttatacatacctgataatcgaatctgtgatgcctcagaagtcttaaaatatttcaaaataaaacaaatacgtttgctaactgcagtaaatctcatcaatatttttttttcagcttgctggattggtttgtggttttatcatcaaattacagacaagtctgtatgacccaggcttcctacagcagcttcacacagtggggttgatagtacaatatgaaggactgctaagtacatacagtgagtattgctttagtacaagttaaaatcacatttctattcagaaggacatttaatccagaaatttttcaagaaaacataaaaataagtaaacctttattgtgccaagtattacaaaaataatataactttcagttttttgcattcaccttgtaacttacttttgcctcctattatgctttgaaaatggaattatagattatttcagagtggactcctgagcagccatctggcttttttaatataaaaggctctgtgccaacatagttgcaatgactggattttaaagtctcaaccctgtaatgtctagaactgcactgttcaatatagtagccttgtgtgacttttgggtaattgaaatgtgtctagtccaaatcaataagtactagatatgcataccagatttcaaaaactagttttaaaagatattttatattgataattaataatttcatattaatttacaattgaaatggtattttggatatactggattaagtaaaatatattattaaaattaattctacctttttaatttcactcttttaaaaaatgactaccaggaaatttaaaattatatatgtggctcacatatttctgttagagagtgctgatctggaatcttaatgatctccctgtcaggcttcatttgttaatgtatggagatgcaaaactagcatgaacctgggtcagtgatgataaattcagctacctctgttatttctagacaacagatatcagtcctgccagtagaaagaaaggtgcacaaatcacaaaggggttaaaacactctctccagcctcacagcaaatgtccacgttcttccttccctcaaagggtagattgacttctgaagtccattgaaatggttctcatttcactaagaaacaccttcagcctctgaggaaaagtgtctagagtaggttcactgcattcagaaactcattcaataaaatgctagaacaaattccagcagggaggcatagtagctagtgacattttcctcaaatgtttgtttgtagctaagtgccttttctattgtttaggcgatgaaattggaatgctagaggacatggccgttggcatttccgatttaaagaaagttgcatttaaaataattgaagccaaatccaatgatgtgttgccagttataacaggaagacggtaagcagtgctcacttcctgaagaccaggctttgttagacatgtcgtgttaactcctgtcagaggaggcaaggagaattcag

SEQ ID NO: 32769 - DNA, 2300 bp, Homo sapien
ctaccaatcatcttttgtccctgggggagggtgagagaaccaagagtattttctgagtatgatgaccattcagcttgtacctcttctgagtaagataaaagatgtgagaactggcctgagtagaaatatgcttaaaagctatctcttttaagtatgcttgtggtatacaacaaccacaatctattattgtgaaaaaattttgcaagtaggcacagaaaataaactgctgtatgttatcataaccataggtaaatgctctacttaacagctaaaaatgcagttactttcttgagctttgtgactaattccttctgaagtgtgtacttggataacaagtaccaaatcttcagtttgtcctcagtgaaaataaacagaatatcaagaggttatctcataattcttgttttgtatatttaacttcattctctctaaaattgaatttattttcacttagcgaattagttttgcatggatagtatgcttaaaatgggaccacattaatgagactttgtagacatcttacgtcagtcttctcctcccatcctcaaattatacaagtgcacatataccgataaacagaattagatatttatttcattaattattcaccgatagtgtgctgaggtgttattttgctaggattcatcatactgcctccttttcacatttgaagatgactgatcaggattgtgggttgagtctttggtcaagaaatatagagaaattaacaaattatatagtcctcatgtccaagtcacacatgccttgcagtctgctacagatattatctcactattagcatttgtcataggtctttgggagaacgtggtgctatgaatgtgtgtgttcttatcagaaaagacttctaaatttaatggtaaaaaaaattaggaagcatgatcgctgttcaagctttattattaattcaaaacataatgttcaaattgatggatttggtctaattgatggtgcaatagccttctacccccagaaatattcttgattgtatccttagaagccaatatgtatttatctataattttattatactattttctaaaaattcaagaagcgttttgaatttaatttctgccagatttttttaaactagagctgaattataaatgaagccactttaccaagaactgcaaagagtgaggctgttggtttgtgaagtttgagacattattagtattataaaccaaacttgattactgctatctcattaaacggcattgggcagacatttaaatatttttatacattttaattcagctggtaacttgatttaaaacaacattgattttttaaaaaatttattcttggtcatatatatcatgttaaatataaaaatgaatttgtaagtatttgaggctgtctgtatgacagggtattaagttcttggagagtctttctttccccatgctaattttcatcaattttctattgctttaatttccccttgagctttagctttttagaagaatgattcattcttttcagcatataccatgatcattaaacaattacacctttatcaagtagagcagcaaaagactccatggataataatgaggttggaaactctcctgtacaacctgttggctcatcttggaagaagaatgtcatgccaaattattttttatgtggtcagtaataatgttctaacaagggtggatggagagatgagcataaagggcaattctaatggaaagaacgatagtaatattcaccttgccaaaacatggtaatgtcttgacaagatgctacatgctcttgctgctaaattaggttttatactaagttagcagcccctatagctatccactatcttacagactgaactagaagataaataatacacctttcatgttttagaaatctttcatatgactatgtaataattgctttgagaatacctattaaacctagactttatgatgcattaactgtgtggaatggttctgaaagtatgagtggagtaggcaggaagaaagtttatttgaatgtagttgcagtctctacttacctttactttttagctttatactgaactccaatatgactgaaattttaacttttgatgtttcctaggtacagaatttcagagtgggatatcagatctttagtgtgaagatacatctacattaaaccaggaatcactagaactgacatttggacaagaaaatttggaaaattttaaaactgtgaaggttgatcatggaaattaaagaggaaggggcatcagaagaagggcagcactttcttcctacagcccaggccaatgatcccggggactg

SEQ ID NO: 32770 - DNA, 2300 bp, Homo sapien
tttaattggaacattcagtccatttacatttaaggtttgagcctgtccttgtgttgttagctggttatcatgcagacttgattgtgtggttcctttacagtgtcaatggtttatgtacttaagtgtgtttttgtggtggctggtaacaatctttcctgtcaagatttagcactctcttaagaacctcttataaggcaggtccggtggtaataaattctcttagcatatacttttctgaaaagtatcttatttcttctttgcttatgaagcttagtttggctaaatatgaaattattggttggaatttctttattaatgctgactattgtcctccagtctgttctggcttgtaggtttcagctgaaaggtctgctgttatcctaatggagttctctttgtaggtgacctgtcccttctctctaactgccttcaatatttttcctttcatttcaacattgaagaatctgataattatgtcttggggatggtcttctggtgtagtttttcacagggattctctacatttcctggatttaaatgtttgcctctctaataaggttgaggaaattttgtgaatgatatcctcaaatgttttgcaagttgcttactttgtgcttctctctttcagtgatgccaatgagtcatagatatgatctctttacataatctcatatttctcagaggtttcattctttcttctctgttggttttgtttgtttgttttttgtctgagttaatttagagaaaccgtctttgaactctgagattctttcctcctcttggttgattttgctgttaatacttgcaattgtactataaaatcgttgaagtggatttttgacttctatcagctcagtttggttctttcttaaaatggccattttaccttctagtttctgtaccattttattatatttcttagattcattgaattgggtttcttctttcttttgaatgtcgataatcttcattccaatccatattctgaactctatttctgacatttcagccatttcagcccaggtaagaaccatttctgggtaagtagtatggttgtttagaggtaagaaggacactctgcctttttgagttgccagaattttgcactgttttttttttctcatctgtgtgagctgatattccttcagtccttgaagttgctgtcctttagatgtttttttgtttgttttgttttgtttttgttttgttttttgggggttttttgtttatttgcttttatattctgtgatgcccttgcaaatttgcttgtggtatgagttcagtcgactagttttgattctattctactcctgggtcttggaggtgtcccctccagttattgtctctatgcccaaatttcttttattaagtgttctgatcaatggggctctctcaggcaagggccacagttggcagacaggccatatcttttctgggtcagttctaatctgctgtagttgtgcttcctgggagatcacaaggttgcacctgcccacagagtgcagacggaagcaaaactgctggtctagaaactctagcaggtgtggcctatctggctatgacaggtgggtgtgagtggagtttcttaccttaccatccaggtggtttctggggcaataggaggctgtggtctttggcaaatttaagtaaaagtaaaaccactgggctggaagctctagcaggtgtggcttgcctagctaagagaggtaggggcaggtggagtcacttatccagccatctggatgtttctccagacaacaggtggctgtgctctccggctgagttcacatagaagtgggactgccgggctggaagctctagtaggcgttgactgcctggctaccagcagcaggagtcagtggggtagtctgccctactgtctgggtgttttcctgggcaacaagaggttgtgccctccagctaggttcacacagaagtaggactgatgggctaaaagctctagttggtgttgcctgcctggataccagcagtgggagtgggtggggtcactcaccctgtggttactcaccctgtggtcacctaccctgctctacaggattttctcaggacaacaggaggctgtgcctgccttctgagctcagacagcagaaggatcactgggctggaagctctaacaggcattgccagcctagctacctgcagtttgaggcaagggcagggtcacttaccctgctgtctgaatgtctcctgggacaacaggaggctgcactcactggctgagttcagacagaagagggatcatcggactggaagctctggcaggtatggctagcctggtt

SEQ ID NO: 32771 - DNA, 2300 bp, Homo sapien
ctaccctagggactttattttctctttatttctctttattttattatctctctatttttttttcttatagattctaaataatactcttataaatcttttgttttctttaacacaaaatgggttttgtgcaacctgttgggaactggacaattttgttttcaaaaagcaataggatgtctttcttatttttcaaggacaccttgtccacaagtactttcctgctcttggtctccttgaagcttggcatccaatcctggtattcattgaggggaaaaagtcctagaatttgctttgtgacctgggctatatgggatgtaagcatatgttacaaaacttaatgcataaatctgctacttttgatacagtctggctcatggagagatgggatttagcttctcgtaatgagaatttgatgtgactggaaattgaacagaagcatctttttattgaaggtactgaggcttataacaatcattcagtggcagaagttattgtttttcacattacttttcaactagaaaacctttcaaagcttcatgagaaaatacctatctttgttcaagcaagaaaacacttggtaacttttcctttacatccacttaaagcaaaatgatgtagtgagaacctcctactctactttaaagatatacctcagctttcctctatgttaaaaccttctttcctcttcctaggtcagaactgcccttttataaaatttcgcttttcctctttttccccctgtgagaagtgaggatcttaatcaaaagaaaaaaggaaaaaagaaaaagaaaaagagaacaaaaaaaaattctagatataatactgccaaaggtttgaaatgaacatagaaactctttgcaaaaaaaaattatttttcaggctttagacagaaccttttttacagtgcgcacataaacatttcagtcttacagatcttaaaagaagatgagcaccaaaaaaaatattgaattcgatattgaattgacattgcaagaaagacattctatttctttctccattcacaaatcaactttagaaactttaacaagtcagccaggcgtggtggctcacgcctgtaatcccagcactttgggaggccgaggcgggaggatcatgagttcaggagttcgagaccagcctggccaatatggtgaaaccccgtctctactaaaaatacaaaaatattagccaggtgtggtggctcacatttgtagtcccagctactccagaggctgaggcagaagaatcgattgaacctgggaggcagaggttgcagtgagctgagatcgcgccactacactccaacctgggcaacagagcaagactccgtctcaaaaaacaaacaaacaaacaaacaaaaaaacaaagaaactttaacaagtcatgtaacctttctccttcaatgtttccatttataaaatgcatatctagacaagtgaaataattttgtgaattaatttcttcctcaaaagtatttttttaatctcaagtatcttttaaaacagtattatattttattcttccataacagaggctacatccagaaaaatcagtgagtagagaattttataattattaatttggtcttctaccacattgaataaaaaaattaaattatgatcttttgcagaagtgtaaattatactattagtgagtttagctctaacatatattttctgttatatttaagtgctgtcttattaaatacttttttggggaattcatgatatggatttggcagtaattccctgtggaaaaaacaaatgataataaaaaggtcttttaattttcaccaaaatgacagtcaagattttatcaacctatgtgagactggttttttaaaaattagtagttgtgatggttaatattgagtgtcaacttgactgcattgaaggatgcaaagtattgttcctgggtgtgtctgtgggagtgttgccaaaagagatacatttgagtcggtggactgggaggggcagacacacgttcaatctgggtaggcaccgtctaatcagctgtcagtgcagctaggataaagcaggcagaagatgttggaaagagcagacttgctgagtcttctgagcttcatctttctcctgtgctggatgtttcctgccctcgaacatcagaatccatgtttttcagcttttgggctcttggacttacaccagtggtttgccagggccccccagccttcgaccacagattgaaggctacactgttggcctccctacttttgaggttttggaacttggactggcttccttgctcctcagtttgcagacagcctattgtggaacttc

SEQ ID NO: 32772 - DNA, 2300 bp, Homo sapien
tcaaagagctacagttggtcttcaatgacttcccattttctatgagcctctctctcacttgaagaaaaacagatttgtcaatgagtaataatacccaacgtgtgggtccaaaggtatttgcacttttacttttatgattttattttttatttttttgagacagggtctcactctgtcgcccaggctggagcacagtggtgggatctcagctcactgccacctctgtcttcctggctcaagcgatcctcccacctcagcctcctgagtagctgagattacaggggtgcaccaccacacctggctattttttgtattttagtagagatggggttttaccatgttggccaagctgatctcaaactcctgacctcaggtgatccatctgcctcagcctcccaaattgttgggattacaggtgtgagccaccatacctggctggtatttgcacttttaaagtaaaaattcctgagaagaacaatcacttaagagtaatgaatcatccataggggaatttcagacataacgttaattcacatcatatcattaaacacccatgtgccatggtcctaatgtctactctaacgataatatagtaaattagcggagttaaaaaatggttgcatgtagcttagttatagtttactaaaatatcgcaggtgtacttattaaggtctggtttcacttggggatccagaaaaatcctgcaaagtgccttgcagagcatcgtggggacctctctgtgcctttctcacctccctttggctgagttcacaatggacacaagtagagcagctgcagagagcatgcactaggtagacccttcaaagccaacagattcaaaatgagctcactattttcttcttccttctttaagacgcatgtcccttatttatttcctgtttggttgacagcattgctaaacaagcaaccacttaacacagaaacctggggtcatctcaggaacatgattctttaatttccatgtatatccaatcatcaaaacttataaatttgacctcttctcttcactaccactcttccagattagttcagatcttcacaacatttaccttgggctattgtaatagaataccatctgatcctttctgtatccagtatagttttctacaaatcgatcctccatacttctagcaagttccaaaaaacaaatcctttccttgttccctgttgcctgtagaattaatcccaaactaaggcaaatgtagctctttatcctttatgaccacatcttgacctcttcatggtacagctttattttctgacagtcagccatggaattcaatgtcttgacctttttgatcccctggctgttctctaaaagcttcatgttctttcttgtttctgtgacttgcttctgtatatgttgctctcagtacttgaaatgcacatctcttgctatgtgccagctttgctttaaccacttgacatgaattactttattaaattcctacaacaatgctctgaggtagataatacagtcaatgccttcactgccttgtgtcattgtgacttaactctgatttcagtcatctccatggccattcctgaggccactcctatgtgactgctaagattgtgttcagatagcacatcctctgggaaatctttctgactgctatgacctctgggcagagtgtgttgctatctactttgtgtagcaattacacccaatatatacgtttatcttgatgtctagtgctttgactgacaaatgcttctttgctgcctgtagtacactgtgaagagactgagagcagtctttagtatttatttattcacttaatttattgttattatttttgtatcacatggtataaagcacttagtgtctggtaggcactcagtaaatgttaaaaagaagaatcacagctaacataattgatcccttgctatatgccaggttcgttctaaccactttacatgaattactttattaagtccctacaacaatgcttttgaggtagacaacacagccaatgcttccagtgccctgtgtcactgtgacataactcatatttcagccatcactatggcagagagttttgtgtgagctcagacttgtgctgagtgtctcaccccatgcacaagtatcagtctgcctgttcaggccttctctaaagtgcaggaagtcactagatctttctaatgtcctggcacagaagtgaagtggatttaacattctcagggcaaccctcaaccacagatgcacaggagctggtgggtaaattctctagcttcccaccctttgaatggacaattctaagaggcattctgtacac

SEQ ID NO: 32773 - DNA, 2300 bp, Homo sapien
acacacacacgcacagacacacacacacacacactcttccacttagaggacagatatgttaaccatatttccaatttagtagcaaagctctgacatcctaatgtcctgatattatttcaatctctctctattgtgagaaaaatcagaaactgcccagtgagaaagttgtatcatctttccagcagatctctatgaacacggcttacccattgcttggagatgggtgtgttcagtgctgccccatggaggagaaatctaactgtgtgaaggcttctcaaagctgatccacatcttgacagggattatttgttcctcactctcctatctctctgcattcagctcacttggggtagaggctgagcataggagaaaaagcttgaagagaagcaaaaggaagggcttcgggggcgccaagcagtttctggcctatagtgtttattatttgattctataaacatttattgaaactacagaatattaggtattgtcccaagctctgggagcagagtgatgaaaaaaataaatgaaacgaacaaacaactccccccaccaaacaaaacaaaacaaaacaaaacaaaacaaacccaaagtccctgtcctcattggcaaggcttataatgtggtggtcaaaggtttgaggagtgaaaggatgcctagatgcgggcagtgacagcaggggtgacagctgggggtacatacagcttcctggtttgtgaaactgttaagccccgacttaacccaaattgatttcactgtcctgactttgagattccagtctttttgcatggcaaatgtaacacttgtgtacaagcattcgtacactgctttacttaaaatgtgattttaaagcgccctcagggagaagggctggggtgtcttgatgggctggctctgggcacctttacctttgaacggctccatcaaaacctttccgagagagccgccaggtggcacctgtaaagcgcagatggggagagtcatttgccccacaccctacacagcccggaataaccagggtgcgtgctttcccctgtgggcttgttaggggctaggaagtgggggagttttagtctccgtccagactgcttgcttacataccccgttttcctgataccccaacacattcagggcggatttgtccccacgcacccgggatatcaaaggcatgtcatacgctagttgggagcatctcggcctcagtcacccgccgcgacgtgggaactggcggtgggtggccgagggctgctctaagctggtctcctcagcccgacctctgcccggggcaagggggaggaggggcaagagacaggggtcccagcgcggctgcagactggggtccagcaggcgtgaatggatgcctagacgcaggcagtgacagcagggatcccaagccccttccaaaaaccctcggtctagggactgcgctgccataggccggggtctggggcgctttcttcctcccgcgggttctttctctgtggtttctcctgcccccgcagcagcgtggcggcctcgggtcccccctcgtcgcggtagcggtgatcccacagcccagtctgggtgggcgacccagcgggcagaggggccgcagaaaggggtcggggtacggggtgtgagcacacggagccagcgtggtaatttcggggtgggcagccgggccaccatctccgctctatcagtagcgggaagcgagcagcgccagttgcgcgactgtcgctgccacggccgcctctactcggtcgctggtgacattgggaggagaccgcttggagagagcagaggaggaggaagaggagcggggagggtgggggttggggtggaagaaagtagcaattgtgccagggggcgtgtgagcagccggagagccagccgcgctggtgacaacttctctggggcgcgcgcggggctggtaggcgaggagcgagcagggagcgcggccgaagccagaggctgggggagctgctggagcctcgcgaagccgcggccggcgccctgcgccgtcgccgccgcctgctagtttcctccgggttctcagccccgggtactgaggcttcggtctataaatagcaggttacagctcctcctgggcgcgcacacgctcacacgctcgcaagcgaacgcaggaaagtcaggctaaaagtgtctgctgctgctgccgccccccactccgcctccgggagaggtaattacccgcctgggatcctagggctcggtgggggaattttgcagggtggggtggttgatggtgggtaatccgggaggcgagggagcgtgtctgagagcgtggcggcacgtcttgg

SEQ ID NO: 32774 - DNA, 2300 bp, Homo sapien
aaacaatcactccttatcctgtgctttttctctttcatccccatcactcagcttccattctcagatctaacatatttgtaaaaccatgtagttggcaattgaggccttagactaaatctttatatgaaattttaaagcccattacaatagcacccactaatccaatgattagtggcatgattcactgcaaaaaaatcttccacagacttctgaaaatattttaaaatgttaaaaaggaacatggtattattatagaacttttagttatgctataaaataaatttaaagttggccactttcaattgaaatcttataaaagagcatattacatacattttttaaccagtggcaaaagaaggaaataagcgttgaatatcttggtataaaaacctagtatttcatttcatgcatctatcattcaagaggtattttaaaaatacagagtcatggtgcttttggaagtctaatattatgacatgtaatttatatggactaatagcactatgttctctcagacatcttattttgtaatattcaatttttcaagacctaatattaacagaaagaagaaaatgttatagacaattcaaagtaatctgtcaagttttaaatttaccaatatttttttcttgtctactttggaataatcacttcgctggtactattcagcaatcttcattcgtcctgttagtttcttagcacaaagattaattccaaatttcctccactccacctcaaatccacgatccttcttaatacttaattccttcttaatattttattttctatattacctttgtcttccactgtggcattattcccagtaaagacaaacatctgtgtaccttcacctcctattggaaaaatcattcctgtctctagcatgactgatagattaattacctcaattctcttttatcttccgtatcttcctacgagtcaacttggtcttaagttcccttttactcaagctcctgtctcctctaaactgctcttcttaagactaccataatcgacgtgtgaatatattagtgtaatcgtgtttgtaacttggtaaaaaaacaaaacactatttagcaaactgaagtaacagaattttgttcatttttctacgggacattttaaatgacctatttctttaaagttttgtctgtattacagggccttaatgtctagtttcacaactatattaaccaagcctgaagcaggctacagttaggcaatattttccaatataaagacctctgattaaattcttactgtgaatcttcggaatttggcatgaaacagaacaagcatgattgcacctgttcttccctattgtaaaccatcttcggtgtcaacatatacaataagttttgtggtatttccacctggttttctattttcaaagtacccttgtatgacacaggtataaaaatattttgattctaatctgccattttccttactctcacacttttttggacggcttataattttcgatatggtacaaagctcactaactggttctttgctagaggcctgctactgatactgatggtcgctaaatgctaggtacgccgccagtattgctcttacttcaataccgacatcgcaggataaaggcagtcacatttaggcgcgcaagcgcaattcttgattaatgagccaaggcagacttctcaatccgagttttgagttttccttacttttcccccaaatgctcttttcctcggatttcacatcgatagcacttattcgagttttcacgagtaacctgacgcaggcggaaccgacgaagactagccggcaagaatcctacagtcgcagccatctgcgcagcgtccgccggggacgctccgcgcggaagaccgcctgtgactcgacacactctccagtgacgcggccgtcgccgcacctgcgcggcggggcgggaaggagactcccagcgccggggggaagggagtctacgactcgggagggaggtgggggagcagggagggagagagggaacaagggagaaggagagaggcggacaggcggaggggcggaggggcagaggggcggaggggcggtccttccggaggttcttaggtccttcacttcctgtttgccggcacttcaaaatccgggtcaaagggtgtcgcttcggtctcttctccccggctgatcccagcactctccgtgacagcgcctcctgactcagcccaggaccggcttcttctcacgacctgctggagactggacgcccacacctgacccggaactcggaggcgtgcttcctccacccgccggctagcagccccgggccctgagct

SEQ ID NO: 32775 - DNA, 2300 bp, Homo sapien
tttattttctatattacctttgtcttccactgtggcattattcccagtaaagacaaacatctgtgtaccttcacctcctattggaaaaatcattcctgtctctagcatgactgatagattaattacctcaattctcttttatcttccgtatcttcctacgagtcaacttggtcttaagttcccttttactcaagctcctgtctcctctaaactgctcttcttaagactaccataatcgacgtgtgaatatattagtgtaatcgtgtttgtaacttggtaaaaaaacaaaacactatttagcaaactgaagtaacagaattttgttcatttttctacgggacattttaaatgacctatttctttaaagttttgtctgtattacagggccttaatgtctagtttcacaactatattaaccaagcctgaagcaggctacagttaggcaatattttccaatataaagacctctgattaaattcttactgtgaatcttcggaatttggcatgaaacagaacaagcatgattgcacctgttcttccctattgtaaaccatcttcggtgtcaacatatacaataagttttgtggtatttccacctggttttctattttcaaagtacccttgtatgacacaggtataaaaatattttgattctaatctgccattttccttactctcacacttttttggacggcttataattttcgatatggtacaaagctcactaactggttctttgctagaggcctgctactgatactgatggtcgctaaatgctaggtacgccgccagtattgctcttacttcaataccgacatcgcaggataaaggcagtcacatttaggcgcgcaagcgcaattcttgattaatgagccaaggcagacttctcaatccgagttttgagttttccttacttttcccccaaatgctcttttcctcggatttcacatcgatagcacttattcgagttttcacgagtaacctgacgcaggcggaaccgacgaagactagccggcaagaatcctacagtcgcagccatctgcgcagcgtccgccggggacgctccgcgcggaagaccgcctgtgactcgacacactctccagtgacgcggccgtcgccgcacctgcgcggcggggcgggaaggagactcccagcgccggggggaagggagtctacgactcgggagggaggtgggggagcagggagggagagagggaacaagggagaaggagagaggcggacaggcggaggggcggaggggcagaggggcggaggggcggtccttccggaggttcttaggtccttcacttcctgtttgccggcacttcaaaatccgggtcaaagggtgtcgcttcggtctcttctccccggctgatcccagcactctccgtgacagcgcctcctgactcagcccaggaccggcttcttctcacgacctgctggagactggacgcccacacctgacccggaactcggaggcgtgcttcctccacccgccggctagcagccccgggccctgagctcccgccgacgccgctggggggcccgacaggcccctcggcgctgatgctgagtgggatcgagggcccggggcggcggcggagtacgggcctctggcgccttaggccagccgcaggtgtcggttcttaggctctccaggctcgctagctcccgccccggcttggatgggtctccctgcgccataaatgtggctgctgaggcggcggtggccgtggcccgtcgcgctgctgctgcggcgctccaagttcatctccgccccggggctctcctgccccacctcggggctgccgccacccgctccttatcccctggccctggccttgcagcgtggcgacaatggacaagatcctggagggccttgtgagttcctcgcatcccctgcccctcaagcgggtgattgtgcggaaggtggtggaatcggcggagcactggctagacgaggcgcagtgcgaggccatgtttgacctgacgacccggctcatcctggagggccaggaccctttccagcggcaggtggggcaccaggtgctggaggcctacgcacgataccaccggccagagttcgagtccttcttcaacaagaccttcgtgttgggcctccttcatcagggctaccactctctggacaggaaggatgtagccatcctggactacattcacaacggcctgaagctgattatgagctgtccgtcggtgctggatctctttagcctcctgcaggtagaggtgttacggatggtgtgtgagaggccggagccgcagctctgtgcccgactgag

SEQ ID NO: 32776 - DNA, 2300 bp, Homo sapien
tgactggctatcctggccattggctcagcatgtggatacatgggtaattgcactcctgaaaggactggcagctgtccagaagtttactattttgatagatgttactttgctgaaaatagaactggtaagtgggagtatggaaatctattagaatatatagactcataaaatcaatatttttttctttgggtggtatccttgaaagcatctaattttgaatatgttattgttgttttgttttgaataacagtttgaataggctttagaaatttttttaaatgtcatttaaatataagtaattaggttgggcatggttgctcacaactgtaatcccagcactttgggaggctgaggcgggcagatcacttgaggccaggagttcaagaccagcctggccaacatggcaaaactccgtctctactaaaaatacaaaaattaggttggcataatggttcatgcctgtagtcccagctgctcaggaggctgaggcacgagaatgacttgaatctgagaggcagaggttgcagtgagccaagatagcaccactgcactccagcctggatgacagagcaagactgcgtctcaaaaaaaagtataagtaattaaaataattttttcattttcaaatatccaatatgaaaacattctttccattatctcttgagtccagctaatcaagcttttaccaccattactctaccaaaattaccagtggtttccagtgttgctaaactcaagagtcatttctcaggcctcgtctcatttgacctgtcagcagtatttggcacagtcgatcactccctcttgtttccaggacattatactctcctgatttttgtcctccttcacaggcttatcagtctcctgtacttactctaacttttagaatgccttacagttcagtctttggtccattttcttctcagtgcatactcacagcataggtgttccatggctttaaacaacatctctaatttgatgactgccagatttatatttttagtccatttttctcccttgaactccatattcatgtatccatctgtctttacatgaatctcagattcactttatctacaatcttattcctgacttttccctcccagacctagaggctactctatcctttcacttgctcaagccaaaaaccttgaagctattcttatctttttttcattccctctcagcccatatcctacaaattctactgataccacctttagaatatatccagaatcctaccaccctggtcctacattatcatcccttgctgcaagattgcagcagccttcctgctcctgtccttggtcccctgtacttatcacacaaggtcctatgtattctggcccactttttctctagtcccatttcccactgttactgcctcggtctcttgcttcacttacactgcccttttttcttcatctgtagcacaccagcctgaaggcctcaaggcctttgcaatgccgtttgccctgcctataatgctcttgtcccaggtatttgcaaggcttattcaattccttcagttttacagttggatatcacttctttcatgaggcatttattgaacgctatataaaacagcagatttttttgctacacagcattccctattcatcataccctgctttaaatttcttaataacactaaccaccatgtgttactttttattgtttctacctgccctctagatggtaaaccctgtaagagagagatggttttttgtttttttaatccactgttgtagcactagttcctagaactaggacaagtaatagtatgtgcttaacaaatatttgttgagtgaactgaatgaatagtggactagggagctattgccttgtaaacatagtttgacaaatttttatttaattggggagttttaacagttggttaggccagttacattacccttgatctctgtcacgttatttcctaacttcatccttctcccaaagtttaataatataagttatgttagaactttccagaagggggacattcatataaataaattctagctctaggaaaataaccactgttggattaatgattttcctgcaaattcttaagaaggtgtcttgtcttattttgaaggtttttaatcgactttggtttcctcttgtgagacctggtgctcttgcagttctttctcacatgctgcttagctttcagcattctccagaggcgttccatttggtaagttatgacataaacgttctactttgaaaaagcctcaatttgaaaatttagtttaatattgagtcacatttttatgtagtgaaaatattgcaag

SEQ ID NO: 32777 - DNA, 2300 bp, Homo sapien
ggttgagatatgaaccaaacagctctgaagcccatgtttaatgtaggctaaacttccttccttcagaatgctataaacacccttaatttgggtaaaatttttcttaactgagaacttcattgttatgaagttatgccacaaataatcaaaatgtcaagagaattccaaagtttcaacttacaatcacatcttcgagatgccttttcagttcttttttgtcatggcaaaatctaggatttgaacctggttcactccagagtccaaagtttaatcactaagcagcctctatactttaaaacaaaaattagcaaaggtttctaaccagtgtactcacaatctgcacatatatgacatgtatctgctcaaggaaatttttgcctaaagtaggtatgcatgactctagagtatttcctttattactttgttcaaaatatatactaacaaaatatacattaatcttttttagatttgatttttcaaaaaattgtggactcaaacatgactgtcatagagggatgataccaggagctttatatcaagagttagacatgggttctactttaatgccttgtgctactcatttagctgtatgaccctgggcaagtcacctgtttctctagctctcaattctcctctgcagagtgagaagttatgactaaagattacctaactttatttctaaataattttatctgtccctaagttgccacgtccggcacttttggctgatgcaatgttaactgtaaataacctttattaaacactgtatattaagatttcagttacttggttcatgctataagaatcacttccttatattttctcaattgctctcaaaagagggaagcatacgcacctcggatattctttgaggcttccagacctccatggtttactcccagatcacagcaagactgttctgaatacctcagatttctccttgacaggtaaaaagtattcttaaaattgtgatttgagtgttgtctttcataacagtttaattctacttaatattgcttttacctttaaaaacatatttcaaatattactctttaaaatactattgcatttcttgtatgttttttatattttcttttgtttttaatttattttcctttttgaattttcttccttgagaccagctgttctcaaagtgtgaaacaaggacccctgcgggttcccaaaacactttcaggagtctgtgaggtcttctcttttccaacagcgtaactgtgtgaggccagattttctttatatgcttcatccaaaaaacatataacaatagaatgcagagaagatatgaggctccagctgtcttctgttaagccagatacttaaaatatttgcaaaatgtaaaacactgccattcttacttttttttggttttagaaaatacaactttttcatttttaaaatgttactaatattaaataatgggtttattattgtttgctaaatgttaatattttattttctcagttctgacagtaaatatcaataaatacaacccatgtaaaggaaagctctttgttttttaattatttttaagagtataaaggggtcctggcaccaaaaaatttaagaaccactcctttagaccagttcataattgtatgggtttggtatgttttattgtcgcctgaccacttaattaataaaacctgttatcatctgtatctccctgtctttgttctgctctgtggaatgactagtaaagttagttgggcttggtatgtgcagccttccttccattcagctaagaatctattcagtagtttatttgtgcctgactttctatgagatgtcaggaagacagagatatataagacagttaagggacgtttataattaactgcaatgtaatacatgctattaagtagcagtatgaagaaagtgtaatgagaatatagagtagtaatagccacccagctttttttctgcattctcaaaactgttcaattttcttttaattaaaacaggaaaaacctgatttgtttacattaaatttgattagaatagtttatagaagccactaatatttttaaatagaaatgacatttgaagttaatttaagtagctatataatgatatcctctgctgcaggctccatgaagaagaaaagatcttgaaagttcaggcctcacacaagccttctgaaattctggaatgcagtgaaacttctttacaggaagtagctagtaaagcagcagtactaacagagacccctcgtacaagtgacggtgagaagactttaatagaaaaaatgtttggaggaaaactacgaactcacatacgttgtt

SEQ ID NO: 32778 - DNA, 2300 bp, Homo sapien
atattttctcaattgctctcaaaagagggaagcatacgcacctcggatattctttgaggcttccagacctccatggtttactcccagatcacagcaagactgttctgaatacctcagatttctccttgacaggtaaaaagtattcttaaaattgtgatttgagtgttgtctttcataacagtttaattctacttaatattgcttttacctttaaaaacatatttcaaatattactctttaaaatactattgcatttcttgtatgttttttatattttcttttgtttttaatttattttcctttttgaattttcttccttgagaccagctgttctcaaagtgtgaaacaaggacccctgcgggttcccaaaacactttcaggagtctgtgaggtcttctcttttccaacagcgtaactgtgtgaggccagattttctttatatgcttcatccaaaaaacatataacaatagaatgcagagaagatatgaggctccagctgtcttctgttaagccagatacttaaaatatttgcaaaatgtaaaacactgccattcttacttttttttggttttagaaaatacaactttttcatttttaaaatgttactaatattaaataatgggtttattattgtttgctaaatgttaatattttattttctcagttctgacagtaaatatcaataaatacaacccatgtaaaggaaagctctttgttttttaattatttttaagagtataaaggggtcctggcaccaaaaaatttaagaaccactcctttagaccagttcataattgtatgggtttggtatgttttattgtcgcctgaccacttaattaataaaacctgttatcatctgtatctccctgtctttgttctgctctgtggaatgactagtaaagttagttgggcttggtatgtgcagccttccttccattcagctaagaatctattcagtagtttatttgtgcctgactttctatgagatgtcaggaagacagagatatataagacagttaagggacgtttataattaactgcaatgtaatacatgctattaagtagcagtatgaagaaagtgtaatgagaatatagagtagtaatagccacccagctttttttctgcattctcaaaactgttcaattttcttttaattaaaacaggaaaaacctgatttgtttacattaaatttgattagaatagtttatagaagccactaatatttttaaatagaaatgacatttgaagttaatttaagtagctatataatgatatcctctgctgcaggctccatgaagaagaaaagatcttgaaagttcaggcctcacacaagccttctgaaattctggaatgcagtgaaacttctttacaggaagtagctagtaaagcagcagtactaacagagacccctcgtacaagtgacggtgagaagactttaatagaaaaaatgtttggaggaaaactacgaactcacatacgttgtttgaactgcaggagtacctcacaaaaagtggaagcctttacagatctttcgcttgccttttgtccttcctcttctttggaaaacatgtctgtccaagatccagcatcatcacccagtatacaagatggtggtctaatgcaagcctctgtacccggtccttcagaagaaccagtagtttataatccaacaacagctgccttcatctgtgactcacttgtgaatgaaaaaaccataggcagtcctcctaatgagttttactgttctgaaaacacttctgtccctaacgaatctaacaagattcttgttaataaagatgtacctcagaaaccaggaggtgaaaccacaccttcagtaactgacttactaaattattttttggctccagagattcttactggtgataaccaatattattgtgaaaactgtgcctctctgcaaaatgctgagaaaactatgcaaatcacggaggaacctgaataccttattcttactctcctgagattttcatatgatcagaagtatcatgtgagaaggaaaattttagacaatgtatcactgccactggttttggagttgccagttaaaagaattacttctttctcttcattgtcagaaagttggtctgtagatgttgacttcactgatcttagtgagaaccttgctaaaaaattaaagccttcagggactgatgaagcttcctgcacaaaattggtgccctatctattaagttccgttgtggttcactctggtatatcctctgaaagtgggcattactattcttatgccaggaatatcacaagtacagactcttcatat

SEQ ID NO: 32779 - DNA, 2300 bp, Homo sapien
tccaattccacttattataagatgatagctttaaagaggtgtatgtgaaaagaagacaactacttttttaaggattatcatacaaagaacagaactgaagagaaaaaaattatagatttgaacttaagacttagcttgaaaatttttgttctttccacatgtgcattaatgtaataggctgtttgaacctttcgcatggaccccccaatgcctctagcatcataatgaatttttatctctacatccaaaggatctaccaacaatttaaggtatggagataaaagtcagggatctccagggatatactgccctgcttctctgattatttagctggaagagaggcagtgggaagatgcttgaatggaaaatgagctagaatccttccttcaatttgatatgttaatgccataaatcagagttgcacaggcacctgcttagtggatagcttactggagcttgtgtgacatcatatatatttccttctttgcatatctctaaacaattttttactttaattatgtcaataaacatctttgaaagaaagactcagatttgtagtttttcatttttgctagcagtgaagcctaatgcttcttagcagcaatgagcaacttcatttaaactgattactctgactaaggaaagaaaaacaacaatagtactctactcagtcttcagagtcaaacctcacaacagttggagctagtacacgggttaggaatatgggagaaagaaaagacctaatatgacaaataaatctgtaattaacagggatctgttagaatcagaacagtcctgagtattaccttactaaaaaagttcagatgcataggttttgaatgaagtttctgattattctggttccaaatatgttgaattcaacaaatcacgtaaaaagttactgtatttttaatgttaaaaggaagtcttcaagtttttggtactggtatgagttatcatttgaatactcttcagtgttactatatttagtcagctttccatatcctcaggctctgtatccttagattcaaacaactttggatagaaaatttaaaaaaccaataaatatcataaaaaatagtacaaatgaaaaaacaatataacaactacatagcacaacgtaagtgctatgcaatcatatctaatcatctggagattaaagtatatgggaggatgtgcacaggttatatgcaaatactgtgctattttatataaataagggacttgagtatctgtggattttaatattgggggatggtgttctggaaccaatccactgcagataccaaggaaagactctaactagaattcattttatcatttaaaaaagtcaatacatattatcttgatacataaaatccttgagagacctgatattcatagataaagctgcacaagtataattgcttttatgaaagttcctagaagcatcttagcccaatatcaatctatcaagtattaaatcactttaccaatttcaataaatgccaagactgatataatctggtcgtaagttgctatcaagtaagtggataactgaacacacaggatagctcagaaattcactattgggataggaaaaccacagaaaagcatgataactggttcattcatttataaggaggagaaccttcattaaatctgcaaagaattttcagtttttaatctaatctgccttcctaatcttcctggtgattggaaacaggttaggaatgggaggtaatggaataaacatgaggatttctgttttttaaccactgtcataaaagcttgggaaaaagataaaccccaaatcatcgaagaacattgtttccttaaagtgttttcaaaataaatatgagaccaatcttcagaacaatgcacaactgtggataagttaaaacctttaggaagggggataactgggataactcttgagtactgtataatcaagaaccaggagaactgacatgtttccagtttcctggcaaaagaaaaagtgtaggaaggtagggtttggcattttaacattttatctaaaactacgaaaatagaaacaacagtgccaaacatatgactgaaacaaacaaacaaaaaacccaaatgtaaaactctaaaaatatgtgatcaatgtttaatattctgaggaataagtaacaaaatcaagacagattttttacttagctgggttaatttcctctgaattcttctaagagttaaaaatgaactatcacattgattgatttagaaccatcagattttacttctggaaaatctattacctttcaaaaagttataattttaatgttagcacgaaaatt

SEQ ID NO: 32780 - DNA, 2300 bp, Homo sapien
cagatttttcttttttgagactgagtctcaatctgtagttttgttgactctttatttgcttactaccctatgccactacctccatatatgcagggatctttgtcttgtcaccactccagcacctaatttcttattacaatcatctaacattttcaaactcagaggagcttcagaatatgaatgttgtgttaataagaaaatgactgaagttatgtctttccagaaatgctcatttatgtcgtcatatttttagcacttttatctgattatattatctgctgaaattggctttggggctttttcacaaataaattggagaagatgtttattacagaatcatgttaaactcaggaccagtataataattgtgaaacacacaaggaagtaggcaaatagaactagggtacccagtaaatttccttccttccttctttctctctctctctctttttttttttttttttttttgacggagttttgctcttgttgcccaggctggagcgcagtgtcgcgatctcggctcaccgcaatctccgcctcccgggttcaagctattttcctgtctcagcctcccgagtagctgggattataggcgcgcgccactacgcccggctaatttttgtatttttagtagagattgggtttctccatgttggtcaggctggtcttgaactcccgacctcagttgatccgcccgcctcggcctcccaaagtgctgggattacaggcgtgagccaccgcgcccggccaagtgtccctcttctagtccagcatccgaacagtagatttcaaacaaatacaaagttaagtggaataggcaacaaatggaaggggtgtgagacttcaaaatgtctcagagataggacccaaccaaatccttggcctcgccaagcgcccccatcactctggcagaacagctccagagaccagccctggccagccctgggtccccatctgtcctcccctccaagctggtagctcccgcgccctcttggtctgtcctttaatctcgcgcggcggggaccggcaggatggtggtctccccgcggttttgcctttcaggctctcaagtaaagaaaaccctcgaaactcctgatctcgagcacagcacaagctccgagctggcaccgggctgagtcaagatggcaagccccggactgaacattcgaatgtccctcagtcttccccgcgcccaagccccggtgcctctgccctagccgaggcctctgcggtcttcccgggcgaggagccgattgggggccgccggacggcggaggaccctgctcctgcttcccgaactacagatcccagggtgcctctcggactcgcgctccctccctcccttgctccctcccttcgtccgtctcctcccccggcccttgttgttttggctggaagcactccggcggagtttcagagaaagtctgggcagaaaccggagccgggcctgaacgtgggaaggggaggaggagagggaggaagaaggagcccggcggccgggagagggagggagggatcgggatctggggccgagccgctcaggacctgccgcgagccccggggtgggggaggcggcgggggaggagcgcgaggggacgggacagcgggatccctcccaggagccaagccgccaagcgcctcgttcctctgctgctccccgccctcttcggcggccgcgagagcggacccaccctccggcttgacctgcgacctccctgcgcccgccgctcagaaacgccccgcgcttcgctgccaaccctgcggctccctctgtgacccgggaccagccccgcgcccgctgcccgtaggcggctcgcggcttcccctttcctcggcgttcaccgagcgccgcgaagtgacccaccctcccccgaggagagggaaggaggatcgctccgggcgcatcgaaaccgagggcgggtgggcgggcgagcgggcaccgcgcggggcattgtgtgtgtgtgtgtgtgtgtgtgtgtgtgtgagcagcgctgtgtctgtttcggaaagcgctctggggaggtcttgtccctagggggcggagcgcaaaggacagaagctccggcaccgagtcggggcagagtcccgctgagtccgagcgctgctgaggcagctggcgagacggcacgtctggaggcgaggcgggcgcactgaaaggaggccggcgcgcccgcggccccggctcgcgttctgttcaggttcgtgggcctgcagaggagagactcgaactcgtggaacccgcgcaccgtggagtctgtccgcccagtccgtccggggtgcgcgaccaggagagctaggtt

SEQ ID NO: 32781 - DNA, 2300 bp, Homo sapien
gtgctgggatgacagatgtgagccactgtgcctggccagtaatatgtattaagtaaggtaatttgtaggagcttagagagaaccagcaatatgacacagtttctgctcttttggggcttacaatacagtattatatcatcagagggggtccattctgaaccataccttgaattaggcattagcatactagattctaattttgtttcttccattgaatttctaacgtggaccctggttaagtctaagagatcatttaaatcgtgggcctcagtttttttattcataaaatgagaatattgacatgggcctcagtttttttattcataaaatgagaatattgaatcttgaaaccctgttatttttacattctgtgtacaaaagtctcatggtactatctttaattttacttatcagattttgaatctctagtgctctttttatttcaagatattcttagccaagctataaaatcaaactaatttatatgctgttatgaggcaacttagcaattcatataaccacaggctagagaaagtttggacatatataatggttcatttcttcaattttaaggcagaactacatcccaagcttatgtaaaataatttgaattattatatattcccatagttctgcctcaaataaaatataactgtttttgaaaattcaaagacttagaaagtaaattagaggattgtttattataaaagaactttggaccctacaaaggaatttaaccacagttttcttttctttgttaatagagtctcactgtgttgcccagattggtcttgaactcctggcctcaagtgatcctctttccttgccctcccaaagtgctgggattacaggcttgagccaccactcccagccaacagaattcttttcaacagtgagttcctctagtgcactgaaaatgtaatatgatttgcagatgtttagtttatgtacaccagaaagaaatagttacgtatatttacagttcatggttctctgcagcagcgctgagtgtatgccagatatgctttccgttaactaattgtagggattttctgtgggttgagagtttttttgctgttgtgttggaattttactgacctatctttcctccctctccatgttcttcccagtagttcaaatagcattcatatgtaaaatgactggttaaaatatgggagatcatctctggctgttggagaagtcacccatttaggggatcaacctgtgactgaggaggcaggacactttctgtagtgggaggaacatgggccacatacaaacagatttagttcaaatgccagtgctacctctcccttgcattaagcaagttactgaaaccttcagaatctagttttcatctgtaatataggaataatgatgataatgcttatatcaccagggaatttgtctttctgaaagggctagcacacagtaggtattcaatgcaagttagcttttgcccttgccttcaaatccagggaacacatggcagcaacaagactgtagccctgggagttgctatgtctgcagcctctttaaggtgttaggcagacaggatgtaagcactagaaagattcagtatggtatcaccggctgtagtggttcagcccttggcctctgtagcccaagagccagtgttcgggtctactaactctgtgctcttgaaatgtctcctacttttaagtcagtttccttatctgtaaactgagactaatggcatttacctaattgggtcgttggagatcaagtaccttaattgatataaagtgcttagaacagtccctgggaggtggtattttgctccagtctgttatagggaggatcattttgttgttagagttcagtgaagaccgttttttaaaatcgtgtggaatgactataggcattataaagacaactgaagaagctcttgtttctgaacagtacttggccagtttctttaacaggagatggctttgcttttagaagcctgccccagagtcttccatctcttccactctccctgcacgtccgctctgtatggcttttgttattaatgtggagcagttgaagtcactgacttgggtgcaggccaggccagcattactgaggtcatatattactttcctagactctagtcatgaacaggatgttggaagtcagaggtacagagaagctgcctttttaggccgctcacatgaaaggtgtgtttgctttcctcaatcatttttatactaatagattggaatcttattcagtatcttggtagcatttttttcttttactctacaacctttatgccgccaggctgtcatttggct

SEQ ID NO: 32782 - DNA, 2300 bp, Homo sapien
agaggcagacagtagaggaaattccactaaggagagttcagtcatgtagatctcagcagggatggggacctgaacttgggatggtggcaatgggaatagaacaagggaataagtacgcggctaagaagaagggctcggtgcctgcgtgactggaaatcaaagagaaggaatcaagctgattgagttttaagcctggagaatctggataaagtcatttctttcaatgcaagccaggaaaagcagtcaacttaagaagtaaatggatttctatttgaggcccacaagcaaggtaatactggagtaaccaagtagaaatattagtttgagaatatgggacttggaatttggtaagatgatggaagttgtcagcattcagagaagaaaatgaagttctgaaaaaggaggatgatctctaatagcgtgtatggtaaaaggttagaggactgaactctgttggccattcccagggagagagacgggaggaaggagccagtaagtgaaacaaggaaataatcagcaagggagaagggttttaagatctttttaagatggagaaaacaaaagcacaatgtggcacaatgtgggttttctgatagtaaagggggagactttacagagcgtagtgccacatgttactaagaagtcagggaaggtaagccctttaaaaaaaaatcatagttatttaaagaaatattgtttaaattcctacaggactttggacaacatgcagaagtagttcaggtatcttgtttagcattaaggaagtgagagtgtgcttgtgttgttagcttcatcttgtcgtatacccaaattttgtgatacctcaaaatgcagagaccgaaaatgttcataaatgtactttaatgagatttctcaaagtgagttattgtttggagttggttaactctgtatcacgtatttcgatcctctttataatgttggctaaatgtttgttaaagaaaagtagtggaaaggaagatatatgaaaacaattagatgttaccttcttgtaagtcacattgaccttattcaataccaagtaatcattagacttttaattttacggaacaacaaatttgccgtggggaggtttaagaccaatggatcaactatataaactgtactagcactaggtttttgcatgctcttcagaggaaatgcttttccttgtgtctatgcattaatcatttacctttcccagagttttgtaatgtttaattccagtgcttcagggattgtgtttttatgtgcagatttaataggtggagttgggggtgtgggcagatataggacagaattagagagaatgcttttcttggttttgtggtggcggttttgttgtctgatgtataatcataaaggctaaagaacatttgtgctttaaatcctatggatcacacaaaaaatctaatgagaaaagccctatcttttgattgcttagcgataaacatgtttataaaaaatgtattcttagtctccaccttgtttattctgtcattaacaatttttatttagaacgcatgctgattctgcaaaatccacctcttctgaaacagactgcaatgataacgtcccttctcataaaaatcctgcttcctcccagagcaaacatggaatgaatggcttttttcagcagcaaatgatatacgactctccaccttcacgtgccccatctgcttcagttgactccagcctttataacctgcccaggagttattcccatgatgttttaccaaaggtgtctccatcaagtactgaagcagatggagaactctatgtttttaataccccatctgggacatcgagtgtagagactcaaatgaggcatgtatctattagttatgacattcctccaacacctggtaatacttatcagattccacgaacatttccagaaggaaccttgggacagacatcaaagctagacactattccagatattcctccacctcggccaccgaaaccacatccagctcatgaccgatctcctgtggaaacgtgtagtatcccacgcaccgcctcagacactgacagtagttactgtatccctacagcagggatgtcgccttcacgtagtaataccatttccactgtggatttaaacaaattgcgaaaaggtcagctctagttgacttcttctctattagaggttaatgatagaaaatcgatttttctgaatatttgttcttttaagcgtagttaaatatactatgctacaaaatacagtccatttttttccagctctacagctacctggaagggtatattgcattcatgctctgctggaagggaaaaagagt

SEQ ID NO: 32783 - DNA, 2300 bp, Homo sapien
ttgtatgccttaaatatatacaattttgtgaattatacctcagtaaagctgaaatttttttaaaaaaagttttcttaatacaataataggcaaattcggcagcctggcacagtggctgtcacctgtaatcccatcactttaagagactgaggcaggtagatggcttgagccctaattgttgttcaggaccagtatgggcaacatggcgatccctgtctacacccaaaaaatacaaaaattagctgggcttggtggcatgcacctgtagtcccagctacttgggaggctgaggtgggagaattgctggaccccaggaggctgaggctgcagtgagtcacgactgtgacactgcactgcagcctaggagacagggcaagccactgtcaaaaaacaaacaaacaaacaaacaaaaacaaaaaaccagcaacgatcagtttcaatacttttgtaaatatgcttccaacttttatctacatttttgaactgttaaaccaaatttttcagttaacactttataaattaacattctttggctaggtgcggtggctcacgcctgtaaccccagcactttaggaggcctaggcgagcagatcacttgagaccaggagtttgagactagcctggccaaaacagcaaaaccctgtctctactgaaaatacaaaaattagccaggcgtggtggtgcacgcctgtaattccagctactccggaggctaagtcatgagaatcctttgaacctgggagttggagattgcagtgagctgagatcatgccaccgcactgcagcctgggcgacagaaactgtctgaaaacaaaacaacacaaaacaaccattattctacattaatggttgttaaaggttaatagttcattttctgggtgtatgacagttttaaacacctaacttttaatactggattcagcctactgttgttagctttttgcagtcatatatgaagactatgatgaacatcattgtaggtattcatctttgcatatatccttagacatttccttatagtctaagaactagcatttctagtggagtggggacatttttccagatgtccatttaagaattatcattccattagttaaaaaatttgcaggctatatattcaaaggggatcccttctgtttggaattcaacataaccagttagctcaaacctcaactctcgaaaaatgtgtctcctttactcaacaaacatttagagaatactgaatatgaggaataaaaaaagataaaaaagaccctgtactgggcaggtaatctactgtagtatgcagattcgttatcaaacagactacaatgtatttaaattttgtaggcgatgaatgcacaaggcccttaagctgcattgaaggctgcctaaggcagtatacaaaatcagtgctgaatatttgttaacacttaaggagaatgtacgttttaattttcatgtttgatgcttggggaaaagattacatcgcaccacctatcttccccatatattgattattcgtgtttctcacttccatggtagtgtgcacgttatttgcttaactttggcatataaattcagaagaaatatcatttaactctgtgcctaaggagggtatttagaaataaccgacgcagctaacatgagaaggcaaaaaaaaaaaaaaagaaaaaagaaaaaaatcacactaacggactttttttttttttctaacaacaaaaaaccgtgagacttcacttggggtaaccataacgtcgtcaaggctgtggcgtcacgcctctaagcggatacggcagaagttttggggccagacacaagacttccaagtttgaatgggcagcgcaaaacccagacaagttttccggtagtgccgccaacccctgtcaggcacagaagacacagcgagaaccgtgagccgttacgaaagcctaaaacactgagctcgcgtcctgccaagcagcaggcgcacaaacctacacctccgagcgctccctggaggtcccgcccactcttctctcccgagccggctagagatctggaagagggcgggccaagggtgaggagggcagtatgcgcatgcgcgctcaggacccagtcagtgagccaataaggaatctcgcgagtgttgaaagtcggtggcgtaggtcgtcgtcctggatgctggcgagatagatgttatcttccagaggaagaggaggaggcggcgaagcgttttcccagcctcagtctctctttcgttttccttttcccttcccccaaccctccgcccttctctaaatcagccggccttccttgacctcagtgacccgtctggcccc

SEQ ID NO: 32784 - DNA, 2300 bp, Homo sapien
tttttgatgtagacaacccaaaggagtttttatgtatatagattgtgaataaattgggaaaagaaatagagataagtagagattatttcacttcattaaacttttgaagtcctaatttagttcatgtgattatttgtaaacttttctttattagtcttcctcaatcattgaagaacccaggattcaaatacaatacttaatggaaacactttttcatcccaaactaaatcctgccctgaaagccgaattcactatgaaatctgagatgaaactccaaggctattatgctggccagtggaaggttggttcacccctcttgaggtgacattagggtggtctgcagacatcactggagtggacaaagagatgcctgggtggttggggaaaggacagatcatagacaacagtagcctctttctagagctcagttgcaataaataccacagttactcatcagacacattggcagttctacttattcccatgtttcaaaactagagaattctagcaaggactaagcactgcttctgtagaccatcggtatttctccatggctgtttgaatttttgtcaaagcttctgtgtctcatgcacactagtgacttttgagacagagtcttgctctgtcacccaggttggagtgcagtggtgcgatctaggctcactgcaacctctgccacccaggttcaagcaattctcctggctcagccttccggatagctgggactacaggcatgcaccacacctggctaattactgtatttttagtagagacagggtttcaccatattggccaggctggtctcgaactcctggcctcaaatgatctgcctgcctccgcctcccaaatgttgagattacaggtgtgagccactgcatctggcctgatgcagattgataatttcttgagtgaggcagtgctgttgcctagtagcaaggcttagctgggtgagacattactagctgccttcagaagcggatctctgccctgaagtttaccagcctgctttccttgatgcccatgctggctgggtgtagggatcctgagtggagggaaaaagaagaatagatgatacagatttgctgtgcaaaggcggagttcttactggctcttcctcacaaacaggctggtgattagctgactttcagattcccttctgggaggtggcaaggggccatctggtcatcctagctttgcaaggagtaacttttttttttttcattttatatgccctttaatcccagtagatggataggtttgctttcttagtatgctttccagttgtagaaaggtcttttctctgggtattggctttcccccagcctcctattttttgcgctccccctcctccccagccacctctttccctgggagccaacttgataaaagtaatggcacaagtcttgcagaatactcctaccaatctaaatgctgcagacgccacagtgcttttttctcacccttaatagtcgtaagataagttagagggagctccttcaagagtacgctgagtttagtttcttcacagcaggaactaatctttaaaaaaaattatcattgggctccttattgtaactggacagtactggaactgggtgggtgcttgataagagaatgaatagtttaggtagttacaatgaaaccacaggcacctgtagaggtctccccaggctcaccttgacgctctgattggcggctgcagaccccatccgcgagatggcagtgttaggaacaaaggtgagctgcccactgcaggtcaaacgctgccggctaccagctgcagctgggagtgaaagactagaatacagaaaggcgcaggcagtcacgtaggactaggccgggtttaacacccgaacagtggtgctagaaggtcagagtcttctacgtacatgttggaaacatccttgattgtctagcaccaagacttttaaacacagggggacaaatcatcactttgggtatttgtaattgttcgtcagttcaaatctcttggttttaaaaaaatactttccctctgcgcgactggcgcgtcacgtcgcgcgcgaccagtccgcagggctcctcccgcgctgctgataggcccgcagacggcggcccagcagaggagcggaaagcatggtccggggggcggcggacgcctggtaggcgctcgggccgttgttgtggggctgcgcgctggcgctgcagggcgggatgctgtacccaagagagaggccgtcgcgggagcggaagaagctggaccgcctctggagcttccgcgccgacttcttcgacaaactgtgccttggcttctaggagta

SEQ ID NO: 32785 - DNA, 2300 bp, Homo sapien
cacagagcaggggagccctgggcccagaccatgaaaccatttttcccttctaggtctctgggcctgtgataggaggggctgctgtgaaagtctctgacatgccctggagacattttccccattgtcttggtgattaacatttggcttctcattacttatgccaatttctgtagccagcttgaatttctctccagaaaatgggtttttcttttctatcgcattgtcaggctgcaaatttttcaaacttttatgctctgcttcctcttgaatgctttgccacttagaaattttttctgccagatattctaaatcatctctctcaagttcaaagatacacagatctcaagcagaggcacagtgctgcaagtctctttgctaaagcataacaaaagtcacctttgctccagttcccaacgagttcctcatctccatctgaggccacctcagcctggacttcattgtccaaatcactatcagcattttagtcaaagccattcaacaagtctctaggaagttccaaactttcccacatcttcctgtcttctgagccctccaatccctagaaatttccaaactttctgacattttcttgtcttctcctgagtcctccaaactgttccaacctctgcctgttacccagttccaaatttgcatccacattttggggtatccttatagtagcaccccactcctggtaccaatttactgtattagtctgttctcatgctgctatgaagaaatatccaagactgagtaatttatttaaaaagaggtttaactgacccacaattgcatgtggctggggaggcctcaggaaacttacagtcatggcagaaggcacctcttcacagggcagcaagagagagaatgagagccagcaggggtaatgccagaggcttataaaaccatcagctctcatgataactcactcaccatcacaagaacaacacagggaaaaccacccccatgattcaattacctcccactgggtccctcccatgacacatggggattatcagaactataattcaagatgagatttgggtggggacacagccaaactatatcaaacatcacgtaatatttcttaagcatctctttgtgccaggaattcttaaaatggtgtgtatgggcaaatgcctgtatcactaacaagaagtcacaacagcaacaaaaccaacaaattggccagagagtgaaatggtgagaagtggtggttgcgtgttcggtctcatgcactgaaatttttaagaactacactgggtcctctctcatctgcatggtatatatctgtcctggacagaggccacagcattagaaagctggcttctgcattttgagaactctgacacaactgtgactcaataacatttttctttgagacgaagtttcactcttattgcccaggctggtgtgcaatggtgtgatctcggctcactgcaacctctgcctcctgggttcaagtgattctcctgcctcagcctcccaagtagctgggattacaggcaccaaccaccacgctgagctaattttttatattttaagtagatacagggtttcaccatgttggccaggctggtctcgaactcctgattttaaggtgacccaccctcctcagcctcccaaagtgcttggattacagatgtgagccactgtgcccagccaactcaataacatttttaaaattcaacctgtttcttttcctctcccctcctaaatcaagcaggtactcaatcatgcatttcttgcctcttgcctcttgcttctgagtagtaaccataagggaaaaaaaagcagcactaagtttcctgggcttgggaatcctgaatacaccagttccagagaaggaagataatgtggtgtcaacaaaatacttgtaagaaacaaggagacaactaaaagccccaccacaaggattctccaaacctgcaggaaatgagaaggtgagtagctgctgtgtgctttctgtgcagtgcaaacaaggaagtggcaagatcccgggaggagaagtggctctgtgtgcagctcagaaattgagaccacgccatggcgtcacaaagccaccggagctccagggctgtgctaaaatacagaatgagtgtcttactgctaacctgtgtgggtaagtgactcaatcaccagatgccatgtcctgaatttttagcactgggcaaattttttatgtcatagtcatgacataaattccagggagatagcagagctcttttaaggacagtttcctccctttctgaaggcacaggggctcaaagtcctccctttttgaaggcacaggggttcaa

SEQ ID NO: 32786 - DNA, 2300 bp, Homo sapien
aagctgaattttaggctgagtttccttttcattttccccttcctgccttagcaatggacctccatactggagggaacctgaagctaggatatgacataggttacccgcaggatatataaaaaatgatcagcctatacacccaggactgcccgtgagaagttgctttcctctgcactgcaatattcatttgtcatttattgatttgagaaatatttattgtcaagtgtgccccaagcactcattggtaaataagatagccatagtcagggtgtgtccacttaaaaactgtagtccagtggagacacaatgattgcaacgtagtgtaataagtcctgtgataagggaagaagatggaaccacacaagtatagagcaggggcacctgacaaagacaggaagtcagggaaggcttcgtggaggaagtactattcaatgaagaccctaagcagaattggaggccacctaaaaaggagtaggtgtattccaggtgaagatagcacaacccaggaaaaaaagaatccaataggattttatttgtgtatatacaattttcagatcttgctgttttccacttatccattttatcctgagtctccatatctttatttttgaaaacatgattttaatagttgctctaatagtccatcgtaagaatagtgacatttatttacccattttcagaaatagcatttttaagactcatgctaatcgctctccctttgtcaatataaaatcatgtgaattaattcttactgcttatatgaatatcaacaacatttcctttacttggttgactcttgagcacaattcctgcaacccaaactgatatccagccataacaaacactgaatttatggaaggtattaaattattatgtattgtttaattttaagtttttaataaaatttgctgcagttgttttacatgaattggcagggccttaagaggcactctggattcttttcctgctgctcagattaccccgtctgtgtcattcattcttccgtctctcccaagtctgcatctccactccctccatccattagtccctcaatctcaggctcctccctctctgggatgctctgctgatacttatctccatcttttatccagtaaatacttttttttctctgtggtccagtttcctgaatctgcaaacattagcttcataaatgatttttttaaaccacactttgggtaaatatgtaagtatgatatatgtggcaaattgcttacatagcaaattgattttctgggtcaggcaggaaagactttcacaaaaatcttacaggaagtaagatgatttagatggagtatccagtcaccttctgttgaaccatttcagacctaatttatattttttgttctgtctccctttaaaattgagcttcctcacatttccatacctttcattttaacctactttaatgataaggtttttggtttgttgggttttgtttctgactgttttcatttattgtcttggtattcatttatgcttacttagcaaggtatatttcagacagaaacagctcactggtttcatagctgcacagcactagctcttcagttcaaactctattttcactgaaagatttgttgcatctcatgtctcttacattgctgtgtgactcaccatgagtttgggagtctttcagaacctcagaacactcaaatgatttaaatttctcaaatatgttcatttcacatataggaagtcactttcatctggaccaccgggtcttgacattagaaatgagaaggtctatggctccacaacagctacctcagcctggcacgtgccctggcctcagagattcacagtccagttctttgtccagttgggtggctcctgtctaccaccttaccatgcccacttaactgatgcaaagttaatatcacaagtagccacctgttccttgcagtgaaaattgtacttaccactttcatagccccaagatatccatgtatctttattaacaggcgcttaacaacttgcatcatttaaaatgcctcccctgcctatcagctgatgatggccacaggaaggtgggcctggaagataacagctagcaggctaaggccagacactgacacttgcagttgtctttggtagtttttttgcactaacttcaggagccagctcgtgatctcaggatgtatggaaaaataatctttgtattactattgtcaggtaagtgattttatttcatcttggttctgttatattgggtatgagatcatagaataaaatgtaaactaccctattttagttctatcttatttaaatgcataaatgag

SEQ ID NO: 32787 - DNA, 2300 bp, Homo sapien
ttatttcttcaaaccaggcagaactacactgttccttatatttaaaccatgcctactctgttttcattgtgctattcccaattttccatgtaaaatgtccttcttctggcccctgttaatctaaaggccaagctcaaggcccactccaagtcctccaatcatctctttaagtattccagcctatactcatctctcttctgattccctgttgcacttacagttagtatcacaaagtgtaacaattgttctgtgactattgtgtatagattggttttgtttccacaaataagatactagacaaataaggtaccagaaagcagagaccaacagacccaaggaaaacgctagacacataaacagttaatactaaatgaataatttttttctacagtcaaaatactaatgctccaaaccatttttaagtcgtcttatttgaagttatgtgagccaaaaagtaaatctgtctcacattttatttttatcctgccaaaatttaaagtctataacttggtagaaaaaaacaatcggacaagaaagtttaattttcctctcacttaattttatctggtaaaaccaggacttcaggaataaagtagaactgtacatttctcccatctcttctgctcctttcagaagtatctccaactcaggagatatggaaagtaccttcttttcttaaattatatggtaatattttttgtctgttacaaaaataataaaaagacatgctcaacacataattaaccatatgactataagtctttttgatcaactcaggaaataattcttgaactactttttgttcagagaaaaagtgcaggatctagcgaagtaatgtgattgctcagggtatcactgaccatgcccagttgttcctattcttctttcctttcccaagttcgtcaagtgtctctgaggactcagtcaagtgtctctgaagatttacccttcccattattctaccaaacctaaacctaaattcagcccaactggagacattaaattctctaggttttcaagggtcacagcattaagagactagacagccttgagataagtaccaagtttatataacatgagttaataaaataaatggtcacaaggactcttccattcagtgtagattaacaactatttgcacacaggcttaagcaggacgagcaaagtggaaaaatatttcgctagtagtatttgtccgtgtcccaagaaaatctagaaaagaacatctttttaattgacatgtcaataaatataaactactatattatttataatgttaagctacctgaagcatgcctcccctgattctgtggcattctttggaagagatcatggttgtattcataatatctgtagtcttcatgtgcacgatctccaagtggccgctttctctgaccatcaacaaaattgtctgaataataatatcgggaaccagagtctccattttcaacagcaaaactaacttccgttacaaatgactgagaagaaccatactctctagggacatctgctagacttctggcaagataagaaggtgcagataatctgttgctttctcttctcattattttatgaggtgttctttgaattggagttctaaggaaactctggtttcttgaaactactccatctccagaagttgaaaaggcattagggcttgaatctggaagacagatatcagttcgtcctggaatttttggaccatgctggatgaatgaaggcataagattccgaagcagaggcgacgtctccttcttcacgtacttcccctgcacctcggccggcttggacacttcgtttttggttttctgtcgggacagcatccttctcgaccaggcccgaggccgcgctgaactgcctcgctagggctccgcgccgggcgccggccgtctccgccgccacctccgccgccacctccgccggcgccgccgcctccttccctccggagccgccgcctccgccgctgcctgtccggagcctggggtcgcccgcagggactgccgcatgttcagggcgctaaacgcgccggccgccgctcagtcgctggtcacttccttcccggaagtcggcccgctctgcgacgctgctcggggaccccttgaggaaagcccagcgacgccgggccagcgcattcttattttatgtatgagcaaactatggaatggaaaagagattatgagttattacttgatttgatttgccctaagtgttttttaaacgtatggatttagcgccaacatttaaaaagaaggtatattttaattaaaaatcaggaattgatttaatttaaaatttggctc

SEQ ID NO: 32788 - DNA, 2300 bp, Homo sapien
tgaaagctgaattttaggctgagtttccttttcgttttccccttcctgccttagcaatggacctccatactggagggaacctgaagctaggatatgacataggttacccgtaggatatataaaaaatgatcagcctatacacccaggactgcccgtgagaagttgctttcctttgcactgcaatattcatttgtcatttattgatttgagaaatatttattgtcaagtgtgccctaagcactcattggtaaataagatagacatagtcagggtgtgtccacttaaaaattgtagtccagtggagacacaatgattgcaatgtagtgtaataagtcctatgataagggaagaagatggaaccacacaagtatagagcaggggcacctgagaaagacaggaagtcagggaaggctttgtggaggaagtactattcaattaagagcctaagcagaattggaggccacctaaaaaggagtaggtgtattccaggtgaagacagcacaacccagaggaaaaaagaatcaaataggattttatttgtgtatatacaattttgagatcttgctgttttccacgtatccattttatcctgagtctctatatctttatttttgaaaacatgattttaatagttgctctaatagtccattgtaagaatagtgacagttatttatccattttcagaaatagcatttttaagactcatgctaatcgctctccctttgtcaatataaaatcatgtgaattaattcttactgcttatatgaatatcaacaacatttcctttacttggttgactcttgagcacaattcctgcaactcaacctgatatccagccataacaaacactgactttatggaaggtgttaaattattatgtattgtttaattttaactttttagtaaaatttgctgcagttgttttacatgaattggcagggccttaagaggcactctggattcttttcttgctgctcagattaccccgtctgtgtcattcattcttccgtctctcccaagtctgcatctccactccctccatccattagaggagcctcaatctcaggctcctccctctctgggatgctctgctgatacttatctccatcttttatccagtaaatacttttttttctctgtggtccagtttcctgaagctgcaaacattaacttcataaatgatttttttaaaccacactttgggtaaatatgtaagtatgatatatgtggcaaattgcttacatagcaaattgattttctgggtcaggcaggaaagactttcacaaaaatcttacaggaagtaagatgatttagatggagtatccagtcaccttctgttgaaccatttcagatctaatttatattttttgttctgtctccctttaatgtcctcacatttccatacctttcattttaacctactttaatgataaggtttttggtttgttgggttttgtttctgactgtttgcatttattgtcttggtattcatttatgcttacttagcaaggtatatttcagacagaaacagctcactggtttcatagctgcacagcactagctcttcagttcaaactctattttcactgaaagatttgttgcatctcatgtctcttacattgctgtgtgactcaccatgagtttgggagtcttgcagaacctcagaacactcaaatgatttaaatttctcaaatatgttcatttcacatataggaagtcactttcatttggaccaccgggtcttgacattagaaatgagaaggtctatggctccacaacagctacctcagcctggcacgtgccctggcctcagagattcacagtccagttctttgtccagttgggtggctcctgtctaccaccttaccatgcccatttaacttatgcaaagttaatatcacaagtagccacctgttccttgcagtgaaaattgtacttaccactttcacagccccaagatatccatgtatctttattaacaggcgcttaacaacttgcatcatttaaaatgcctcccctgcctatcagctgatgatggccgcaggaaggtgggcctggaagataacagctagtaggctaaggccagacactgacacttgcagttgtctttggtagtttttttgcactaacttcaggaaccagctcatgatctcaggatgtatggaaaaataatctttgtattactattgtcaggtaagtgattttatttcatcttggttctgttatattgggtatgagatcatagaataaaatatgaactaccctatttcagttctatcttatttaaatcaataaatgag

SEQ ID NO: 32789 - DNA, 2300 bp, Homo sapien
gaggtatgaaagctgaattttaggctgagtttccttttcgttttccccttcctgccttagcaatggacctccatactggagggaacctgaagctaggacatgacataggttacccgcaggatatataaaaaatgatcagcctatacacccaggactgcctgtgagaagttgctttcctctgcactgcaatatttatttgtcatttattgatttgagaaatatttattgtcaagtgtgccccaagcactcattggtaaataaaatagtcatagggtgtgcccacttaaaaactgtagtccagtagagacacaatgattgcaatgtagtgtaataagtcctatgataagagaagaagatgaaaccacacaagtatagagcaggggcacctgacaaagacaggaagtcagggaaggctttgtggaggaagtactattcaattgagaccccaagcagaattggaggccacttaaaagagtaggtgtattccaggtgaagatagcacaacccaggaaaaaaagaatccaataggattttatttgtgtatatacaattttcagatcttgctgttttccacttatccattttatcctgagtctccatatctttatttttgaaaacatgattttaatagttgctctaatagtccatcgtaagaatagtgacatttatttacccattttcagaaatagcatttttaagactcatgctaatcgctctccctttgtcaatataaaattgtgtgaaataattcttactgcttatatgaatatcaacaacatttcctttacttggctgactcttgagcacaattcctgcaactcaacctgatatccagccataacaaacactgaatttatagaaggtattaatttattatgtattgtttaattttaactttttaataaaatttgctgcagttgttttacatgaattggcagggccttaagaggcattctggattcttgtcctgctgctcagattaccccctctgtgtcattcattcttccatcctccccaagtctgcatctccgctgcctccatccactagtccctcattctcaggctcctccctctctgggatgctctgctgatacttatctccatctttctccagtaaataattttttttctctgtcgcccagtttcctgaagctgcaaacattagcttcataaatgatttttttaaaccacactttgggtaaatatgtatgtatgttatatgtggcaaattgctcacatagcaaattgattttctgggtcaggcaggaaagactttcacaaaaatcttacaggaagtaagatgatttagatggagtatccagtcaccttctgttgaaccatttcagacctaatttatattttttgttctgtctgcctttaaaattgagcttcctcgcattttcatacctttcattttaacctactttactcataaggtttttggtttgttgggttttgtttctgactgtttgcatttattgtcttggtattcatttatgcttacttagcaaggtatatttcagacagaaacagctcactggtttcatagctgcgcagtactagctcttcagttcaaactctcttttcactgaaagatctgttgcatctcatgtctcttacattgctgtgtggctcaccatgagtttgggagtctttcagaacctcagaacactcaaatgatttaaatttctcaaatacattcatttcacatataggaagtcactttcatttggaccactgggtcttgacattagaaatgagaaggtccatggctccacaacagctacctcagcctggcacgtgccctggcctcagagattcacagtccagttctttgtccagttgggtggctcctgtctaccaccttaccatgcccacttaactgatgcaaagttaatatcacaagtagcaacctgttccttgcagtgaaaattttacttaccactttcatagccccaagatatccatgtatctttattaacaggcgcttaacaacttgcatcatttaaaatgcctcccctgcctatcagctgatgatggccgcaggaaggtgggcctggaagataacagctagcaggctaaggtcagacactgacacttgcagttgtctttggtagtttttttgcactaacttcaggaaccagctcatgatctcaggatgtatggaaaaataatctttgtattactattgtcaggtaagtgattttatttcatcttggttctgttatattgggtatgagatcatagaataaaatatgaactaccctattttagttctatcttatttaaatcaataaatg

SEQ ID NO: 32790 - DNA, 2300 bp, Homo sapien
cttatttcagtaatcttttataaactttctatatcttagggtcgtaggttataacagatgcatagtattttaaaaccaaaataaatttacctttaagtggccttagtataagccataagaaaggcctgtttcaaaactactaacaggaatttatcagagtaggagctcaaactactgaaatacgattttagaaggacttttattttggaaaaagaatataaaactggaatttgggaagaaagggttagatagtggaaagcaccccagattggatccgagtccttattctcaaactacctaatgagatgaaattgtgcaagtgatttaaatttgatgagattcatctggagatctattaatgagtttaaagtcttaaagtgcttactgctttctgattaattttatattaaaagtcctcaaagcagaaagaatgtcagataaaaaaaagtatgtgagatccaaagtggacttacaatcacatgcatgaagaagtcatgtgtatacaacagcccctggggaaaatgttaaatatgtcatgggggctctacatttagctgaggactgggccaaacatcctagcagattcttttcagttattctgatgtgtcatctctttggggaaaaacctaacttcactaatatccaggctcaggaagtgaaaaagacagaagccttacctagccactgtgaccagaagtgattaatttaatcaactgcccacctcaaccatcaccaacttttgcaatcacttggcgaaatcaatgtccaacaagtgaagcaaacccaaatgtggtgaacattcctccattgccaaaatgggacaactgccttatctcctcatcaaagcccatcttctgggaaatcagcttctctgttaaatacccaagtgggctagaagcgcattttgtgggcaaccctatagaagctcgtcctgatgccaacttgcagggatccagtaaacctcaagtcaccgctcctgataacgtagacatctttttagacacactatttacacagactttgtctagctggggaaaaggttaatttacttgtatacacggggataagtagagcacagcgcttctggatgccctcagacttgcatctaattctttctccagatctaacgcctctgtttctacacccaggggaacctctccccagggactgcgcgcgcgtgcgtgcaggtgtgtgtgtgtgtgtgtgtgtgtgtgtgtttgtgtgtgttaaaacgaacactaattccgcgcccagcttctctctccgtccacctgcggcccaagaacttgtgttcccagatggtaccagcggggcccggcttattcccgaacacatgtggggacctgaaaggggcgtcggggactaacccgcccaaaccgtggcaaacactctgggaggccgacttgggcttggcctgtggcccgacacaccgccccactccgcgcacacgcgtctgtgccacttcagtggcttgcaggacctccggcgaggatgagtctccaaaccatctcagcctactcaacggcatctgggatgtccccctgcctctaagtcagaccccaagaaagatctttgaggacttgagcttcacgttgaaaatcagtgtggaaaatgggggtgtcagtgcggctgggggagacaaaggggcccaaaagctccctcccgtccgctccagcccacttagttcaccctcccacggggcgaggggcgggccggggggctgaggtggggatggccctggaaggggtccctcccttcccacctcctacggcccactcttacttactttctttcggagcctcagcttggccgcctttagcccaggcagtgcggaggggaagcggggaggagagaggagcctgcgggctgcagcagccgggcagtcccggaatctccggactgcgtccctgccccaagcccgccgggaacccgggccgtggacgcccccacccgggggccgcggcgaggcgggcgcgcggggttcagcaccctcgaggctggttccgaaggctcgcggccctccccctccgtccgccgccgtcgcggctagccgcccctccccgccgcagcagggaggccgccggggcccgggggacgcgctcgcgcgggggccgccccctccccttccctccaccctgggcgggggcgcgcgagaagcggtgacgtcaaggggcgcgctgtggcagcacctccccgcgcgctagttaaaaagaagaagaaaagagggaacgaaacatgagaggctgtgtgagaagctgcagccgccggcagaggagacctcagcatcatctagagcccag

SEQ ID NO: 32791 - DNA, 2300 bp, Homo sapien
tacaaaacaaagtgagagataccacccagacacatatgttgattcgtaggagctgtttacatgagaatagagtgaaatctaccgtgaactgagcataaaaattagattcagcctgggtattttttttttttattatgcctgggccagcaagactgaagcacaagttttccaagagtctctcagaccttgacaactggcagtgttctaacagaggaattcttaattaaacctaaaatggggaaagggagggggagcaaagacacctgattgtttatttcacgtgcagtgattgttaatgatgtgagccagcaatgattccttggagtacagtagataccacccatgactgcatctcctggcaagaacgatattgcaaactcaaaaacaagcgtgcctttacagtcaacaaacaccatgttagtatttaaacttattaacacaaggataacgtaaatgccattactcttaaaacaaattcttagagtagatcttccaagacaccaactgaccctgaaagtctgaatttataatgttacaaaatgacggagaatcgtctcagttttatgtgataaataacgccccagcaaaatctttcgccagtttttttcaggtccctaaccggaggaccaggagttcctttctgttggtttaactaatgtaatgcaagacacccccctctgacggggctggggatcataaaccaaccatgcttcaacatcctttacgattcaatcctctccctaaccgagcacgtggagaaaacagcacaaatctttttaccctagaaaaataagccggaaaccacagccaccttaatttacagtttcaccgcagccaatgccccattcgatccaaaacacactgttcatcgcgattcttttaaaatatttacccagcccagggtgcgggtaccgcagaaacgtctgttttcagagataggcaagtttgcacagcatcccgaccgcggactctgggggaggaaatgctacttgcttaccccagaggaacacacaacggaatcacgttagcgctatagaaaagttatggaaagaactcccccaaagaagttttgaccttcttacaaccaccggctttgccagagccacagggaaccccacccagccaatatgccaagtacgcatccgtgaagccggtgagtgcctaccttattctccaggcgccctagccccgggctgtcactccgcaggcagcaggacagccgagggtagaagccaccgcacagcatctctcccccactcagcagctccagctgggacatcatcctcctgtctctccttttcaggcgcttcggggggttcccattcaggcaccttctcctccttgctccgctcccttcgtttctttccccaaacttagcatctccttcaaagaagcccagagccacggccagcagcagcagcttaaaggagagcatcttcagcatcgtctgcccagagcagcaggggctgggcgcgggaggatgggggggaacgccactgcccagcaggggcactagggcgcagctccaggaggagtttgcggggctgtagggcactccagagacagagggaggtggcggggacaaaaatatgtacagcgatgcaactttgcaaaaaataaaagacgcggcgatgggtccaatgccttaggggagcccgaggagcgagataaagttgtgcggatgacaccgtttgcagttgtgccagtgtcagttgggttgggggctttctgctgcggctgggaagtgggaggaggagaaggagttggaagaggaggaagaaaaggagaggacagccacagatgttcacttgtccgtgtaacgggagttgtttaggtgggacagtagcaggaacagaaacggcgacggcggcggcggggcaggcggaggcagggccagcgctgggctctagatgatgctgaggtctcctctgccggcggctgcagcttctcacacagcctctcatgtttcgttccctcttttcttcttctttttaactagcgcgcggggaggtgctgccacagcgcgccccttgacgtcaccgcttctcgcgcgcccccgcccagggtggagggaaggggagggggcggcccccgcgcgagcgcgtcccccgggccccggcggcctccctgctgcggcggggaggggcggctagccgcgacggcggcggacggagggggagggccgcgagccttcggaaccagcctcgagggtgctgaaccccgcgcgcccgcctcgccgcggcccccgggtgggggcgtccacggcccgggttcccggcgggcttggggcagggacgcag

SEQ ID NO: 32792 - DNA, 2300 bp, Homo sapien
gtgacgtcaaggggcgcgctgtggcagcacctccccgcgcgctagttaaaaagaagaagaaaagagggaacgaaacatgagaggctgtgtgagaagctgcagccgccggcagaggagacctcagcatcatctagagcccagcgctggccctgcctccgcctgccccgccgccgccgtcgccgtttctgttcctgctactgtcccacctaaacaactcccgttacacggacaagtgaacatctgtggctgtcctctccttttcttcctcctcttccaactccttctcctcctcccacttcccagccgcagcagaaagcccccaacccaactgacactggcacaactgcaaacggtgtcatccgcacaactttatctcgctcctcgggctcccctaaggcattggacccatcgccgcgtcttttattttttgcaaagttgcatcgctgtacatatttttgtccccgccacctccctctgtctctggagtgccctacagccccgcaaactcctcctggagctgcgccctagtgcccctgctgggcagtggcgttcccccccatcctcccgcgcccagcccctgctgctctgggcagacgatgctgaagatgctctcctttaagctgctgctgctggccgtggctctgggcttctttgaaggagatgctaagtttggggaaagaaacgaagggagcggagcaaggaggagaaggtgcctgaatgggaaccccccgaagcgcctgaaaaggagagacaggaggatgatgtcccagctggagctgctgagtgggggagagatgctgtgcggtggcttctaccctcggctgtcctgctgcctgcggagtgacagcccggggctagggcgcctggagaataaggtaggcactcaccggcttcacggatgcgtacttggcatattggctgggtggggttccctgtggctctggcaaagccggtggttgtaagaaggtcaaaacttctttgggggagttctttccataacttttctatagcgctaacgtgattccgttgtgtgttcctctggggtaagcaagtagcatttcctcccccagagtccgcggtcgggatgctgtgcaaacttgcctatctctgaaaacagacgtttctgcggtacccgcaccctgggctgggtaaatattttaaaagaatcgcgatgaacagtgtgttttggatcgaatggggcattggctgcggtgaaactgtaaattaaggtggctgtggtttccggcttatttttctagggtaaaaagatttgtgctgttttctccacgtgctcggttagggagaggattgaatcgtaaaggatgttgaagcatggttggtttatgatccccagccccgtcagaggggggtgtcttgcattacattagttaaaccaacagaaaggaactcctggtcctccggttagggacctgaaaaaaactggcgaaagattttgctggggcgttatttatcacataaaactgagacgattctccgtcattttgtaacattataaattcagactttcagggtcagttggtgtcttggaagatctactctaagaatttgttttaagagtaatggcatttacgttatccttgtgttaataagtttaaatactaacatggtgtttgttgactgtaaaggcacgcttgtttttgagtttgcaatatcgttcttgccaggagatgcagtcatgggtggtatctactgtactccaaggaatcattgctggctcacatcattaacaatcactgcacgtgaaataaacaatcaggtgtctttgctccccctccctttccccattttaggtttaattaagaattcctctgttagaacactgccagttgtcaaggtctgagagactcttggaaaacttgtgcttcagtcttgctggcccaggcataataaaaaaaaaaaatacccaggctgaatctaatttttatgctcagttcacggtagatttcactctattctcatgtaaacagctcctacgaatcaacatatgtgtctgggtggtatctctcactttgttttgtaacaaaaagccatattgcatcatttaatttgctcaagtcatgcaaataggaaaaaatcaataggacaaaaaggggtcgacttatcctcctccccactaaactgctgcccacacacagagtcctgttgcttatggcaaaagaataacaacaacaccattgtatttgttagttggttcactaatgggtgaaactagagaacatcattctctttcagtccccagctctgtccaaatgttcatgccttttgagggagcatttgtc

SEQ ID NO: 32793 - DNA, 2300 bp, Homo sapien
catcccccatagagaaacatttgttatagttgatgaactgacattgacacgtcataatcacccagagcccatggtttacattagggttcactcttggtgttgtgaattctgtaggtttagacaaatggataatgacatgtatccaccattatagtatcacccagagagtttcactggcagggccctttttcacatgagaaactgaaggttacaagggtcaagcagttcttagtggacctggtattcagccagagccatagctccaagcccccagcaactctacctggcctgctttccagatttgctgtttcttgttggaaacaagtcaaacctctttttctcatagtttctctatcttcaaagaaaggtaatagaggaaaatgttctctccactatggatttagttccaccttaagtcacagcatgactgtatcatgatccctgccaggcattgtcttctgtgaatcattgaactagagaggacaataaagggactgttgccacagaacaactaacccatctttggcaggtcacgcttatggtttccctatcatgaatgagatcattgggagccaagagtttatgttttgttttttgtttgttcttttataatttctacatgactcttacgtctcttaagaaccagcaccaactctcaattttttattttattttttaaatttctttattagctccaatggtttcattttgtttttaagtaattaatatattttgttggcctagaacagtgattctcaatgggataattttacccccaggggacatttggctatgtctgggaacatttttggttttcacaattagagtgtgatgggggtgagggagtgatgctactggcattttgcctgtagaggccagagatgctgctaaacaccctacagttggcagcacagcctccccagacaaaaaattacctggcccaaaatgtcagcagtgccaagatagagaaacctaaaaacaatgcaagcctgttttccacacttttgataacttccaaaattgtattatataacttcattcttcccccaacccaagctcctcatacccagtccctcagtgattgaaacattccacaaaccttgaacccctcttatattcctggctttgaaccagataacaggaagatagtgatgaagttgcaagtcctccccttatggagcttcctgtcagtggcttaagtcacagagatactctggcccccagattagggatggaaaacatgaaaacagagtcaacgtaaaagacctcgatatttgtagggaccagctttactatattcctggaattaaagcacatgttttcctgtgttagagcagcctaagttttagaatgcagcaatttcatgtaagaaacccaaaattaatgttataactagtactgttttgtgtggcacagagatgagttgatggtaacactgttgttttttttatgttattttaccttaagttctgggatacatgtgctgaacttgcaggtttcttacataggtttacatgtgccatggtagtttgctgcacctatcaacccgtcatctaggttttaagcccgtatgcgttaggtatttgtcctaaggctcttcgtccccctgcaccccgccccccaacaggccccagtgtgtgatgtttccctccctgtgtccatgtgttctcattgttcaactcccacttatgagtaagaacaggcggtgtttggttttctgttcctggatggtgacaccgattcttattcacaatactttaccagtgtattatacatgtgatattccttaagaacagactaacaattgttttaagacagtgtgcatatttataacataagaaattataaatcataagagaaattaagaaatatattccagagattaagcttcaaccaagtaagcaaacacatcggactacttccttcagtgctttctagaagatccaaactaaattgccataggatccttgccagtccacaaagggctccttcctatgtcaggaatctccagtctgagcttggaaaagatcacggtaggaattaatgtgtatcccctcttgttatgcagatgtgctgtggatagacatcccactgatataaacatcaatttaacgatactgtgttcagactccaatggaaaaaacagatcatcagccagaattctacagataataaaggggaaagattatggtatgtagagcataatttgctgattttgctttagttcaagttttgtcttagtatatttagtaattgaagagaaagggatttctgaaaaatgagcatttgggaaagcataa

SEQ ID NO: 32794 - DNA, 2300 bp, Homo sapien
tctctagaaatgtctctcattctctgctgagttcaggtctccaaataactatgggtgtaaaagcctgtttcctacttgcatatttatctttcagatcattttgtaactatctccctccttttttccctcgcttcccttattcagcaaatatttgttggtctcatgctcagtcctgtttctgacatacagaatgagagtgtgatgttcttgctctttttctctcccagcaaaatgtgagccagcatgtcgtcatggaggtgtctgtgttagaccgaacaagtgcctctgtaaaaaaggatatcttggtcctcaatgtgaacaagtggacagaaacatccgcagagtgaccagggcaggtattcttgatcagatcattgacatgacatcttacttgctggatctaacaagttacattgtatagtttctgggactgtttgaatattctattccaatgggcatttattttttatcctgtcattaaaaaaaaaagactgttatcctgctacacactcctgtgatttcattctcttttattaatttaaaaataatttccagaaatgtgcagatcctctgtgtgtatgtcagcatgtttgttcacatatgcacatacacatactcataacccctatatgcgttgttgcataacagatgattttttaaaatatatacttccttatgcaaagtaatttacacagaaattccattgtaaattgataatggattttttatgttactagaagagattatttgacttcccaggaattttctgtctgtaatcactaaagtcaactttaatagagttttgaaacagtactgtgcaatccgatggatctaattaaaaaaaaggcaatatttttatattaaagtactatactaggagagaatgtttcagaactccctgatgaatttctaagtgagcaacttgatataaaattgtaatcttcatttttgtcagtgtatccagttacagaatgctacacacttacctttttattggctgagaaatctggttatttcatcttaatctcaagattgttttcaagtgttttataattaaatcataatagcatattttaaaatcaatcttcctaaaaggtctgcttttattgtatattttatttaacaataggcactgggtttgtgttacatatttatatattttattttatttttataatatagacatcacctagatgaaacacctttaccctgtcctgtaaaacactaaagttacatttttcaccaacttaattggaaagaaggggagtgagaaagcaaacagtctttaatgtgctgtggatctaatctagcaaggtatccttgtgccaacatgtaatcattaacgacggatgaaaaagcaagaaaacagccaatccttataaaattccagcattaaacatttgtaaagtgcttttcaccatagcaagactgtcagagtctatgttattagaatgttgcagatttccactgaatcgaacctcactggagaagagctcacttgtttttaaaaatcttggctatgtaagctgtcacctgtacaaatttttaacataataattcttgccaaatatgactttaaatgtacgtgttccttcagaactcaatgaaaatactctttggctaatgtatcaataaattttctgtaaatgttctgttcagggttttacagagatgacatgttctgacttaaaactgcaaaaagtctagtagatatttttcttcatggttttcaaagccagctctccacgtttggattttaacaaaatataaggcctctttgcactagtgaaaaaacacgtctactcatgacaagtgcacacccactatggctgtccttcttctgtaaacatccattcctctagaatctaaattgtagagcagtatagattatgcagcgccagctgactttctaaaccttctccttacctttaggaatacaagcctcaatttaaaaaatatattgtagctagtatttctctattgttttaaggtgagagatttgcaattaaagcccagtaagcatttatatagaagccacaatgtagaaagattggttaagtacactgctcttgtcttccatatatgattacttaagtttcaagtgacctcatgccaaatggaaatgggttgagaaatcttggttcagtgcttagtgaacaatagcctgcattaaaaagtgcatgcataattttgcacaatttagattcaattgacagtctattcaaagaagtctcaggattaaatgagcatggagaccaaattgccctcttaccccagaaaaggggtggtcccttctagtc

SEQ ID NO: 32795 - DNA, 2300 bp, Homo sapien
agctcattcaagatatagaaggaagtctgatgcaagcaaaaagacctagggtaggagtggcaagaaatgaggctgaagacataggcaagatctaggtcagacagggccttatatgccatatcaagagtttcaaattctatcttaaatgcaatggaaagttatagatagacttatagtacaggcctgacatgacctggttttattgttagaagacggctacagcatggagaattgattacagggaagaaagactggaattggagagactgtttaagagactgtcacagtaccccaagtagatgatggtggatttcattagcctggacagagggaatagagagaaagaaatgtaggatgtacattgatgatgggatataaggtataaagaaaaggtacaagtcagagaggtttcccagaggtctttccagacaactgagtggatgataatgccagctattgtgatagggaatcctggagaatggttaaatcaaggcaaaaggatgtgttccattttagacatactgaccttgagatctctgcaggacatccaagaggaggtctcaagtaagcatttggatacataagtcgcaaattcaggatagagggctgaattgaaggcataggtcattagtgattctacttcttgttggcaatagaatgtgtgacagaattatttttcaatattaacatatgctttgtttttgttcgataattctcttttaccccataacctacccccattcaggcaacacgactttaccatattaattgtattaaaaaaaagggccaaattctagacttgtaagtcaaagctctgaaggacttgaggcccaaattttacatcataaacaatagattcaaaataatacataatcagttagaattagttttcctgccccaaaaaagataaagggtttgagggttgggatagaaaagagttgaagaagtgacaaaaatctacacttaggtggtttctctgattaggggccctatttattaccctctacccagacctgccctgggctgagtcttaggaaagggagagaaaacaatggaaacctcagatacgtaatcagcttaaatatcgaggaaactatgtctcagttctcctgtgagtcccagggagctgacaggttcttcagagctaccttaacatagggcagggtaactaagctataacagacctgtcctggacagcctgagtgttccatgctccagtgaggcataggaaaaaaatagaagttgctgaaagggagaagtgagcgctaaagacctattggtcaatatgagaaaaacataacagccatttcaatggattgatgaccaaaaagaagatgagaacaaagatgtatcaagcaatataaaagtcttattaaaataccattaccttgccccaaatctacataatagatgttagctcttgctagaaaaatgctgcataacaaactatcccaaactcagtgtcttaaaataagaactatttagcaaacatgtctgcaggtttgctgggagttagctcatctaggtggatgtgatgggggtaaattctgctggacatgtctctcaccctttttctaggactggtggactagttgaggcttgtttttcttatggtgccagtgaaggtacaaaggtcggcacatccaaatctgcatatgtttcaaacctctgatcacattactcctgctaatatcccactgacatatatgcctgctgatatcccactaagtcccgtggctgaatctggagtgaagagctcaggatagccttgtccaaaggtattcagtaaagagaaaggtgaagaattggggccattgattctgtgtctaccacatccacacttagatgaaatccctggaagtggaggaaggaaatatctatgatttaaccacaaaagatacaaattagtgacagaaaaataaaatcacattgcttgcacacccaggatttcgaattgggatttgaaggaatattacaataggggcataaacaaaatgcgaaaggaacccaaaggaaaaatcccattctgacatcagaatgacatcacaaataaggtaacatttgatgaaagtcctatgaaagatgagtagaattttgaacaactgaggttaagcaaaagcacggaatcatgaaaattattctttgaaatggcaaagatttctgtggctggatcatgggatttattgactggagcgatttctcctcagaagaccagacacatgtgagctatgcgaatccacggaagtgttgttatctttctattttttcctcgcttatatgaaggactataggtcaggaac

SEQ ID NO: 32796 - DNA, 2300 bp, Homo sapien
attctgaagaatgcagttaatataattaaatcactgtaatttaaatcttaggggctgggcatggtggctcacacctgtaatcccaacactttgggaggctgagacaggaggatcatgtgagcccaggagttcaagaccagcctggacaacatggcaagaccccatctctatttttaaataaataaaaatcttaggaattcaggttttgtttcatatgaccagatatgcaaagcagtgagctatagtagtcaaaagagcacagaatcaaagttttggcttcagtatctcctttaatcagcctagactttgagtaggtctgggctttatttcctctcctgttaaagaggttcacttgatgatttttacttctacaatgctatgcagttctataattctgtgcctgaaaattcaaatgacttttagccctagaaaagtcagactgaaatacttttattctaggaatatataaatattgatcctcattttatttacttaattcctttttttttagagacaggatctagctatgttacccaggctggtcttgaacaccttgcttcaagcgatcctcccacctcagcctcccaagtagctgggattacaggtgtgatcccatcaccccactaagatcctcattttaaatattcattgagtgatgcagagaacagtcatacctgccctctagctgtcaaaagttttatttaagacccagcccggtggctcacacctgtaatcccagcagtttgggaggccaaggcaggtggattgcttgagcccaggagttcgagaccagcctggaatatggtgaaaccctgtctctaaaaaaattccaaaaaatcagcctggtgtggcggcacacacctgtagtcccaggggggctgagacaggaggatcacctgaactgggaggcggaggttgcagtgagccgagatcgtgctactgcactccagcctgcgtaacagagcaagacactgtcccaaaaagcacaaaaataagaaaaaaatgttaaaagttcacttacatatgctcttaccatagaagataaggtcaggaaaatggcttcaagattttgaagtgaataactggcccattctaaaaaggttgacctcatctttcacatcttttgttaattttactaagtctattcatatgtgaaaaaacacttcaatactggatcgtgaacaatatgtaaaactgctttggtagcgcagttactgctactgaacattgttatatatgctattcaaaataggtgcaatagttctgcataccgtttccttgacacctcccattgtatccgaagttgttctttaatcggcacacaagcacttgatacttactaaataacggcagacacaacggactgtaaactttggcaaggcctgaggcttaaacgctcaataagtaatttactgaatgaataaacagatgaataggttcagttatgaactagttgtcacttgcctgcaagttaggtgagatctagggcgagactattcaacctgcaaccatcattactaactgaatgtcctgttacctaaaaaaagatagaaataaagcccatctttagggcagaattcaactgccggacttgggactggacgccaccaagtggataaaatatggagctcggaaaagattggattcccggccctgaactgaccacacagttgagaggaagttgaggcctagaagagcgcgcaacagtaagccgtgtcggcaccagactctgttggtcctactgacacctccagcgttagaatgactaaggctccactcctgacccaccggccttgaggaaagcgcaaacgtaaaaaaagattgaaaccggagaggcgaatgcatctgtttacgctaggaccacgctcgacgtcggagaaaagcccacacactcacagtttccagacctggctgcttgccgaaactcagattctcggcacctccagcagctggcttcgccaacggcgttgaacaagggtcgcagctcaatgacgtcatatctccctacctacctccagggttccgcctcacgctctatgtcgcgcgcgcgcactacgtcctatggcttgcgcgtgcggcggctgggcaccgccattttggccggtggccgtgagaacacgctgtgtggctgaaaagtgaaggcaagagctgatttggcctctgtgctcccctccgcaaggggatcgttttctccaggtacgtgaatagcccggagaggtttggccgttagctgccatctgccaggttggaaagaatgtagggacgttctccgagagcctttggttaggccttaggtggcg

SEQ ID NO: 32797 - DNA, 2300 bp, Homo sapien
gcagtgatcacaggacactacagactgggactcctgggctcaagggatcctcttgctttagcctcccgaatagctgggactataggtgcatgtcactaccctggcttgatttttacagtagaataaaaacataccagaagtggttaataaactgatttatataaaaatagtgataaattgtaatgcatttaagaaaaatgaacatggattctttgtagaactgttaattaactgtgtgaacacttttaattcaatttctgtatcagtttcaataattggggcaaggggattccctacttgtttttcaatagaaaacctaggcacagtaaagcttggagaggaagattatagttaacaggctcctgcaaacaaagaaggatttgcggatatttcagattcgaagacaaaagtgttcaaaattgacactagaacaatgaccctcagtgtcattcttacagctgagaggaaaaaaggaagtgaggaatacttagaagcatttacagtctaaagccaaaataattgtaacgctgtgtaaaagcatttcaaagactgctgttaactaatgatgtttagtatcacatgaaatagtctaacccatgcttattgtagtttattagtcttacaaaacacgtagaagttaggagtggtacacggctctgatttcaaagagttttaagtttaagacatttagaagaactctaacttaatattgttttctccccctctctcccaattgttagatgctcttccaacaaacaaacaaacaaaaaaactcccttttttaaaataggggagaactaagttctcaaaaagctcacaaaccccaaacagcttttggttcaaatacaggttctgagcctttggttacactaacaaagtattagtgtcaggtggctggtatacaatgaatattctcagaatatgggacaaactactgcaacataaatgccactatcataaatgactagttagcagtcctgttgggaaagagtaaaaaaataaaacatgttatttggacagttcttcctcttatagatttttaccatcaaaaaagagaaaataagcttatgtagttaatgggaggtgggaattcggctttggctgtcattcattcacaatacgtattaaatgcctacaatgtacgaagccctgaagagataataaaggtattctgagtaaagacatcaaccttgatctcaatgagtattagatacaataaaaggaaaaacgggtaaggggagaaagtgcctagtgctacaaaagcgtaccaaaaaaactataggatttctactgggaaactacttgggacaaccccagtcatagctgcgtacacgctgttctgagaaaagcagagtgacatgtgggcatcatttctataaagcctgggagtggacagcgagtattcgacttcatggcggcaagatgccatgactcattccactcaacaaaacgtggaagccacgacttcccacaaccaaatatgcacatgtgacaatatatccattttgggtgctggaggagtgtgggggtactagagagtgctgtaagttctaaaggtgccttcctctccagcaggtttagcttcagggcgggagtggggtaaagggggagtggagactacggcatctaggtccattctcgaagtccctcgcgggtgtggcaggcaacagcggcgacagccgggtcggctggaggggaagaccgaggcgcccccaagctctcggcgtcgcccgcgctccatcagttccagctgtcccgcaggaaccgctgccacgcgctgctgctgtctccgccacctaaggcctaaccaaaggctctcggagaacgtccctacattctttccaacctggcagatggcagctaacggccaaacctctccgggctattcacgtacctggagaaaacgatccccttgcggaggggagcacagaggccaaatcagctcttgccttcacttttcagccacacagcgtgttctcacggccaccggccaaaatggcggtgcccagccgccgcacgcgcaagccataggacgtagtgcgcgcgcgcgacatagagcgtgaggcggaaccctggaggtaggtagggagatatgacgtcattgagctgcgacccttgttcaacgccgttggcgaagccagctgctggaggtgccgagaatctgagtttcggcaagcagccaggtctggaaactgtgagtgtgtgggcttttctccgacgtcgagcgtggtcctagcgtaaacagatgcattcgcctctccggtttcaatctttttttacgtttgcgctttcctcaaggc

SEQ ID NO: 32798 - DNA, 2300 bp, Homo sapien
aaagccatcatcaaacctcaatatgtagaccagattcctaaggctgcaaaggtcggtttttgatagagggaacttaacggatattagtagaagtataaaagatatatcaaaataaacttgttttactttgtgattctttttaatattgaaagaaaatagtaactgtttttggtatattgtggcaggggacagtgggatctattttggaccgaaaagatgaaacaaagacacaggcaattgtatgtcagcagcttggtaagtgtttattttttgtttgtgtgaatatatatttatttattttttgagacggagtttcgctcttgttgcccaggctggggtgcaatgatgcaacctctgcttaccacaacctctgcctcccgggttcaagcgatactcctgcctcagcctcccaagtagctgggattacaggcatgtgccaccacgcccagctaattttttgtatttttagtagagaccgggtttctccatgtcagtcaggctggtctcgaactcccacctgcctcagcctcccaaagtgctaggattacaggcgtgagccactgcgcccggccattttgtgtatatatttcaataggccctgaacttaagtgatgaaagtacacatctttatgtggattactgaaaatctccagtaattgttatatttaaacaattttcaactgaaatagcattcaaacttcaaatgatgacatgcagtatactttttacctggaagaggtgaaatacattgagcacaatgcctctatgttctttgtagatttaacccacctaaaagaacgaaatgttgaagatctttcaggaggagagttgcagagatttgcttgtgctgtcgtttgcatacagaaagctgatatgtaggttactttacaatttttgtttatcttcatccgtattgtagagttttcagttgtgatgctgctaatagaggaatggttttgagagaaattaatagaaatagtatctaagttcctaatttcgaggtaagatgttgaagcagttgtgtatccactactcattttccctgttatattcacaggggaaaatatttatttatttagatagtttataactgataggtgccggaactttttatataaagtcagttattcattatctaagctctctttttttgagacggagtctcgctgtgttgcccaggctggagtgcagtggcgcaatcttggctcactacaagctccacctcccgggttcacgccattctcctgcctcagcctcctgagtagctgggactacagacgcccgccaccacacccagctaatttttttttgtatttttagtagagacggggtttcaccatgttagccaggttggtcttgatctcctgacctcaatgatccacccacctcggcctcccaaagtgctgggattacaggcgtgagccaccacgcctggcctaagccctgtttttatgtgaaaagacttaagctctccagccaggctagcaagctttttaatatctgaagcaagacgcgaggtcttttaaatcactgtagatcactgtggcatgccatgtgaaagagaggagaggaaagtttccttcctttatttagtgtctctcctcccagacatttattgctgctttttccacatttctgccctgttgtccggtgaaggctaactcttctccacaaagtattctataaattcttgaaataccctccaaaaaactatgcttaaatgcagctgacttaagagaaaagctctccaaactacttgagactatatcagaatactttttatgaggagtgaccaatttgtaaattagcctaacctggtagaccctcaccagacctggtgtgtaatcttgctttctgtaattttttccttctacttctgaacagaatacagaaatttttaccattacaagtagactcttcattactattggagatttgtgttgtggttaactcaaaagctcttgatactacagtgctttaaaatagtatgtaaggtagaatgtcttgtctttcaaacttatatttgctttttttttttttttttcatagtttcatgtttgatgagccttctagttacctagatgtcaagcagcgtttaaaggctgctattactatacgatctctaataaatccagataggtaagtagagatctggcatattactgtgttgttttgtttggagatttttacagatttctaaggattaaacactgggactgtcaatgtgatgtacatattttttatcttggttgtttatagctgccacctaaatttacctttctttacctagaacagaggtt

SEQ ID NO: 32799 - DNA, 2300 bp, Homo sapien
actccttttcgctggggtgactctggctttaatgaaaatgttagttccagctcccaaccttgcatgtgcctaagtataggtctcccatgtcaatggtcactttatatctgtgcttctggtttcttgtctccatttataaaagtatcttataaaactatacaggacttaaatgcttttactactagtttggaaggatgcaacaagtaacaaatatatccctagataggtaaattgcagtagtttgttttctatttgatctggaggtcgttagtccaaagtcaaggttctcattttttttaaaaagaaattggcttactacacagaattttgttatcaatcggttaacctgccagttcagttaagaatattcatagggataggaggccttaagaaccacactcatctacatttacatctttttttttttttgagacggagcctcactgttgcctaggctggagtgcagcggcacgattttggctcactgcaacctccgcctcccaggttcaagtgattctcctgcctcagcctctcctgcctcagctgggattacaggtgcgtgccaccatgcccggctaattttcgtatttttggtagagacagagtttcaccatgttggttaggctggtctcgagctcctgacctcgtgatccacccgcctcagcctccgaaagtgctgggattacaggtgtgagccaccacgcctggcctaccattaacatctttaatctttgtaatgctttttactaaatgtgaaaaataaaatataattacaggaatgttatgtatttttaaaggattgcctctaaagccccagtttctctaatgaattcattatagaaaaaccagtttcaaaaactgatgtttatacctatgtctgtctgtagcttttcttagaaaaccctattaaactattctgaggggtccacgtttcatgaagaactcacagattaagttagggtgcaaaagtttatgaagggaagctgtgtttaacttcctctttcatagttacttacattctcatactatgccctagacccagacctaagtctttgaatgaaaagggaaagtttaattattcaaagtgaaaagcaggccctttgtatcagacactttttggagaccgctgacttaatttgggtcactgccatgcacttctggagtgaccaattctgcaagagccccccatccagccacaaacacacctcttactaaccagccccaacactggcttctcttattgactccatggataaacccacgggcatactgccaagaacctaatgtttcctttctccttcctttctccctttcccacaaggttctatattttactcagctcctaaagcagtctcaaaagttccacatgccaactctcgttacctttataacagctcatcctccttcccagcctgctgaccctgttcctagatcactcacttttctgtcaaatacttgaactgaaagaggctcttgtttcaggttcggcctcctgaggaagccaggctaacagaaagttcatattgtatgtaaacaagtattgacttgataatattctttggtaacttttataaagaaaaacaggctttaagaaattgagttttcagagtataaagtaagtatactttgttttcaaaacactcaatttgctttcacctttagccaacataaatatcactgaatgctaaatgtaaaaaccattaaaaaacaatttaatccatattcttagatattctgcacattcccatttagtcattgcagaaaaaaaatggtagcactagctataaaatcacttaaaactagactcaaatacaagtcctaccacttactagttgcataaccctaagcaagtaacttggcctcaatttcgttatataaactagggaaaattacacagtacccatagattataaattctacatggcttttagttgcatgtatgagaattgtcttctagctggaaacatgtcatggaaatcatttattttaaggagtttacaaaaattctcaagatctacatgctatattacctggttaaccctggaaccaaagaatcacaagcagaatcaagagacaaaatttaatatatgcacacagttttatatataatgcagcatcacaccatgtagggcatttactcttattttatacattcagatatgtttgaaacacttcttaaggctacaaaacagaacatagaaaaataaacaggaatatattcaacacttacaaaaagtgatatgataaagaatataaagtactagtttccttttaacacttcaaaagatatgtatatatac

SEQ ID NO: 32800 - DNA, 2300 bp, Homo sapien
ctgaattgttagaaagtagcctttattctctgtccctctagagtgatgtttttaaaggagaagagtataatgtttgaagccttgcctccagtgaaaactgcccagtagtttgatgtaataaagatgttcaggcaaagttagcctacctgttgaaaataacatataattggaaaaaatactcagtggtgagagggttctgtcagatacaggtagggtgaattataaaaggaaaccatcaatattccagaatgtgggtctctgaaatacaaaactttgcttcttttttgcttccaaagaatattactgatgataaatatgcaacagtttcatcaccatcaaagtcaaagaagttagagtgcccttctcctgcggaacaagtaagtatattgttgcatttaacattgaatgctccactctctgggtttctgtgctctgtgtatagggtcatttaaaaacagaaaacatcagtatgggaaatgggagaattttttctggcatcacagtttggctgtggttatgatttttaaatgtattctgatgttagtctagaatgttctctatttatggaatgttatagaaataaccaccattttctggtgattgagaccatttttttgaattgactttgaatatatttatatttgttatcgttatatttgatactttgtattactttggtagatttccttgaaaattagatttttgaagggaaactgaatttctactttatttcaaaatttaaaagagttatctgcatcagttatttcacagatgggagggaatgtactgattgaaaaggtttgaaaaatatacattaaaaaaataccaatttacaaatttcatgatgaacctgtgttctagcagacattttagttcttgactaatacaagagtagagaaagttaaatgttaaatgcctttcaaccaacattcttcatattggtaagaaagcatatagttacatgaggagtttttctaaataatcatgaatttcaagatttcaatgattttgctcacttgccttaaaagtattgtgttgtatttaactctgctagtggataggtgcggtggctcacgcctgtaattccagcaccttgggatgccaaggcgggcagatcgcttgagcccaagagttttgagactagcctgggcaacagggtgaaaccctgtctgtattaaaaaatacagtccttgttggtaggcaacccttggttaggatcaaatttgtttgcatattatctttagctactgtgtgtttttcttacatttctaagactataagggctatttgtacttcatttgtataaaaggcaggcaactcaatatgtatctggtggttagaaatagtgttaaagcaaaatgacctcttgtctttttctgtcttcccccactcacccctttcttgaagaagccagcagaacatgtgtctttgtcaaatccagctccccttctagtttctccagaggtacatctaactcctgcggtgccttctttaccagccactgtgccagcctggccaagtgaacctacaacttttggaccaacaggttagagaagggtttagaaaatctagccagccaaaatacctttctagtcagagacttcaaattcttgagtggaagtttgacctctgagcaggattaggtgtgtggagcctcacagagctttctgtgatactctgctttgctctgcttccaatgtggaaagaccatgtacatttggtgttgtattcatctgacatatgccctcatagtctcaggagcatgatgtttgagctggttgctttggttgctcagcactaattagcaccacggtttgatgcttccttcatgggccagctctttatggccccgtaatgaaccccttgaccagccccatgtcctacacgtgcctgcaagagctactattagaagacattgactcagagcttgtatcctggacgtatttccttcttggtgtccaggagggctcttggttgatactaaaaggtactactttagattggctttatcagttatacagcattctttataggttaatgtaagcatatttgtagagattttcatcttttgtcattttgattccttttcttctcttttgtaggtgtccctgctccaattcccgttttgtcagtgacacagactttgaccactggacctgattcagctgtatcccaagctcatttaacaccctctccagttcctgtgtcaatacaggcagttaaccagcccttgatgcctttgcctcagacattgagcctttatcaagacccactctatcctgggtttccttgtaatgaaa

SEQ ID NO: 32801 - DNA, 2300 bp, Homo sapien
tttgtatttttagtagagatggggtttatattggtcaggctggtctcgaactcctgaactcaggcgatccacccgcctcggcctcccaaagtgttgggattacaggcgtgagcctctgcggccttttttgtaagaccatcagatcttgtgagaactcactatcatgagaacagcatgggggaaaccacccacatgattcaattatctccacctggtcttgcccttgatacttggggagtattacaattcaagatgagattttgggtggggacacaaggctaaactatatcagcctacatctcaacactcattttttgcctacttatttttttttctttatagcagttatcagcatttaacatacttattacttatttagtttttatctgttgtcaccagattgtacatttcatgtaggcggagtttttgttctcttaaatgctagaccctagcacctaataatacagtcatcccttggtgtttaccaggagatttgggactcttgagtataccacaatctgcacatattcaagtcctaccacgggccctgtgaatctgtttatatgaaaagctggccctctgtatacttgggtgtcacatcccgagaatactgtatttttgatctgcttttggttgaaacaaaaaacctgtgtgtaagtggacctgcacagttcaaacctatgttgttcaagggtcagctgtgtacactgcatggcacatagtagacaatcaagttatttattgagtatatgaatgtgtaggtgtgtatgtgacagtgaatttaaagggctaatgatggtgctttcattgtgctgaacattatttgacgtagagtattttttttttttttgagacggagtttcgctcttgctgcccaggctggagtgcagtggtgtgatcacagctcactgcaacctccgcctcccgggttcaagcgattctcctgcctcagcctcccgagtagctaggattacagccatgtgccactacgcccagctaattttgtatttttagtagagatggggtttctccatgttggtcaggctggtcttgaactctcaaactcaggtgatctgcctgcctgtgcctcccaaagtcctgggattacaggcgtgagccaccatggccggctgatgtagagtatttttaataaaagggttgtcgaatctgcctatggatacttttgttgtaaatggattgtgtttttaaacggggcctcatgtgtatattaaaaggaagtttttacattcttttgtaaattcaattattctacccacccaaatttcacagtttatgttttcttattactgagccagttagaattactgttgtctttgacttctgtcttatatacacacatttacatacatatacccttttatatatagatatacttgtaccaaaacttgtatgagctcactggaatatagctctttttggagcatagttctgactttgaagacgtttagatgaggttagaaggtaattacgtgcaaatacctttttctgccccaattatggttatctttctttgtaggagtaagactgctgctgctgctgctgatgtgaatggatttaaacctttgtcaggcaatgaggtattttttttaaaagtggttttaaatgtagttctttaatataagaaagcatgtacattaaaatcttaatttttttcttttttctggtacatttcagtcaagtcaggatcatctactcagaaattgatttggtggcttcctaattttttgaagtttcttttcttcatttgactttagttttacgtgtatctcaaacaaaaatgttttaaaagcacttatgtgttgattggacttcctgactttgtttagcagctgaagaacaatgggaactctactagcctgcctttgtctagaaaggttcttaagtcactcaatcctgcagtctatagaaatgtggaatatgaaatttggctgaagtctaaacaaggtgagttaaaaatctgcattttccataaatttgctttgtagcacttgaaaataagtcaactttatattatactgacctttttttttttaacagctcagcaaaaacgtgattattccattgctgctggcttacaatatgaagttggagacaaatgtcaagtaagtgacttatgtaaaagaagaagagattttacttgaaactttgctttttctaatacaaacagagaaaacagctgaggtgtgaatgtgttgttaatttgggatttcagaatatatttatcatgtatatacattttaatagtttacaagtatttagctttttgactcatttgaata

SEQ ID NO: 32802 - DNA, 2300 bp, Homo sapien
gccggttctgtgggtataaatgagccttggttgtgatccaagagagctgtagaatgcacagctggagcctcccttttcccaaatgctctactcatgctaaacgtaaagggagaaccactcaattggatctgtaactttttttttttgagacagagtcttactctgtcactcaggctggagtgccctggcacgatctcggctcactgcaacctctgcctcctggtttcaagccattctcctgcctcagcctcccaggtagctgggactacaggcacgcaccaccacacctggctaattttttttttttttttgtattttttagtagagatggggttttcaccatgttgaccaggctagtctcaaactcctgacctcaggggacccaccctcctcggcctcccaaagtgctgggattacaggcgtgagccacagtgcccggccaggatctgtaacttttaaagatactttctattaatataaattctcaagaggccttgatggtagtttgaaatgtgttactttaagtgtgtctgagttttttttttttaaaccataaccctttacggtacaggaatatctttatttgagatacccagtaatagaaaagaattttaatctcctttaagcatgttaaataattgggagctagggccgggcgtggtggctcatgtctgtaatcccagcactttgagaggcccaggcgggcagatcacctgaggtcaggagtttgagaccaccctgcccaacatggtgaaaccctgtctctactaaaaatagaaaaatgagccggaaaaaaaaaaaagaaagaaagaaaaattagccggacatggcagctcctgtaatccggctactcgggaggctgaggcaggagaatcgcttgaacttgtgaggcggaggttgcggtgagctgagattgcaccactgcactccagcctggtgggggaaaaaagaattgggagctagctagaaggaagcattggataagaaatagttgtttcaggctgggcacagtggctcatgcctgttgtaatcccagcacattgggaggtcgaggtgggcggatcacgaggtcaggagtttgagaccagcctggccaagatggtgaaaccctgtctctactaaaaatacaaaaattagccaagcgccgtggtagttggctgtaatcccagctactcaggaggctgaggcaggaagatcgcttgaacctgggaggtgaaggttgcagagagccaagcttgcgccactgcactctagcctgggtgacagagcaggactccgtctcaaaaaaaaaaaaagaaatagttgtttcaattcacagctttagaattttggtaaaagaccacatgccagtaagttatctttttgttgaactggttgtttaatagaagaaaatgtaaactgcagagtgagaggatctggatcatactttgtaggttggtactttacaatttagggcataaaaacaaaccccaaacctcttgggatgataccacacaacatttttgcaccccctatgctgcctacttggatgttctttcttgtcttataagcttgatcaccaaggaaagaatgagtgccttaatttttctgaaaccatagtggacttaaatttttacacagagcctctaagtggattcagaattaatgggaaaaataaatcggcctcttacaggctgaaagcctcaaaatacattcctacagaagttgccagtttgtctttttcaatatgtataggatgaagttgagcgtggcgtagcatggattttgttagctcttctttgtgaagagtaaagttattgtggagggaaggccaagggaagagagtgtcctaaatttacaaaaatgtcctaaaggagaaaggctaataaattctttacaaatttggcttaagaagtagtattgtttgtatatgtcatgtcttcgctgtgcttagttagaagaagaggtaggaatgagtaaagatatcgaaattatagaaagggaaatggagaaagactgataatctattggttgtcagattattttgggtgtaaaagaagacattaggttgtaacttttaactaaatgcttaatagtgtgtttgttgccttttctttttaggtattgcactctcagtctcgccatgttgaagtcagaatggcctgtattcactatcttcgagagaacagagagaaatttgaagcggtaacttgtaatttcaaacatgtaatggtgtcttgacttggttttacattttggcttttagaagtgttctagtagaatttcacaggctggatcttaatgcgggttatgaaaataac

SEQ ID NO: 32803 - DNA, 2300 bp, Homo sapien
actcactctcggggttttccttaatcccgctccccccgtttgtcgtgggcgcgtgttcgctccgaggaggcggccgcgtgcggacagccatgcattaggcagggcttccctatgcgcccggagagcgcggaccgctgcctcgggccgccgccgcctgccgccgctcgcggagcccgagccccagcccgagccgccgcctgccccaggccggggcgtcgagcagccggcggcctggccatgtggggctagccctcgccgcgcctggcctgcagcaggaccagcaacatggaggctgccgtcggcgtccccgacggcggggaccagggcggcgcggggccccgcgaggacgcgacgcccatggacgcctatctgcggaaactgggcttgtatcggaaactggtcgccaaggacgggtcgtgcctgttccgggccgtggcggagcaggtaattgcgggggggcggggagggcttcgaggggaggcggggacggcccggcgggtctgggtggggaggcagctgcgggctgtccgggccgcccacggccggggctgcgcgtgccctggctgtcgtcacagcgccccattgtaacgccggagtgggacgctgctttgcgtctgaaaggtgcaaattgaaactcgaaagcccgcaaattaacggggtgtctctctcctgatgaagaggtaatgagttgaggacaacttgtgaggcctgctcggagcttgtacagttgatttattgctggggacctggcgacatgatattttttacttttgttccgcattcaccttccttcccttcgtttgagaagcaccacgctcaccccactccagtaaaccaagtgtttactagaagtggtggatcaaactttacttgtggaacatattttggtttgctgctggactttggaatgtagggtaggcaagctcgcccatgtcacttgaatcaaatgggcaaactgccgtttgagaaaaccagccttttacaaatatagaatattttgaaggatttgtcttgagtaggttccaccctttattatgctctgctgggctgtgtaggtatactaaacagaactgacttttttaaaaaagcctgttttgatgttggtagtagaaagggtacgtgtaactggagcttttcaaaaccattttctaacacagttgctcaggaagatttttctgaatttttttttttgagcgagcttattccatgttatataacactgtgtgttgtaggtgtgcagtcaccaaaacccatcctatattgaaaaatagctgccgaagtagctggataaaagtttctgctctggtgtgtctttcagacgattcacatgtgctttcctttgacctaggacctgctccccacaccccattgcacacccctccctacccgcctgtggggtttttatgatgtttctgttttcttttccctcaccttttttgaatgctaaataacttttaaaatttctatttgtgagtaaatgttttacttaacatgtggaggccagtctgttctcatttttaaacattgaaaggcaagccatttatttaccataggtagcgtaaaatctttctttaaaacaagaaattgatttaacggacacaaaccgttgctttatgttgcggacattgtcattgaaaaattcttccaaaagctccccaaaccaggctctgtccgtttctcattttcagtgttgctgtggggtatgttcacagccacccactgcctccggtccttattgttagtaggtaaatagtctgccccatttgtgaattttctgaatctctgtctgtcctgcttccttggactcctcagcacctccagaagcctagggaagaggtggaagtgaattcagcccgtatttataacgtactgttagacctagcaagagtttggtaagcaaggaggtagaaataaatggcggtaagggaagcttggcgcttacttggatttgagttatcttgagtcctagtttatattgaagcagaagggtgtgcctgatttccgtagtgcataccatagatactcggtggccttgattatacagaagcctcttttattatagtgggatctctgtttttaagtagaaaaggggcaagagctagtttacactaagaactctttgttacatcaggtaacacattttattgtattttgtaatggggtttaggttaggcataagggactacccttcccagttatgtgactcagttttagtctgatgagcttagctgaagaccttgaactttgggggaagttcagttattcagtaggctacagttatagccatcatcgccaaaggc

SEQ ID NO: 32804 - DNA, 2300 bp, Homo sapien
ggatctggaactagaaataccatttgacccagccatcccattactgggtatacacccaaaggactataaatcatgctgctataaagacacatgcacacgtatgtttattgcggcactattcataatagcaaagacttggaaccaacccaaatgtccaacaatgatagactggattaagaaaatgtggcacatatacaccatggaatactatgcagccataaaaaatgatgagttcatgtcctttgtagggacatggatgaaattggaaatcatcagtctcagtaaactatcgcaagaacaaaaaaccaaacaccgcatattcttactcataggtgggaattgaacaatgagatcacatggacacaggaaggggaatatcacactctggggtctgtggtggggtggggggaggggggagggatagcattggaagatatacctaatgctagatgacgagttagtgggtgcagcacaccagcatggcacatgtatacatatgtaactaacctgcacaatgtgcacatgtaccctaaaacttaaagtataataaaaaaaaaaaaagaatgttgcagccctctagctgcactcggctgagtcagtctgtcggagtctgtcctcagagcaggcagagtaaagggacttgaacgagccagttgccagattattctatttcccctccctctctcccgccccctatctcttttcacccttctcccaccctcgctcacgtagccatggcggagccatcggcggccactcagtccccttccatctcctcgtcgtcctccggagccgagacgtccgcatccggcggcagcggaagcccaggagcctgccctgccctggggacgaagagctgcagctcctcctgtgcggttcacgatctgcttttctggagagatgtaaagaagactgggtttgtctttgccaccacgctgatcatgctgctttccctggcagctttcagtgtcatcagtgtggtttcttacctcatcctggctcttctctctgtcaccatcagcttcaggatctacaagtccgtcatccaagctgtacagaagtcagaagaaggccatccaatcaaagcctacctggacgtagacattactctgtcctcggaagctttccataattacatgaatgctgccgtggtgcacatcaacagggccctgaaactcattattcttctctttctagtagaagatctggttgactccttgaagcaggctgtcttcatgtggctgatgacctatgttggtgctttttttaacggaatcacccttctaattcttgctgaactgctcattttcagtgtcccgattgtctatgagaagtacaagacccagattgatcactatgttggcatcgcccgacatcagaccaagtcaattgttgaaaagatccaagcaaaactccctggaatcgccaaaaaaaaggcagaataagtacatggaaccagaaatgcaacagttactaaaacaccatttaatagttataacgtcgttgcttgtactgtgaacgaacatactcagtgtcagcttgagcctgcattccaagctttttttttaatttggtgttttctcccatcctttccctttaaccctcagtatcaagcacaaaaactgatggactgataaaagaactatcttagaactcagaagaagaaagaatcaaattcataggataagtcaacaccttaatggtggtagagcctttacctgtagcttgaaaggggaaagattggaggtaaaagagaaaatgaaagatagaacacctctgggtccttctatccagttttcagcactagtcttactcagctatccattatagttttgcccttaagaagtaatgattaacttatgaaaaaattatttggggacaggagtgtgatgccttccttgtttttgtttttttttttgcagccctcaaatcctatcttcctgccccacaatgtgagcagctactcctgatactccttttctttaatgatttaactttcaacttgatgaataacttataagtgatagtgataattcctgattccaagaatgccatctgataagaaagaatagaaatggaaagtgggactgagagggagtcagcaggaatgctgcagtggccgtcactccctctgccactatccccagggaaggaaaggctccgccatttgggcaagtggtttctacatcactggacaccagttctgagcgttagtttgagaactcgttcccgaatgtgctttcctccctctcccctgcccgcctcaagtttaataaatatggttgtacttttcttattat

SEQ ID NO: 32805 - DNA, 2300 bp, Homo sapien
aagggaggattttttaaaaatttaataaaatgatattaatatacagtccatatttaggtttttataatggtctcatcaatgtccttttaaaaagaatatccaaatttttattatcatttaaggaaataatttgcacaatgggcaaaatcaaattttattgcatacataataatattaatagttatcatttaagactactaggactgcactaagaaaggccatctaggctgggcgcggtgggtcatgcctgtaatcccagaactttgagaggctgagacgggtggatcacttgaggccaggagtttgagaccagcctggccaaaatggtgaaaccccgtctctacttagatgggcgtggtggtgtgtatctgtagtcccagctactcgagaggttgaggcaagagaattgcttgaacccgggaggcagaggttgcagtaagccgagatcgtgccattgcactccagcctgggcgaccgagcgagactccgtctcaaaattaaataaatgccatttttgatttttttaaaaattaacgactttaaaatgacagtttatagctcctcctccccattcaggatccaatcaaggtcatatactgcatttcattgtcatgctttttttttaatagcttgaggtaaaattcacataccaaatgattgacccatttaaagtgtgcaatttaatggcttttggtatatgcacagagttgtgcaaccatcaccagaaactagttttagaacaattttgtcaccccataacctttagctgtcactccccaggttcctcatttccccaaccctatgcaaaccaccaatctactttctgtctccatagccttgcctactctgagcatttcacatatgtggaagaatacaatgtgtggtctgtcttctttcccttcacgttttgaaaggttatccatgtagcatgcatcagtatcagtacttcattcctttttatggctgaataatgttctcttgtatgggatactttatactatttatcaagggagggttttcaacagaggagtggcctgatccgagtggcatttaacaaggttcactttcctgttgttctaaggagcagagaatgatcaactgcgtcaaacgctgcttttagggaaaataagatgaggcccacgaattgaccagtaagtgctcaaataggttaagggaaaaaggaatttaattagaagacatattctgatatacattgctgggagtgatttttttttttttttttttgcttcatgtgaaatttattcctcaaaaaaaaatcattttttctaaacgtaactcaacattatagtaattatgcaagattttatgcagcttcaagagttagccaagagaaaagttgactcttgcaagaagatattttcaatgtctatgcagatcaggtaggtaagagttaagtgcgggggagttggcatcatctaaaagactgtagaaattggaccaaaaatgtggagttctaaagcagtatctccttatggcatgccattatttggagcaacaaggttacctactcgaatcactggatcctgagttgacacaaaacgcatctgttgactcagggtttgtataaccacgtgcagtatttactaggctatccaattctgggtacgtacaacttctggggcctgcaaattattggagagtgagtgaggggcaacgaaagatagacataaaagggcgcgtctcgaaaggtaactgtcaacatgcactccacgtttatagaacgattcagtgggcgcggtggaagcgttaatgaacatttcagaaaataaacatatggaacatcgaaattcacttgcagataatggactaagtccgctccaccgggactaaaaaggcagggttaggaaagcctgaacgccgccacactgttttttctccaggaagaaacggggcgtggggctgccggtagaagggggtggctccggccgctcccccgcgccgtcctccggccccggccgcgctgcgctcacgccggccgggccgggaatttggagaggatccctggtcgcgcggcagcggcggcggcgcgcgggtgagcgggtgagcgtgtgagcgggcgggcgggcaggcgagtgcgccgggtattggcagctgaggagtggaggctgggcagctccgactccctgacgccagcgcgaccagatcaatccaggctccaggagaaagcaggcgggcgggcggagaaaggagaggccgagcggctcaacccgggccgaggctcggggagcggagagtggcgcagcgcccggccgtccggacccgggccgcgagaccccgct

SEQ ID NO: 32806 - DNA, 2300 bp, Homo sapien
gggttttcaacagaggagtggcctgatccgagtggcatttaacaaggttcactttcctgttgttctaaggagcagagaatgatcaactgcgtcaaacgctgcttttagggaaaataagatgaggcccacgaattgaccagtaagtgctcaaataggttaagggaaaaaggaatttaattagaagacatattctgatatacattgctgggagtgatttttttttttttttttttgcttcatgtgaaatttattcctcaaaaaaaaatcattttttctaaacgtaactcaacattatagtaattatgcaagattttatgcagcttcaagagttagccaagagaaaagttgactcttgcaagaagatattttcaatgtctatgcagatcaggtaggtaagagttaagtgcgggggagttggcatcatctaaaagactgtagaaattggaccaaaaatgtggagttctaaagcagtatctccttatggcatgccattatttggagcaacaaggttacctactcgaatcactggatcctgagttgacacaaaacgcatctgttgactcagggtttgtataaccacgtgcagtatttactaggctatccaattctgggtacgtacaacttctggggcctgcaaattattggagagtgagtgaggggcaacgaaagatagacataaaagggcgcgtctcgaaaggtaactgtcaacatgcactccacgtttatagaacgattcagtgggcgcggtggaagcgttaatgaacatttcagaaaataaacatatggaacatcgaaattcacttgcagataatggactaagtccgctccaccgggactaaaaaggcagggttaggaaagcctgaacgccgccacactgttttttctccaggaagaaacggggcgtggggctgccggtagaagggggtggctccggccgctcccccgcgccgtcctccggccccggccgcgctgcgctcacgccggccgggccgggaatttggagaggatccctggtcgcgcggcagcggcggcggcgcgcgggtgagcgggtgagcgtgtgagcgggcgggcgggcaggcgagtgcgccgggtattggcagctgaggagtggaggctgggcagctccgactccctgacgccagcgcgaccagatcaatccaggctccaggagaaagcaggcgggcgggcggagaaaggagaggccgagcggctcaacccgggccgaggctcggggagcggagagtggcgcagcgcccggccgtccggacccgggccgcgagaccccgctcgcccggccactcgtgctcccacacggacgggcgcgccgccaacccggtaaaacgaaacagacccgaaccgaactttcccttcatgccgcgtcccagccctcccctcggcgccccgggctttccagcgccgccgccgccgtctctgcacgcgtggggccgccgcggtcgtgctgggctgggggcgcgggcagcggcgggaagggggctctttctgcgcggggcgggccgcgaccccccccccccatgatggcgcctcccgtctgctcggaggagcgaacctgctaccacgtcttctcgcgcccagcccgccgggctcccctggtgtctttgttgggtcttctgctgtgggaagcccagttcccgggcccccgagcctcggctcccgggcctgaccgcgctgggatctccccggccgcgctccccttccgcgcgctcctcacatctctcccgtgctgccgccgggccgaggcccgttcgcgtggcccgcggacccattgtgtcccccgcgccggcggggcgacccctgcgggagctggaggacgaccgctggcgctgctctccaaggcgcctggtggagcgggtctcgcgggcgggggaccccggcgccccgggcccctccacatcccgcacgggttttcttctcggccccagcaagcctctttggggtcgaggtcaaggaaagttcgcaccgagatcccctctaatttattcaaaggtttggcggcggcgcgtaattttttccccctcttccgcctacacccgctgcgtctcctggtgtctcgttcctttccctttaccggagtcgattgcctcactgcatgtgtattcgtgagttcgcggttgaacaactgttcctttactctgctccctgtctttgttagtgtttctcggggttgtttctgtaggaaggtgggggtggtgggcgtgagagacagatgtgggcttgtttttctagttgctgaaactgtatgaaggctttaaagggagaacgttttcttgatgtgctttagg

SEQ ID NO: 32807 - DNA, 2300 bp, Homo sapien
tttataaggtccctaaggccaagttaaattcaaactcacatgaagcattcagtacacatatcagagctgcaaaggtccttatcagcatccctaaagcatctgtttctcctctaccaaatgaaaagctacttatacaattcagattgaatatctctgcatttatcttaaatttttctacagaaattcatagttctgtaagccttttccctctttcacacacactggtatccctggccatctcagcctttccactataaacaaaacccatgtaccacccatatctgaagtataacgccagactcctgcttagctacccctgtaatatggtttaattatgatgactgaactaataggctgacatcatagacttttacaggctgaccccatgtcatcctgatgtatcattttgcaccagttcagtgctgtaaatcaatttaagatctcaagcaggttgaaaaggctggtaatgatgctttctctgccgtctctggagactctacattatacccaacttacattatttataaagcctcagtgatgcctccattagccttgtaagactacacaaatgagatcttttatacacacacacttggccttgattatgtaggctactgcagcttaaacatgctagtctaattactatacccaagctacttctttttccaatctactaggttattagatttaatatttaacccagaattgctagaaatcaaaattacaaagtgaaatttagtttttaactaataaatgtaataaacgtagttgagaaaatgtgacaacttcctcttaatgccttaatgaacttagtaaaaataacataaaattccaagaagtgtaagaggccaatgtctttaattgcctaaaaattgtcatttctctaaaacacaaaggtcatcagctcttcaaggatacgaaaccaaaggatactgcaagaggtaaaatgtatttggttacatacctatggttgtaggggtcaaaactaaatcaaggacaaatccctaccctcagaagaaactcgatcctgcctggatcctctagaggctctggcatcacccacctccagaaaaatcatctctcacgaccctagctacaccttcctaagaactgcagtattacaccaatgatacaccacctgcacagaaatagcaaataattgcaaatgggaaagagagtgggagagggcagaacaaacactttaatcagtacagcatatttagatctggcacctacatcagaataacactgatgcaacaatatttataccaattgaaaatgctggggcagtgaacacttctgttccgattcttttttaacacggtccacctaccttcaatacaatttaaagtaattacaaacaatttgaaaaatcaacatgggcagggaacagttttctcattgtgttactgaggtgtgggcaagttatccacaacaggcaattagacccagagatgttctgaaatagaggcattctgagatttagcggctgagagtttcagcaacaggaagaaataacagaaatcatgcaacttctgtatcattccacgtactttgaaacttcagatacaatggaaagaaaagaggggggagggcagagaaaaaggacagttgtctcagcactcacgaaaaggatgctttctcaggagatggttctgagaccggcctcaattttcagaaggaacgcgcctttactggttatcttgcaccgtgtatttaaaaattgcatgctcttcaaaataaacaaaagctcagctactgtagctgtgagatctggcaggcatttgttcctcctcccctcctaaagcacatcaagaaaacgttctccctttaaagccttcatacagtttcagcaactagaaaaacaagcccacatctgtctctcacgcccaccacccccaccttcctacagaaacaaccccgagaaacactaacaaagacagggagcagagtaaaggaacagttgttcaaccgcgaactcacgaatacacatgcagtgaggcaatcgactccggtaaagggaaaggaacgagacaccaggagacgcagcgggtgtaggcggaagagggggaaaaaattacgcgccgccgccaaacctttgaataaattagaggggatctcggtgcgaactttccttgacctcgaccccaaagaggcttgctggggccgagaagaaaacccgtgcgggatgtggaggggcccggggcgccggggtcccccgcccgcgagacccgctccaccaggcgccttggagagcagcgccagcggtcgtcctccagctcccgcaggggtcgccccgc

SEQ ID NO: 32808 - DNA, 2300 bp, Homo sapien
tttcaaaggataataaagacacctgaaaaattcctgacacttatagaaaccacagactcacagaagattatacactaaagacgtagggttaaaaatgcataaaaacacaaaggttggaaaaaccatattatttcagcaatttaaggccaataaatattttaaaacaataaagagcaatccatcattgcttgcatctttcaagccatcttgtaagcaaagaattgcaatgagatttattggtaaaatatgaaaaattcacaaaatggaaaggggatcataatcatttgccctaaataaaatcaggctgaattaatcagaagtccagaagaactgggaacttacaaacttttgataaagctgaaataactattacttaaatgtggaacagcagacaacccacatgagacaatggcccagcaagagggctgaggcagaaactgccatccgctcacatttccaaacagagaaatagtacccctaaaaaacagtacccctaaaaatgaagacaggtggagacagaactctagaacaagtagaacacaacgataagtagcagacagtaggaattgtaaatggttcctaacaaaaagcatgaaagattattgtacagctccttaaggaaaatgataaatatctacccttaaggttaaggcagacaggcaaaagacaagttaaaatttgctatacaagtccaatgccattacaatgaatataaaaacagaaatggatctagttatttcagttccagaaaataccctaaagtagcaatgttctttgatctggttcaacaaataatgttcaaatgcttctttaacccagttactccagttaggagctaaccaggttttcagatacagtaaagtccttacgggttcttggaaactgtggctctaagtgaaacgatgtaaaacaaaattaattttagcatcagctaatttatataaacaagagttaagttccttcaggacatttctggtcacaaaaacattaccaaacttctgagacccaaaacacttctaaaattaacactgaaataaatgtgagccatatatacatttaagaaagatgaacagaaacaagataattatttacccaattattccaattcagggtcgcagtggcccgagccgatcccagcagcttagggcacaaggtgggaaccacccctggacaggacaccatttcatggcagggcgcactcacacacacacctacatgcactgcaatggggacaatgtagacatactaattcacctaacgtgcacacctttgggatatgggaggaaactagagtagccagagaaaacccaagcagacatggggagaatgtgcaaactccacacagacagtggcctaggctgggaatgttttttctcatcaacgttataaggaaatggcattgaatgaaatgaggttgtctgaggacctgctgtatttgtattggaggaggaaacaggtgaagtgcctgcattcctttttcctgttttaaaacagcagttagccctcaactttcaacatttgtctcaatctcaaatgagtcaaatttagctaaataaaactcaccactaagcaaaataagggaggaaaaaacctctagaacagaaagaaaaatgaaaatggataaaaccttgctctttactgatgctaacgtacttcataaagtacagcgcttaacttcattgctaaaaaggctataatgaactctatttcgctttagtccttaggggaaaaatgtatttaaaccaaattcctacacaagaaagccatacggagacccacagagaacacagaactctgctgctctcagttcacagcagcaggagagtcctaccatcacaaacaccacaagtaaagttccatcttactgagcctcttactattcagccttgatctggctacttccaaacatgggactgatgatgcagaatagctagtttgacatttttcccactgaaaatttatttttgccggagactgattttctaaatctggagaaattgggggttggagataggagagaggttcagttcgtgaaattctatttatagtgatgcaataatgcaggtactattgcctttaaagcgcagacactgtgcgtttaaagcgcagacactgacagcaagtcttccagtctctccagtataacttaagtgacatgccagcaagagatgcaatttggtccctcaacagtgttaagtgagtagaaatcttaggaatcaaaaagaaaaggaataccatgtagactgaattccagcttactacttaccacttgtaagttcactgaagctgtgaaatttcag

SEQ ID NO: 32809 - DNA, 2300 bp, Homo sapien
ctaaagtcatggaaaattaacagttcaaatcagtaggctataatgaaacttggtgaattttctaaaagcccatagatttaatgcaaaagaccctgaagctccttttcttaagaagtccagtgaagctttcagaggttttccatctatcagtgaaactgaaatgcagaggtcctctcaaagcagattatattaaagtgtgcttaaaatactcttctgattgcttttaaacagcatgatcctgcataggcaaacagcttctggaactggcatatagtataattcttttcctcccactgaattttcacaaaaatgtatatgattgtggcatggttaatacttttcagaaattgtacatcaaggcagtgcctgtagcctttagtcttttaatggggagattgaaatgacaacttgatctcttgagaatttcagtacagaagaggatacgtgttttgagcatgtatgtttactaagggttaagaaataacttctttaaaaactttgtagctgatacgcccccacctgcttacctgcctcctgaagaccccatgacccaggatggctctcagccgatggacacaaacatgatggcgcctcccctgccctcagaaatcaacagaggaggtaaaactaattgctgcctgttcccttttttagagtctaaagtttgtccagatgttactttctctcacaaatttttattagtctttaaaaagagagctacttgagaaaaatagagtccaatgttaagagaagctcactacaattgctggataacaagtaagtctttaatttaaagaacaaatacactgacttaactaatgaagatctgagaataattttgcagttatctgtttagatctttaatacttaataatttttaactgatgatgaaaattttttttttgtttttttttgagacggagttttgctctggtcacccaggctggagcacgatcttggttcactgcaacctccacctcccaggttcaagtgattctcctgcctcagcctcctgagtagctgggattacaggtgcacaccatcacgcccgactaatttttgtatttttagtagagacagggtttcaccatgttggccaggctggtcacgaattcctgacctcaggtgatccgcccaccttggcctcccaaagtgctgggattacaggcgtgagccactgtacccagccaaaaagagtatttttaaatgaacaaaatggtatttagaaacaataagtataacagtactgaagtagagttttcactggtgatttccaaagttggaagttggtataactgggctgtccaaaggctttcttctgtaattaggatagatacacataaaccccgtctgtttttcagctcttatgtatgtgcaactacaactggaacaaactaatagaatttcttgctatttgtttctaactttgttactaaaaggaattgaggcacaagtttttccccttctcagcctgaagaacttgcaagcagaaatgaaaaatttctttccccctttagtaaagggtgggtctttgattccagcgctgtatatatccttagcagtgaccgagtggaggatgccatcattcttccagctctacataggcaagtaggatagacttaagtgagcagagaactcaggtaaataagttcggtagactctctgagaaatctgttagaatccacagccaccctggcaaataaaactgctcctaaataacctctcatgaaagaaagtgctttgctgctgcactcaacacatggcatgggtcatgcaatttatataatgtttatgcaaattgaagttaaagtacagtttggttactaggtatgtcttgtttcattttagtgcttttttattaaaataggagatacttattaaaataggagttgcttatatttttaagtacttaaaattgattttgtctctatgacacattatacagtggtaactgcatgtcattatacatttatccaaacccataggatgtacaccataagtgaaccctgacgcaaaccgtagactttggttgtaggtctgtaggatgaatgtcggttcatcagttaaaacaaatgtgccactctggtgggggatattaataatgagggaggctaggaaggtgtgggggtggggggcatatggaaaatcactctgtcttatactcagttttgctgtgaacctaaaactgctttaaacatcgatttaaaaactggtgatgaaggctgggcgcggtggctcacgcctgtaatccctagcactttgggaggccgaggcaggtggatcacctgaggtcaggagtt

SEQ ID NO: 32810 - DNA, 2300 bp, Homo sapien
caacacatctcccagaaacaagaccaatgtatatttgtcaatatgatgtcattttaagtgcaaacagaaatatacaaagatatgaggtcattttatgtgaaaacacaatatatttctgtgtcttactcatcacttaacagattatttcatctgatgtcttcattttacagatgaaaaaatccgtcccaaggaagctgagttgagttgcccagggtcatatagtcatctgttgacaaatctgaaactaaaatgtctcccaggtctcctgatgcctaggctggatttaactatctttcacgattaaacctatctgtgtaataacagtatacatacatatttataaaatgcacaatggcccttattgaaaattgtgctcctcataagtcagatcctcctgaaaaccttcacctatccttcagacttggtcagctaccccttattcactcttacagatgtatgtattgtttcagcaaagcagtaaccccagatgtaattttacatttaattattgtattagtctgttttcatgctgctgataaagacatacctgagactaggcaatttacaaaagaaagaggctttttggacttacagttccacgtggctggggaagcctcatgattatagcagaaggcaaggaggagcaagtcacatcttacatggatggcagcaggcaaagagggagcttgtgctgatcaaaccaccagattttgtgagatttattcaccatcacaagaacagcacaaggaagaccctcccccacaattcaattacctcccaccatgtccctcccacaacacgtgggaattcaaggtgagatctgagtggggacagagtgaaaccatattaattatataatcataagattgtaaactctatgaagccaagaaatatgtgtgattttgttcaccattatatctcaagcacttggcatagtatctggcatgaaatagatgcttaatgaactatttgtttaatggatgttgatcatttgtgttggtgactttacaaggttaacatttttttccatgttgaggacatgggcaaactgtcctatggcttgtggctgtgatgatgcatggcagcactggggtgcttccgactggtctgctaaagactattaataatttttctatatctgccaataggaatcttatttatttttgtctgtggctgtgtttcctgttcttcagggcacagtgaagccccatttgcctcaagttgtttttctaatgattttcctttgcccatatcctgaaccaatttctggtgtatcaaatttccacagaagactgtactcaagatggcagaccaaagcacacatgctgatctacagctccccttgagagtctattaatattatagtaatttaaaatgaaaaaaagaattttccagcaataataataataataataataaaatggcaagggacacttccactgataagagagctcaacacatttctgaaatgtgtgaagagaatggcgagtgttggccatgaagcagacaggaggcaggagccacctagaaaataggcagtgagggctgcagctgtggtaaggagactggaaatgacatatcacagcacagaaatgagaagtgaggcagagaacagaaggattaatatagagtacaattctcccacctccctcccaattccatcagaattgcttgcagaactgtgacaacccagcaattactccaagacaaagattcttccccaacaaactctctgggaagaactagggcagccaccacggagcttagaaccctagagcaaaaccctgataattttggccttagggatcccctaacaatggctgtgaagggaaacttgatggtcagaaagtccctttgcccatattcagagcttctaatcagcctttctatccctcattctttaggctggccaggagactggggcagaatactagagaacaagtacagtataataagatagtaacataacaaccaatccctaattaatgtcagagggcgtatttcccactgcctgacatctcaggcgcctacctcttgcccacttcacccacagtcagtgcaaatggagcatcaacttgactgctgtgtaagggaacccgggaaaaaggaccattttgccagtgaccccaattctatttgagtgtaaccacccactgctggggattgaggctgttgttggaaatgtcctaggttttatttcctcattgcaatttcctggcagccctgctccaaggctagatgaaatcttcactcttgccagagccattctcaataaacatttgctgaagaaatgcttgcta

SEQ ID NO: 32811 - DNA, 2300 bp, Homo sapien
tctgtgtgagatgagcaatgaagaacagtaagtactttcccaactagttgataaattaacataaacatccataatctggcaacaatattcttttggctcctatccctaaaaaaagccagtctgcaacatccaaaacatttaccaagacgaggaaattgcaatgattttcttgtacgttatggagtattaatttgctgccacctgctgggaggcagaaatgggtttccagcattgctagctacaatttgtcctcaactatttattttgaaaattttcaaatctatagatgagttaaaagaacattcatatactattcacctgaaactaccaacttttttgttgttgttgttgttttgtttttttgagactggagtctctgtcgccaggctggagtgcagtcgcgcaatctcggctcactgcaacctctgcctcccgggttcaagcgattctcctgcctcagcctccggagtagctaggactacaggcacgtgccaccacacccagctcatttttgtatttttagtagacatagggtttcaccatgttggccaggatggtttcgatctcttgacctggtgatccacccgcctcggcctcccaaagtgctgggattacaggcgtgaaccactgcgcccagcccaggttcaaattttttaaatccttaaggctatctagttgacagctgtctttaatgtagatcagtcctcctgcctttttttattgtcttccttattaaccttattgaaaagtccgaacaaatcacattcagaatttatctcagtgtttcctcacaatcagattcaggttaaacatttttggcaagagctctacaaaagtgtatttcccatagcctcataatgacaggttcatattttcgccagtattggtgatgctagcaatttttttcccatgaagaatctattaacattttgcaaaacactaatgttccatggaaatgtgttccctaagctgtactgtttagaaaacttctgaataaaaaagtgacatgcatgaaagtgtttgagtttgtagaacgaaaagcaggtaaggataaactcaattttaaaattaacaaacttcttcacttctaaggtagcacaaactgagctttcatcaaacgtaacccttaccgaaacaattgttcagatgagcaacgccaagtttaaagaaaggaagtaaaccgtctcaagaactgtcaatctgtttgtgttcgataggctgagatttgaaaggtttgattctgtgttctttctactagatcctcggcttcatttagacttgtgcttaattttctgtcattggctattgagtctacaatcaatctttggagtaaaagtggtagtcttttggtccaaatagtaataatgaaaatggtgagaccagtaattcattttttattattctgtattcagtaagaatcaacctgtatcaaatagctgaaaaggcctgaagcctcccaaatgcatatcattacacaaattctgtgtgaggactgacatcttggtttcatatactaattatactgcatgggccccatttataaccatatctactcgtcatttgatcctggctactgccgatggatgctatcttcatcacattatagcaaacatttgggtgattaagtttttctcaaaaattctagattagcatacaacggctttactacttatatgtcatctaagacgttttttaagaattagttactactacgcccaacgcagtgaggtagcaaatattatgcctgtttattttcatctccatttcaggcttgcgcgcctttcccccctcgggacttcccgaggacacccctgcagcagtgagcccgagtcctggctttggctgcatgttaagaaatattaatcaaaatgaatgcgtgccctttaagagaaaaaaactgtgggtccttcagcctttaaaaaccatgccgtggtttaaaaacttaaaactatatttcggcagaacgctgagcatttcttcaaatcactctgagaagcttgagtgtctttaatttcaccggtctgtcaaacgtaacgcgtctctccctcaccccacattttaagtttccaaggagcggaagaagggcctccgggggtcccggccgccgcaggctgctgggggtgaggacacgactcggcctccgtccgactcgagggtgtcgcgaaggccaggagggaacgaaagttaccctcgaacttcggaggcgaaagatttcatgtggatcttaaaaagggcaaaacctaccccaaaggccgtaaaccgccctcccctcccccgccagagaacttcccggcgcagag

SEQ ID NO: 32812 - DNA, 2300 bp, Homo sapien
aagtaactaattctgttacagtaattatggtaatttgttacagcagccatagggaactaatatattaatagaaggttatggtataatggctggaacataatcaaatactattgtcatcaccatcagtaccattgctatagtcaccattactcttatcacctatcatgggacctgaaaagtagtatgttcttagaaaatagtggttgaataaaaatacagttcttgcctgtgggattccagtctattggtagtggtagtgctgctgatgagaattgtgcttaaaggtggtattgaaagagagcttccaaagtagactccctcttaaagttttgttttaaatgtctttttgtgtgtttgtgtgaaaggtgacattagatcttttaaaattgttttttagaaacacttttatacatttttaattgtccttttagaataaggctaattttgtacaaatagacattataatgcaccccccaccccaccgccccatagagaaaaagttgttgtttttggaaaactgatgagcacttatagttctaccagtttaaaaaatcttaaactattcttttttccctaatagaatgttaagaagctaaaattaatttcatgttcatcggccttgaagtgccatttacaggtataccttggagcaataatttattccaccatgccacaaggtgcttgaaaatcaaccaaaatttacaaatactcataaacccaaactgggtgagttatatataactgtaaattttagtttgctactggaagaattattaccagtgtttcataacttggtgtaattaaaataaaagctaaggttaattgagctcttactgcatggtagacactgttctaagctttttacaagaattgtcattttgctctcacaaccactctgctttcttacctattctctttactcaagaggaagctgaggcacagagtggtcaagtaacttgcctaaggttattttggcttaagtggcagagattcatagtgaccgcggctcataacctctgcactgccctgactcggcataccatgtcaactttcattttttaatacaatttgaagtagagaatatcagtatatcatcataaaaaagatccttatggccgggcgtgggggctcatgcctgtaatcccagcactttgggaggccgaggcgggcggctcacgaggtcaggagatcgagagcgtcctggctaacacagtgaaaccctgtctctactaaaaatacaaaaaattagccgggcgtggttgcaggtgcctgtagtcccagctactcgggagactgaggcaggagaatggcgtgaacccgggaggcggagcttgcagtgagccgagatgacgccactgcactccagcatgagcgagagagtgagactccgtctcaaaaaaaaaagatccttatctaatttcgtagtggttcaaactttagtgtgaatctacagggattctgattagtggggctgggaatgtgcattttaaataagcacccaggtggctctgactatgctttgagatacacctacagttcacttatggcttgtttgtgtgctttaagttaggctactctttgcatacatctgtgttcaaggatgagtctactgaatacaaacatgtatctaaacttacacctgaagtgcccaccgtagtaatcacatttctttttgtagagagtgaatacaaggccagcatcagagagattcatttttttttttaaccttttgtatgagcttcagaatctggtgtattgacctgaggaaactgttaagacgaatttaagagaaagcataacataaagtttctaccctagtggtattttatatattgtttttattagaagaaaaagtgtaaattccacttcgcagtagagtagtagttccattattcgggttactctgaatattaactgtggccatggagggagtcttctcttttaagtttatttagtaagaaaactttcacccatttgtactaccaaaaactctgattatgtgtggtttagaatatgggggaaacactaggctttcaaattttactacttcagtattttagttatatatcgaactggctaacatgtttttctttcttctagggaggtcacaatcacattgagccaaaacgcatccagtgttttctccagttacaaataaaacgaatatgcccatgctgctaccacatcctcaccagcatttcctaaaaggccttttaagagcacctttccgatgttaccacttcatctttcactcaagtactcatctcggatcaggaatcccatgtgctcagccgtttaat

SEQ ID NO: 32813 - DNA, 2300 bp, Homo sapien
actgctggtaatagacactgcagttttcatcagtagaaattttatttagatctttttaatatcatccatgtctctacttaacttcttgaacatatgaaatacagtcaccactgttttaatgtccttgtctgcgaagtctaacaactgtgtctgttctgggtcacctttgattggttgattattctcaattcgaattgtgtttatctttttgcacatctgatcacctttggatgcagacattgtggtttttaccatgttgggtgcttaatattttatattcctatacatactcttgacctttgttttaggatgcagatagctacctggaaacctcgttcctttggggtcttgctttcatgattctttggcgggtctagatcactaggcagtgatttatctaggtttaacccactactaagagacctttcttagttttctacctaatgccctgtaaattgtgtttttccaatctgactggtggaaacaggcattatttctagccctctctaagtgccgggcactgttctctaagcttttcaggtggcttttccccctccaactatgggtagtctcttcacccccgtgctctgatccatactttgctgaatactcaagggggaccctctctgtgtctctggggttgttcttctgtgctgccccttcctctctgatactccgtcctgcaaaatctggtcagaccctcagctctgtatccgccactcggagtctgtcaggttccacctggttccttctctctgcaatgaagcctggagagtctcaaggcaggaaactgatcagtcatatggctcacctcttttgtttcctgtctctcaggggccacttttcttcattgcctaacatccagtgatatgaaaactagcatttggtatattttgtctgatttttttcagttgttagtagtaatggtaaacccagtccctgacgcgctctcttgagtagaagcagaagtcttctgacactagattttaatggtctgctgacttgtttgtatctggctttgagggagagggtcccgagtactgatgaagagcatggaccctggagtcagacgaactcaaacctcttctccaccacttcccagccatatgatctaggccagattaacctttctgtgactccattccctcatcgtaaaatggggctgataacagttgtgccacacaggatttttgaaaaaacaaaatgagataatttaaagtataatacagttcctggaacgtggtaacatgtttagtatgtcttagctattactgtcgttttattttaattcatgtaagaccttaataaacacttgtcaaattaatgaatgcctgctcttggcccccagtaccacaaaggaggtaggtgccttaggacctgggatcccccagcagtgggggagctggggacatgagcctgtgcccccagaatgatgatgcatccatgagactcaactcgtcaccctcagttgctataattctgaggattttcatctcattaacagactgggttatttgcttatttttcaggggaagacaggaagacccccagcgaatcaaatagcccctcttcatcctccctctcagctctgagtgattcagccaacagcaaagatgattcagatggctcccagaaaaacaagggcgggaacaatctgctggtcatctctgtcatgcctgggagccagccctcactgaacagtgaggaaaagccagagaaaggtaaggaggaggtgggtgtgagcctgctcaaccctccgcacccaggatgacccattcttgagaataagccctgcacaggagcgatgtcaaaaactgataataggcccaggatgcagtatgctgggcctcacctaaaggttgtatttcttttggcttaatttgaatccgagtatggggtggaaggatggggagggtgacattgattccgatgtttgtacatttaactccttttagcacagagatatggggaacagtgcctggaagggtatagctgtcaggcgtcggaggaggcgggaggaagtggggaggagcttggctccactcctgccctcctctccccgctgccctgtgcacctctatacccagcttcggtccttgcagggttcgaatgtgttttttgcaactttgtctgcaagacgaagaacatgtttgagcgtcatctgcagatacacctcatcacccggatgtttgagtgtgatgtgtgccacaagttcatgaagacccccgaacagctgctggagcataagaaatgccacactgtccccaccggtgggctcaagtaaggaaagcaagtacaga

SEQ ID NO: 32814 - DNA, 2300 bp, Homo sapien
tgtatttgacgttcacccatgtcatgctttccagggaaagcatagctttttggccctcccagcttctaacaatgaggtttccctgatgacatctcctgactgtcccacagatcagcacttcctttacactgcttcttgctgtttgttttatctgtgtacctgtgtgtctgtctgcctgtctgtctgtctatctatctatctatctatctatctgaagtttcctaggtctgctgtagcaagttaccacaaagttggaagcttgaaacaacagatatttattctctcatggttctggaggctagaagtctgaaatcaaaatgttggtctggctgcactccttccagaggctctaggggaaaatcctggcttgcctcttgcagcttccagtggctgcagggactccttggtttgtggctgcatcactccagtctctgtctgttttcacatggccttttccactgtttctatgtcttgtcctcttctgtgtcttattaggacacttgtcattggatttgggacccacctagataatccaggatgatttcttcttgagattcttgacttaatcacatctgcaaggacctttttttcccaaataaagtcacattcgcattcacaagttcccatgattaggatgtagatgtttcttttgggggaccacaattcaacccactactctatctgtctgtctatcatctatctgttcaactatcaaaatcctctttgttttttgtttcccagtgtgctgagtacacagtagttcctaattattattattaatttgaaagtgtggccttattttatagcgacccaagttattttctgggctaattgtcccaccttgtttcaaagatgttttatcattaactctaagcaatagatggacatagacactccacccttacaaaacaaatatgtgtttcagactaaagacccagcatctaatagccacacctaaatgacacacagtaaattgtaccattattataacttgtaagattgctgtttttctgggtgttgctccttgggctgcagttaacttcctgcgtggtcttccatacacctccagcaaggtgcaaatgtctccgttgaattgaccctatttatccttgattaatgtatgtgccctagaagagagaaaagcaattggtcagagctttaaaaatagagggagaggccgggcgcagtggctcatgcctgtaatcccagcacttttggaggccgaagtgggcacatcacctgaggtcaggagttgaagaccagcctggtcaacatggggaaaccctgtctctactaaaaatacaaaaattagccgaatattgtggcaggtgcctgtagtcccagctactcgggaggctgaggcaggagaatctcttaaacctgggaggtggagattgcagtgagcccacatcgcaccattgcactccagcctgggcaacaagagtgaaactacttctcaggaaaaaaaaaaaaatagagggagaaaaccataatattaagatgcttgctcttatttgattcactgaattgaataagttctaaagcaagaacaaacacttaccgtgtcctctctcagttctggaaacagtgtggtagagaggaaggggcacatgtggttggtgagagaccttggtcaagaaacataggctccagcttgcaggccaaggcctggccctgctaccatctgtgatctcgaacaagcctctgagtctctctgggctaaaaaaaactgaagtctcctaccttttctggtattagatgattgagccaatggttttcaaactatggtccagtgtgccgtgcacgctcatttttctcttccctgccacaatctttatggttttctctgtgattagaaactgggtctagcttggaattaagaaatggtggtgtttttgtttctcttcattcacctacttgcagcggaaagctacaaggaaacacagatggtgaagattaaagaggaacccatggaggttgacatccaggactcccatgtctcgatatcacccagccggaatgttggctacagcactttaatcgggcgagagaaaaccgaacccttacagaagatgccagagggcagagtacccccagagagaaacctcttcagtcaggatatctctgtgaaaatggcttccgagctcctctttcaactgtcaggtatgtttatgcacaggaaaatgtcaattattggaaatcattgaaggaaaacccttctaacacagttttttttaaaaaaaaaaacctgaattataggattttttagacagaaatcaattttgttgctttaacatgca

SEQ ID NO: 32815 - DNA, 2300 bp, Homo sapien
cactgcaccccatgcacactggcttcagtgctgttccatgggcgtgccaggcatgttcccacagcagggccttcacagtgactctccctctgcatggtcagtttctcacttcctccaaggctttgctgaaatgccaccacttctgtgaagctccaccttgaccacctgtttaaaattgcagctctcttcccacccattactccccatcctccctgtcttgccctatgtggttttccatggacttatcaccctctggcatgctatgttatttacccatttattaattttgtttgacacttgtcttcccccactggaatgtaagctccaagaaggcaggatcttagttttgttcattctgagtgagagttccagggagaattgtaaggaagaaacctttgagtcgggtgttgaagggtaagtagaattggacaatcagcttttctggggaaagacatttgagatggaaggaatatcgtgagaaaaggtagaaaagtggcagggctcatgaatgcccctagaatggcaaggagcctgcctaactggtgcatgagagtgtcatgggagtggtagtggtggatcgataaatagaaaataatgaaaagacactcttagtggagggagggaacacattcctaaccgctgcctgtgataatatggcaagcatgttgatgactggagttgaggaccctcaaataggtagcatgcataacatgggaggtactgtcacagtcagaagccagaaatgtgagtagtgtttgctaatgaaatctgattttatacggtacttgactgttttcaaaacatgatcacatgcttattatgatataagctttataacaactgataaagtgagttaagcaggtattatgtacatttttgataagctttttaaaaaatgaattgcatcttatattggaggaagtggattctcagaccagctcagtgacttgcctagagtcacggagttagaaagtagggaagcgcttcccactgtctgtgtctcacggtctgtgtcccactatgccaggctgcctctctcattctgtcacagtgctaaacatactgtgctggtttttcacaaggatataggcttctttccatttccccccattccctgaaaatagcagtttcttcatccaattacctctttaccagatccatttttctttttccttcttttccctttcaacttatctggactacttgggtatgtttttacctttgcctgtgtagcattttttacttttttcaggcttctgccaagtctgtctgacattctgttaaggctgttgccacctttcatttggttcttgggtggaagggaagagaaagcatgtcatcacctccatttgaatgtcttgagacttacttattgttcactttgggagtaaacctgatcttcttaattctccccagatgttagtaggcaggaagaggcggagggagagctcagtgaaggagaacactggtatggaaactcttcagagactccgtcagaagcatcctatggggaagtccaggagaactataagttgtctctggaggaccggatccaggagcagtccacgtccccggacacctccttgggaagcacgactcccagcagccacacgttggagctggtggcactggacagtgaggtcctgcgagactcactgcagtgtcaagatcacctttccccgggagtgtcttctttgtgtgacgatgacccaggctccaacaagcccctgagcagcaatttgaggcggctgctggaggctggttccctcaaactcgatgctgcagccacggctaatggcagagtggagtcccccgtaaacgttggctcgaacctctccttttccccgccttcccaccacgcccagcagctcagtgttctggccaggaagttggccgagaagcaggaacagaatgaccaatacactccaagtaaccgttttatatggaatcaaggtaagtggttgccaaactcaaccaccacctgcagcttgtctccggattcagccatcctaaaactgaaagctgcagccaatgccgttctgcaggacaaatctctcaccaggactgaggagaccatgcgatttgagtccttttcctccccttttagctcccagtctgccagttctaccttggccgctttgtccaagaaggtcagtgaaagaagtttgactcctggtcaggagcaccctccaccggccagctccttcctttccctggcttctatgacctcctcagcggcccttctgaaggaggtggccgcaagggctgcgggcagtcttctggctgagaaatcatcgctg

SEQ ID NO: 32816 - DNA, 2300 bp, Homo sapien
gtctcgatctcttgacctcgtgatctgcccacttccgcctcccaaagtgctgggattacagggtgctccattttaaacttgactgctctctgttttggttttagattgaattcatgcaggtgtttcaaacctcgctttcaatagcattacttgttactgggaagctagatcttttggggggagttggcagggaggggttgaacgtgagatttctctatcagtgaaagacatcttttgggagatacagcactctttaagcttcacttataaaagtgtgcaatataaagccttattattatttttaataaggcaagtcagaatttaacccccatggctctctttaacaccactgaagttgtaagaattaactcaacctcaaagaggcatgagttatccatgtaggcttatagagtgtcattttaatgttctatgtctttactgtgcctccactttctttgatgaaaaggtctatttaaaaattggtaggaaaatatttaacataataagatgatgagtcagagttttaaaaaagctaaaaagggaagatgtagttaaataatgcacctttttattttctagctacatgactcatgacatataatgtattctgctaagttcaaagtttcctcttacaaagagagttttatgaaacaactcttcttcagaccatttttatttcaattatagtagcaggttttggagtttaaatcattaacaacctctgagtgaacttttatccaaatgactgcaagtcacaaagagaacagtcctctttcaccaagtaccttttgtgctctagtgagacccgtccttttctatttttctcctttatgtctctctttgaagaaagatgtgtgatttgtaaggtaatgaaagtatgtatcagttaatgaaaactgctatattgggctcataatgcacactggaattgcttcagggtaaacttcatatacctgcagtatatagcaggggaaaaagtgaatttccgaagtaaagattgctgtgtgcactctaggagtatcacgtagcagttaaagcaaccatcaggggtgacctaatcttattttcctctctttgtcaagtagctgtaatgttcatttaggagcatttttcagttttaactccagtggacactccaaaactgggcacttattctgtcaactgtcaaccaagttattgatttcaccatatgttgtcttcattttttttaaattagtttttttggaatgtttttgaagagtgtgtgggagacgataacctccagatttaaggtgatggggtagggacaaaagcctgcagaatttcatacagaacaaaatgtagcttaataaacaaaagaaagtgaagagagaaatttatttcctttttaaaagtcagtaaaataatgaactaatcgttgtttaaagagtgagaaaaactttttccccctagatttggtgactagcgggataaatttgaagaactccatcccacccccgcacgcgcgccccccattctttccagacagagcggttgtaaatccgaggctgagtccgccctgggagccttggggcactttcctctttgctctgtgtgtgtgtgtgcgtgcgtgtgtgtgtgtgtagctctcgctctttccctcagtctgtgcctcttgtgtgtgtgtgtgtgtgacagagagagagcgagagagagagcgcgagaggagagagagcgagaaagagagagagagagagcaagagagcgagctgtgagctgtgctgccgccgccgctgccctttgatcccgacattagtgttaggggctcggagacacagagcgcggccatagacaccgccgcaccggcactcatttatttatacctcccatcacacacgcgagcataggacacacacacactcacacctattagatccgtttccattgaagaatattacgctcggggacaagccaggtgcacgaccaaaaatttaaaaaaaaaaaaaaaaggaaaaaagaaaggaaagaaaagaagaaaacccctcttctggctccaggaaacaagcttcaacccattgcacacaccggagaaggggtttccccctgcccgcccgcccgccccccaactacctccccgctcctgccagtgtctgcctctctgcccccacgggggtttatttgatctcacattaaccaaggaggagaatgtgagaaaagggggaaaatgcccaggaggaagcaggagcagcccaagcgccttccctcacgtaagtcatcccttctccacctcctctcgtgccattttctcgccctccctctcctctttcccctccgcagcctcc

SEQ ID NO: 32817 - DNA, 2300 bp, Homo sapien
aaagattacagaaacatcagaactagaaaaaatagaatgcccactccttatgggatcatttgtgagctaggcaaattcttataatacaaattgacctggtgttttcctgaacaaattaagtagaaagtaagccagacaccaagaaaaaaaaaaaacaactctggtggccaatgttagaactcatttgttgtagcaaatactgctacctttaatcatattaaagtagttgctgctgcctcctcatgtgttggcactgtaaacagtacttacaaactactctataataaagcatagagatgtctatgttttaaacgtcctccttcatcattcagatcagaaaagggatgtgactttgaacagaggaaatacgtgagtgacattaagtgtggtataagcctattttatgttccagctctggtatggggctgggtaaagcatcaattctggtaaatgccagccaaatttgctgtcaataataagataaatccatgacaggataagaattgctgtctactacagaaaactgcttcttgttagcaacattactttgctgctctatgaactgcttctaggggtgatgagtaatatgacaagctttttgtgtgcgtgtccaataaaatatatagtttcttgtagcaaaatgaaactgggcattgaagctatgtacagtacctagattgatattttcttagctattaacttgaattaatcctgatatgatactattttcatttgaaaaaaaagtgcagatgattgctttttggaaacctaattctgagtctctgaggtatttttcaattcacccagtctacctctttctgaattataagtttaacattaaatacagtcaccaatgattgtttaataacctcttgcctgaggagtgtatggtttaaaatccatagatctttggtttcaaaattgcaaaccaaataagagccaatatgagtagttattgaaggaagattccattaagtattctctgaacattaatataaaatgacaacagcaagagaacaactgttaaggagtatccgtgggcataagggaattattggtcaaattgaaaagaaaatcagtaaagcctctcccatttaaaaaaaaaaaaaagaccaggaaaaagtttttcttctttttacattgaatgattaaggagaacattacacagaattcaagaggaaatgaatccagggattgagagcagctggctgtgacagttaaccagagagaggaaatccaaatgatgtgttttcaggacttgcaccttgcagagcgctgcaatctatgctggagagaggctggaaaggcctgtagactgagttctgggaatcaaaacccaaaccagctgtgccaacgggctggataaccaggtttccacgaacaaaaacatagttgccaagttcagattaacttttttaaagaaaaaagcagcaagaagttgatcatcttacacgtgacccagccaaggcagggactaataaagcactctgctgatggactctaattgtatcgtattctcactgtatggctaccactggcagcagacttactcgtggggttagaagcctctgtatcctttttctccacaaccctactcatattcccaccataaaccaggagtacccactttgaataaaaccttacatagataagcagagaaaaggaaacagaaagcatgctgatgattggcagtctcctaaagtaccttcctctaggtcaaagctttctattaggttggtgcaaaagtaattgtgctttttgccatttaaagtaatggcaaaaccacaattacttttgcaccaacctaatagttcatcttccaagctgaaatcatcaggagtttcattttttccctttaatgctttaaggtattaaaggttgtcatcctccttagtcaaaatgaccaattcagttgtctggacaggccagcaaaggtgcctcctggctataacgcctccatatggtgaagctttagagtgtctaccacaaccgcagcctcttctgaaagatcctttgcataggtcagtgtgttggcattgtgtgatgtcacaaccacagtcagtgctgattggacctgtgatgggtgtttgttagctatctagaagttgtccagggctccctgagggaggccagcacaagagctctgccataaaaggacattggacagaagtgaagagtccaatcagaaactctttttgagagactgaacgcaaagcattcagagagtcagcaggctggagaggccaagacacacacacgaagaaggcagtaagtaaaaactgggtggtaggagaagttat

SEQ ID NO: 32818 - DNA, 2300 bp, Homo sapien
catccaaataatggaatattattcagaacttaaaagaaatgagttgtcaagccatgaaaaggcgcagaggggtcttaaatgcatatttctaagtgaaagaagccagtctgaacaggctacacagtggggtggtgcagtgtatgcaccactaactgtgtacggtatgattccaaatatatgatattgtggaaaaaggcaaaactttggagacagaaaaaagatcagcggttgccagtggggaggaagggataaataggtggagcacagagaatttttagggcagtgaaactattctgtatgatactgtaattgtgggtacatttcattatgcatttgtcaaaacctatagaatgtgcaacaccaagagtgaaccctaatgtaaactttggcctttggatgataatgatgtgtcagtgtaggttcatcagtcctaacaactaaatgaaactaaactacataagttaaactaaagcttgccaaaatatttttatgactttaaggctccttaataaattaatgtttacattcagggttttgaagactagtattcaccaaaagtcttgcagtgttttctttgcatcataaaagatgctgaaagcaaaaacctgggaaatacggaaaattgccttgtgagttagtaaaagtcatttataagctgctgaggggcttttgggaacagccacactttttataagcttgttagctcatgaattaattcaggatgcccaccccgtgtgtcaaactgggcccttacccagctactccccttagagaaggttgcagctgctcagcagatgaactaggcccttaaaactcctcatggctccctacccaccacactagtgttaacggctcgattagggctctgtaggaaagggaaagaagtttgaatcaaaaattttctttttttttttaataatttaaacaatcagtaaggaatgtgcaatttgatgtcgtttgcaaagaaagtttttaggaacagggctttttatcctattatgtttgttctttgcacgtaattatttgatttaaatggtacttttcttaaaatttttatttacattgtattttatattgcaagaacttcaaatacagccctcacaataaatcagtaactgttcggtctttatccaaactgaacttttatagaaggatataaggaagtctctattctttaacaaatcatatccagttgttttctgtccctgatatcaatcaaaagttcatttcttctgcctttaaccaaaagaagtttacaagggaggaactctttatcttcgaaaaaaattttgcatcttagattttataacacctaatggggttaaggatctgtgttgaaagatcttatcactctgtgtatagtgttacaaatcataaatataattaaagtataagttttcaactgatgagagtatatgtggagggggaaaaacgaatcaagtcctggtgtaacagttctcttctttttccctttcaattccattaatagaaagagtattgagaattcatgcaaaattccaaaccaagttcccatagtagcactgaaataagtctgcacaccatttccaataggaactagtaatgtaacacaattaatgtcattataatttggagttacttgagtgattttgattatttttgtatcaattaacattgccatggaaacagtctcttgctaaaatggcttaagtcttcacacatttaatcaatatccagaggtagatttaaagacttgaggtgtttcatttatttatttatttgctttaaactattcaaggacgtttctgggtacacaatgccgttacttaaacagtaaattccagtttcctatgacttcaagttattttttacacttctgtaaataaatcctgcccaaaagatcacttctagtttcctggaattttgtttttgttttgtattgtatttgttttgtactcagatttctgttagaggaactccactgcaccaattttgctactagacaaaccaggaatcttggatttgcgcgctttggtgctgacaggctttttcggccccagcgggctgccgtagcagagaagagcactgattggctgaggcagaaaagtgcccctgcctcggcgctttcggttttggctgggatcatccgcggcggccgggctcgtggggcgcctggagtgagggttctggttcccgccggcgaggtgagccgcaccgctgcgcgggccgacgacggggccgggcgcagccccaggttcggtgccccagtgttcagtcgcgctgtggagcggcggctgcagcggccctaggccgggcgaggc

SEQ ID NO: 32819 - DNA, 2300 bp, Homo sapien
ctttagacccttagagctccctgcttcctgcccagcctcaccatctttagtcttacaccatgctgtgtgatcacttctccttaagaatggatctacttatgtcattctactgtcccaactccttcagcagttccccttatcccatcatatcaactccatactcctgatcataagccagtgtccctgcacacaagtcagcctgaagaatctgttctttgccaactgccccctacactcccatactgcagtctcactgtcccctatctaaaacacacatctgcacatatctaaatctattctttaaggctcagctcaattgttattttttcccagaaggttatttgtgctctatcatcatctcctactttccctgccaagctagaggtgatccttctctttcagctgaaagcactctatttctctctcctctcctctttctcatgtatgtctgtagtgctttcatctctcagcccatgcatttacggaaccttatggaactccttccccattaggcctactgtgaggaataaagggatgaagaaatatgaaagccatgtaatgcaatgtttaaaaaacaagaatgctattacaatatcaatatgagaataaaatgtagaaacaattaagccagtcttattatactcaataagagtatatgatatgcatccatggggaatcctcaactgaagtgagacaccaaaaattcagtttgaaagttaccaagaaacagcttagaagtacaactggttaggaagcagaaacatgcatgccttttcagaagagagaccaaaggccattttaaatattctcttgacacaggcacaggggatgaggaagcagggtggggtgatgggggaacccggcggggagttgaggggactcttctctcctcctgtgggtatacaacaagaaaaacaggatgtgggatctatttagggaagagttttctcccagcaaaagtcgtgcatggggatgagattactaagggaaatgattgggtctctttcattagggagccttaaaaatcaggtacattgttatatctgcaactgtatagatggagtcagtttctagaacatttttccatttgctaactcttctgtcagagttcagagcagggaatgaatagactctatatagtcaaatcctgatatcctgactccacaggaaagaatagtttctaaaatataagggcacaatcataacaatgacatttttaacttttttggctttctaaacccttattatctaaaacaggaaatctgattatgacatccaattcccagtactgactccccacaacatttaattagttttgactcagtgaggttttttttaatgtttaacatagtatataacaatagtagaatatagtaattaagaacacaggcctgggaactagactctgtttgaatcctggctctgtcacttactaccatgggccctgagtacattatacacttctgtgtgcctcagttttctcatctgtaaataggaacattacatcacttgccttttggggttgttgcttttacatgtaaagacattagagaaatgcctatacatgatactgctcaaaaaatgataatttgtttttactaaaatatatgatgttaaatcttttttcataccctgtattcttaagtgtgtgtttgctaccaaaaggatgtgttgctccttgaaaagagcatttttagagatatatttatcctttcaagccactgggtaaatttcaagtggtaacctagagacttagagttccttgttgcattatttttataatcagtcctgctccaggggctgattatatacgtgatcttaggcgacctccaccacacatttttacaactgttctccttttcatggataaatgactcagaagtagttctctaaaaagaaatccagacacttctgtacatttgggtgtagaattactactgtcaccaggattgatcaaagggatgttaacataaaggtaggtactacatttgattttgaatgtgttaaattggctttttataaaagtatttgtcaaaatctttttttgcccctaggaataattcgggtttcacaccagcagacacagtggctatcattttctgttctacacacaaatcccttacattgggtaagtgattcacagagttaaaaaccacctattaccctcatatagttacatcttatgactttgatattcaaagaactcttcaaattaaatggaatggggtgttgtccacactattagataaggaacagtagcaaagtgagggtgggtcattgctttgaaattctgttatttg

SEQ ID NO: 32820 - DNA, 2300 bp, Homo sapien
tagtaaaatatcttatattgggtaaaattgggttgataccaaaagcaatatattatctacaaatgtgtaatataaaggaagtcaatctagtcaatattaaaaaaaatctcaatatgaacttttttttttttagctaggattgatctaattattcaccaaatgtgattactccaaggtatacattttgctaatgggattttatgagttaataataaaaacattactgtgtaggacattcagttagcacaagaggtatttgttcattcactcgtttctttcaatgaattagacaaattcttgttgtaatggagcattctagaggaggaatgggttttgaaatattttctaacaaaggagataataacaaaagaactgctatattttaaaatcaagctgggtatggtgactcacacctgtaatctcagcaatttaggaggctgagatgggaggatcgcttgagtccaggagttcaagaccagcctgggcaacatagggaaaccctgtctctacaaaaaaattaaaaaattctagctaggcatggtggctaatttttggtcatttatggtttacagtcatactgctctgaacttgcccaatctcatctgatctcggaaaacattatttatattaaacatattttatataactatattataataggaaggttcaggcattttaagagaagtaaagcaagatactgttttgaaaacgatgtgaaggaaattcttgtattgaatggggtggatgggagtctgaagtctagatctcctgttactgtcataggttggttatggtaccagatgtcagatccagtcttctgtgccttggattctgccaaacacataaaataactcagtaggagatgaagactttggacatttcagggaatcgtacttgtgtcagcaattcatactttttaattaatgaatatatacacgtgataaaaattttaaaagagtaccagtggattcaagggcctgatttgtttcactatagatagataaatagatagatagatagatagatagatagatagatagatagatagatagatagataaaccttctcaccctttctacttctggccacttcagagtcagggtgtgagtaggagtaacaaacaagtgggtgcttagggtgagtttcattagattcctatcttagatgaccagcggagagaggcatgtaagtaggtcatttattttcatttttttttttttttttgagacagggtcttgctccgtcacccgggctggaatgcagtggtacaatctcgactcactgcaacctccacctcctaggttcaagcaattctcctgcctcagcctcccaagtcactgggattacaggcatctgccaccatgcctggctaatttttgtatttttaggagagacaggtttcaccatgttggccaggctggtttcaaactcctgacctcaagtgatctgcccacctcggcctcccaaagtgctgggattacaggtgtgagtcaccatgcccagccagtcatttcaatacagtaggacaagtcccatggcagagataggctcaggatgttctgccagcaggtgtggagatactcagtccatctgtaagtgtagatatgtgtgtatgctaaggtgtgtgtgcgtgtgttgggggaaggtcattgaaaacttcttggaagtgatagggccaggaggcagagaaatactgggtagaagagggtggggttcctggcgagagctccaccctcaagcctggacccacggcccaaagtgagaactattcttgttttcccacctgaaattttaccttttggactgccccaccccctatcctgtgcccatgagaactgcaaaccccagactcaggggactcccgtgcacgcgcgtgcgcacgtgcacacacacacacacacacacacagaagagagaagagagaagagagaagcgtttgaacaaccagaggagaagaggctggacgtcagagactatggtcagagaggagttcgattagggatggccagactcccgcggaagattttcgtcccattccaccccgtttccagctccctttccctctgaaagccacttccaccgctcaacaaagtcctccacattaactaccctttgatttgtttgtgtgacctgatttttcctggacgcctgacaagaactcgggtaccaagagggcagagtgtaaaaggctgtcaccctgaccctccgctgagctagttaacacctagccatccacggacggcaaatgctaaaagagcagtgattgtaacacacgtcttcttgggcttcgagggtcacag

SEQ ID NO: 32821 - DNA, 2300 bp, Homo sapien
gggaggtggaggcaggagaatcgcttgaactcaggaggcagtggttgcagtgagccgagatcgcaccatcgcactccagcctggatgacaagagcaaaactccatctcaaaaaaaaaaaaaaaaaaaaagagtatatgcaaatgccttagtgtattctggctaatcatttcattacagtattttaaaaaataaaaatactaatatttgtttagtgtttatcaaatgcctctgagtatatttaaatgagatttggcttcaaggctgttgagaattctctggaactgctggtgctcaagttttctctggagtagagctctaagaattctgattcactgtaaggatggcttgctttctcttaggtctgatcccaggacctaatatgacttctggtaggctgagtgttttctagtggtcctaaattatactcagatcgctagaaattctttagatgtcatttagggatgtcttgtgacctaacaggaaggaactgctgtgtgtatctccacacagggaagtagacagtgggaagtgatgagactaatctcagaatgtggtgatgagcgaatgagtctgcattaacgtactgttgattaaactgataaactttggctaatgtccctgaggctgaggatctcttgaacatcttacctgaacaaaggggccattgcagttctatacttacaaccagtaactctctggcatagttgaatatgttttaatgatcacttgcttgttttaaaggactatagtttttctagcactttccagttttattttagttttccattttgtttttatttcaacacaatataaactcaaatgcaagtatttgtgagtttatatatatttgaatcctagaggttaactaattatccttttttagttgttaaactcataacgtgtgcctggtttcttatgtttaatgtgcatttttttttcccctcttggggcagcagtgggagaagcaggcatgggtttgctagcatgccggaaaatttagttctgatcttcaccatatagtagccctcaacttcaatttcttcatcggtaaaacagggataatagtatttacttactgagattcttgtgaggattaagtgagataacatgtaaagtgacaagctcagattatggcataaagctggtattctgttagtgttaacaaagaatctagtgaatagactgtggaaggaaatgccatttggaattagagactatcattgagggaaatattttttaaagtattaatttgtagattcagtaacatcttgccaaattgaggacttatagccttggtgcaatgaatagaggttaattactgtatttggttgaaatgtgataggtcttattaaggtttttttgaaaagatttcttattttatgtaggtaaacatacatgcacgttgttcaacaatccccaaatctatagtagtatgaagtatagttagcttagtcctggtccagagttttacacatctgatttgttagggcttattgtgtattgtaaagaaattagaataagaacatttaaaaaattttaggccaggcgtggtggctcatgcctgtaatcccagcactttgggaagctgaggggggcagatcatgaggtcaggagatcaagaccattctgcccaacatggtgaaatcccatcctactaaaatacaaaaattaggagggcatggtggtggcaggcacctgtagtccaaactactcaggaggctgatgcaggagaatcccttgaaactgggggacggaggttgcagtgagccaagatcgcgccactgtactccagcctgggcgacgagcaaaaactccatctcaaaaaaaaaaaaaaatttaagaaattttaaacaaaaatactttatagccttcatgagtaacttttttatcttgcattctgtcttgtatgcatatacttatagataaaaattttagctatgaaaaaacccaaaattaagaactaactcatgtgatgttattttagtagggatctcctttcaggaatagttttcttacctttgtttattttgtttccttaatttttccaggagctgaccagtgctttggtgcatctaaaactgcatctttttattcagatctttactcttgcattcttcccagcaacaatatggctttttcttcagcttttatcaatcacacccatcaacgaatggcttttaaaagggtatgtttaaatctttaaaagtgggtccacttttaatggggcatctctagagacattattgtttctatggcaactatatacaaaagggcttatgtgtaccatcttaaaaggaag

SEQ ID NO: 32822 - DNA, 2300 bp, Homo sapien
aaatacagaggggaatgtgatgtgaaaacagtggcagagattggaacactctagctacaagccaaggaaggcaccaccagaaactagaaaaggcaaggaaggactctcccctagagccttcagcgggagtatggctctgccaaaatcttgattttggacttctgtcctccagaactgtgagataataaatttctgttgtttgaaggcatccaagttcgagtatttgtttcagcatccacagcaaacaaatacaggccttaagagaatataattcatggtacattatattcttttcctttaagtaccattaaaaacagaacaaaaaaatctctgagttagattctgctctacacagatcaaagaggtattagtaaataatttgtgaatagctgtacagttaaaacagctcaatttctgtaaacttaatgtttaatgatgttttaatacaaaactatcccttcaatgactgagacgtatgactctttaacctactaagaaattactataagaaaataattatgttgtaaactatctttcatttatcttcacttatcttctgactgcctgacaactaacatcaaattttatatttcatgtacctgtctcttttcagagtaaactgcttaatgtcatctatgtctccctgttaagttctttttatcttgaaattaattttttttcatgttgcctgatgtataattagatgacacttggtactgtgtaacctacaactgggagcacaactcttaaagtggcttagtttctggaagtcttgccatcaagataaagctaaattaaatagaggaaatgacacgacgagtgtctttccagctttgaataaattcagaattaaagtctgtcatcacgaaacaatctcttccaaaccttaagttctatttttaaccatttaagtggcagatgccaggttatttcaaaatatcacatactattttctttctttcttcatttggatgaatgatacagtggagttcatgctcttgcagggtctaccggtaggaagtccattcatgaaaccatcaatgtcactggttgccacaagacatttcaaggaagaaactggcagatagaactagcactcgtggcaatggaaggtaggactccccaacctctcagactcaatcccccaccacttccgcgttggaatccgcgaccctcttcccagagttttcctgtggcttgggtaggtcagccctgggggcgagccagagcgggcacccgcgcgcccaggggcttgccagcgcagaccccactccgcccgcgagtagcttagttggtggggagacttcagctgtcactctcggcccgcaaaggcagatctgccccgatccctgcagccctccccagtcccggagacaggtgtgggccgcagagggaaggggatccggaccaaatgcccacccgcaggcgagcgacctggcgaggtcgggcccaccttccttgggttgtagcggacgccggcaagcaggggtccagcgaacgtgggcatctgcccggcgccggattttcaacccaccgccagagataaggctccccgcccaccagcgagccactttcccgcgcggacacctctaactccggcagctcaggctgggaactcggagatccagagtggcctcccctcccccccgcgcatacgtcagcgctagcgtcgtggaagcgccgtaatgtcccgaagaagcgcgtctccaaacttgcaccccgctgccgcagcttcaacggagaaatcccttgccccaagcacacgtcagccctgcccgcggagtcatggcacagcaaaagagaggctctccatggagatatgctccagaagggtgggtggctgtgcctaaaggtttgttagaaaaggacagtcagtgaggcttgctggctgtggcgccttacgacgctctccccgacccctcgtcattcagaaggttccgcaggtctcgacagcggtgcgcttgtcagccccatccggcggccagcctcccttgccggatcgcccacgttgtcggcctggtccgagttcttcatttcaaagcatctgcacctgcgagcccgcggccagaggcgctgggggcgtttgtgcgcgtgtattctgaggcgcgtggtagtgatggcggcgctcagtgagactttcctgtcactggctactactactcccaaccctcctcaaagccgccggagcaacccccaggtctttactttacaatcggcaatttgacttgctctgctgcatgtctggagggaccaaggaaagtgtggagacgctccaaggattaggtgatcggagcttgaaa

SEQ ID NO: 32823 - DNA, 2300 bp, Homo sapien
tgaggtagaaattaaacacctaagcacttacttgaaccgtccggcacaagccacattcattcacgtgaacactcccctttccctaccccatgtccaggtttcgctgagctcacacccggcaacactgctgctaggagttcccttcggctactatttattattttcctccacacaggggaagagaaagggaagcccgagaggatccagggaaagcagaagggggttaaggaccatggacagagcccgtcgcgcgctcgttgctgccgccttccccagcactctggcggctcctgaggacagcggtcccatcttgaaaccgctattccgcccggctgaggtcaggggtggacaggcggtcccctactctccaccgccgcttccgggagctgaccacccgagggttccccttttccactctccttcccactctgtttttgtcccagcgcgcgccagcgcctctcaggcctgccgcctgctctcgcacctgctcgccttccccaggcgcccagtgcctgcacctgctcccggtcaacccccgtccggattgggccacccgcgggttcctgcgtcggggtcccggggccttctcaccctcgcctgcaccctgctccttccgctctctagggaggtgacagcagcccccaacaccgcgggaagtatagagaaaatgggatccagaaggagaggaagtagtgtgtgtgtgtgtgtgtgtgtgtgtgtgtgtgtgtgacagagagagagagatagatagaaagagattatctccttttgcaactggaaccaagagtgtgtgtccatctctaggaaaagtggtctgcactgggactgggacagaagtgggagtgaagtgtcagctaaaaataggctccgcaccgagaggctgtggaaatgaagataagtgaggtttgtgccagcccccgagggtgtgtgtgtgtgtgtctgtgttgtggggtgtattcagcagcatatgcgctgtgtaatttctgaccttccctctccctgtcagttgccccttcttcctttgattgtggctaatgaagaataataaatccaggggcagggtttgccagtggatccttccaagactcaactcgaactgtactggatacagggaggaggaggaagagaaaaggggggcaagaggagcgtgtgtgtgtgcctgtgtgtatgtgtgtgtgtgttgtgggaggggtggggacagcggggagggggaggagtcgcatgcgcacagacgacccgagcctgctccgcggctgtccaatccgctgagagctgcgagaaatcgagtgagagaaagccctgcagcccctccgaccccatgtctctttggcaccaggcacccgccgggccgtggggggctcgtagccgaacgccgacctccgctcgtattgggctgggagttcagagccgcgcgcagaacccgggttggccgcaacgtctgtgttctcagcggtggccgggaacctgggatcagggtcacctgagctgacggggtgggggcgggccgagtggggttggaagcctggaacttagtggtaagcaggaggcgtaggaggtggcagccaggtaagaggcactcttacctacccaacgctggcttgggccgcaactttatttgggagtttctttttccggtgagacagagacccggcagaagaagcgggaggggctggaggctggtccttaggtaggcactgcccggcgactggagcgcggacctggccatttgggtggggttgagtgggggcgcgattgtgagtagcagccgcgggacgctgcgaaggggcggcggcaacagagcacgggcgggggcagaaaagaggcggcggagggcgcggtgggggagcgcgaggcgagtgctgagagagcagaaaggactcaagcctgaggggagtagagaggaagaaggggcaacgcgagaaaccgaacaggagccggcgtttcctggcaagggagggcggaggcgcgcgggagagagggagagagggagggcggggggcgcgggggtaggcgcggggagaggggagtataactcgccggccgcgaggagcgggggcagtttcgggtgccgaggtctgcagctagcggcaagcggagtcaggcatccgttcagactgacagcagaggcggcgaaggagcgcgtagccgagatcaggcgtacagagtccggaggcggcggcgggtgagctcaacttcgcacagcccttcccagctccagccccggctggcccggcacttctcggagggtcccggcagccgggaccagtgagtgcctctacggaccagcgccccggcgggcg

SEQ ID NO: 32824 - DNA, 2300 bp, Homo sapien
gtcagacatgaaagaacttaaaattttatctcatatgttctttcctaagatgttacttggggatgtgtttagtaaaacaagaatgattcagaataattttactgtagaaattgatgattgagatatcaaaaacactttgagaacaattatggggagcagttaagatggattggcttccattagaaaattgtctcttgcttctttagggagctgacctaacctaaaatcatttctccagagcaagactggaagaggaaactttagaggttgttatgtcagtaatagcattcaaactatcagttgtgtcacctgaccttccccctagaattctaggtggagaagattgaggaagcaatgagaagaattacacaaggaagaatctgtttgaaaaaccactctattctgtcattctgttaattcaaaaaatatttttgagcacatactgtatactaatccttgcatacggtacaagggaattcagaaaacaataaaacaaagtctctgctttcaaggtactcacaatctttcaggcaagtttggttcccataagccaaacaccatgcaaagttatactgataaaatcaaggtaggtctaagagaaaggaggcgagaggaggagaaattaattctgtgtagtgaaaggaagaggtattctggaatcctcaaaactttcagaaaggcctgagtttctagataaagttgcagctgaatctggcatcctttggttttcatcagtttccttttttgcttaagcccgtttgtgttttctgtcacttgcaaacaaagttctctaactgaaggaattctatgctaaacagaaggagaaagagagttagtcaaagaacttctagtgaaaaaacagcaagtaggagaagtaagtccaaagaagcaggaaggaactacctagaaagccaactaagacagcctcctgtgagaaaggaaggtgcatggaattcacaaacagactctaagtcagaaaaagcagcaaggactggaaaagaattcacacaggtcacagtggagtgtgttaaggtgatgctgaaactggaaaataaactcatgagaatagaatgagagtcttactggtgtgggggatggggtggagcccaattacagatagtcacagtgctcattgaatgtataatgtaaacatacttggaaataatttagtaatttgttacagcaaatgagatgttagaatgaaagtgtggttatggttgatatgcttgtactctaaatagaatcgatttatggttaatagaatgattcgtgtgagcaatatcgctggctcgttctcctacaatgtgtgtcagtagacaaggaacaatagcctaactttccagcacttctgtattttagaagtaacaagtggcaagcctcactctcttgccccatatatatatgagggaatgagcaaggaatttcacttccttgcactcatgtctgagagaagagatggaatgatgggccgagattaatacgatgatatttatttagtgtaaatataaaaccctgagtttcaggtaaaaatgcaaaacaaataaggacagatgcagggagattctctgaaagagaccttgagtatttagcgaaccacaattcaaaattgaattgtctgtggggacatgacaggaaaaggcatttgtggtgggttctgactgcaagagaggctgaggaagaggagaatgaatgacttagctagatggataaattggcttcaggtcacggggatcatgaatgcctagctcagcgttttcccatcaatcctgtggacaaaagagaaatgaagaaaaagcattgagaatgcaaggccacgaaagaaatgaaagtggcaaattcgagcctcttgggttacgtgaaaatgcctaaaagcgagctaacttctgaaagcagccctgcttgaaaagcctcagctatctgggggccccgcccggccgtcagtaagctccacccctcgccagactccgcccccaagcccgaagagtctgggagctgccccaatcccgaggcccggtttagcctaactccacccccggccgtcatgcctcgcctctctgtttccgtggagacgctctcggcgtcccctgtctccgctccggcggagccaggcttcggaatcactgagagaggagggggcagcgccaacgcccagcacctgccgccggtgggggactgacttcggcggaacggaaaactggagttgtttccctgggccagtgcaccgaggttcgtgacggcaggggcgaggttgggaccggacttcctcagctccttggagaggcaggctgttcttcaggcag

SEQ ID NO: 32825 - DNA, 2300 bp, Homo sapien
catatatcattcttttttaaagctgaataatgttctgtgttatgtacatgtatttatatacatatacatacatgtatataccacattttgtttatccattcttccactgatggatatttggattgtttccatcttttggctagttttcaccttttggcttttctgaataatgctgctatgaatatgggtgtacaaatatctgtttgagactctgctttcaattatttaggtaagtaccaaaaagtagaattgctggatcatagggtaattttatgtttaatttttggagggctgccatgctgttttccacaactgctacactatattttacattcagactggcaatgcacaagggttccaatttctcaacattcttgccaacacttgttctttgctgtttttgcttttgttttactataatggctatcctaataggtgtgaaggaagaatttttagtaactagtcctacaccacagtgagatcagctgtctcaataggtgggtcatgatgaatgtgttctagcaaagactggacagattgacatattcagatatgcaggtgatgcactgtccaagtgtgtctggccacagagtgaataagggctgaaatccagcacatgtttcacgggccaagatgtgaactgcctcttttgggaggaagcagtaagtttttctttcccgaaaatattgtcagcttgccaagccacatgcccaaagggtcacctttttttaatataaacaatggcacttataaaagctattagttattctggttggctgattctccctcctagagaagctgtaagattagtgaacagggtaatatctagtctaaccctactagatgactattaaggcctctttcaatggtggttttctgtagatctctttgatggttttacaaaatggtccctaaattctttgacactcctcacactaagggttgggctctatataccctcaccttcaatctgggatttgtgactgcttgactaatagaatcaagcagaaatgacacggtgccagtttctgggcccagcccttaagaaactggcagcttccactttctgtctctggggacattcactcttggatccccgccaccatgctgtgaggaagcccaaaccacaagtctccacaagtctttgtggagagacgcacgtggagaaaaactaacactcaacaccaagcaagtgaactgtcttggaagtggatcctccagcccctgctacatggagcaaaaacgagctgtcccagacaggctctgcccaaactgcagactgataagcagagtaaatgagtgttgttattttaagccactacgttttatagtaatttgtttagctgcagcagatagccggaacagcatgggatataacatgaccagtgctccaacctcacacttctaccatgtgctgactctagcagtgcactgaaggactccaaggcaggccttccctgaggagaccccagtttttactcacatgtcacaggcagtggcctttgtccctcatctcctctcccacccccaatttaggataaagtatctgccgtgataaagacgttgagacccactttctgtaaggtcggcttcttcattgtttgaatttcttgaggtttcacggagccacgcgctggaaccttccatagtctctcctgaggctccttctttgccctgggctggaggtctgtagccgtgggatgctggctacaagggacaagatagaagcaaaccacctgatccagtaaactgctgtccacttcggctcctcaacggcctctaagcttaagagggagcacgcaagccaagcaaaggcggcagggaagacggagaagaaaccacccgtgggccctggctctgtgtccagttgttccgtcacagatcaaatctgcctgcactaagaggatgggttcctctgcaaggcctttcggaattctgagtcttgtctgtcaaactctaccctctctcctccacatcccccaccttttctttcaggaaggaaatagttaaaaaagactcctgcccttcagggcctggaagggggcggcagctttgtgctttttagtggccgcgtcccaggatagctggaaggttaggacgctcttgcggtcccagagtggagtggaaggtctggagctttgggaggagacggggaggacagactggaggcgtgttcctccggagttttctttttcgtgcgagccctcgcgcgcgcgtacagtcatcccgctggtctgacgattgtggagaggcggtggagaggcttcatccatcccacccggtcgtcgccggggattggg

SEQ ID NO: 32826 - DNA, 2300 bp, Homo sapien
gccacccatcacctgtggccttgacaagctgcttcaccctcctgggcctctgtttccctatcttcaaaattgaaccgtggatctaccccacaggaccattgtatggattacagggcatcatgcacatatagtactgagtacagtgactggcataaaataaatgtagctatataggatggttaaaagatagcatggggacaggtgtcccttggaaaccaaaatactatgactagcctggaaaagttcattactcccatttcattcatcggcaaataccgtattgtgatgataatttctgagaaatgaaaaagcaaaaaaactcctgtaaaaaatttagattttacacattaatcatcaaggttttcaaaacaaatgtttttatcaattatttcattcttaattgaaactaaaattgttagatgtgttaatggtgttaaccagagttctcattaacatttcataacactttagatggctacctgtgctgcacttcatccctatgttcattatttatcatatgcaagacagcacacattttagaagattcaatttttacattcgataattttattttatgcctcaataccctgtaccctttactcagcatataatgccttttctctttcattaaaaaatatgtttgtatctcaactcttgaagatttttgtaattcaggttcttatcagcctgaatgtagagaaagaagtaactactacttaaaggaaaaactgacatagcctcatccatattatgatgtagatataagtatagctatgtatagagatgagtgagagagacaaagctagagagatagggagatggagatagagctagagatggaaatagagacagagatagatagctatagagacggaaatggagacagagacagagacggagatgacagagatgatggagatgatggagatggagatggagactgacatagaggagatagagcttgccctaatagagcttcagtttttttctggttttgctctgtcatagggtaacctgatatacatatatcttatctaatcaccaaatatatcctgcattttaattgaatcaataaataatcattgactatgatctttttggcaactgggttttggaacaaaaattatttttccttttgtttcaggtgaaaaaaaagtgaaggtgtaaaagcagcacaagtgcaataagagatatttcctcaaatttgcctcaagatggaaaccctttgcctcagggcatccttttggctggcactggttggatgtgtaatcagtgataatcctgagagatacagcacaaatctaagcaatcatgtggatgatttcaccacttttcgtggcacagagctcagcttcctggttaccactcatcaacccactaatttggtcctacccagcaatggctcaatgcacaactattgcccacagcagactaaaattacttcagctttcaaatacattaacactgtgatatcttgtactattttcatcgtgggaatggtggggaatgcaactctgctcaggatcatttaccagaacaaatgtatgaggaatggccccaacgcgctgatagccagtcttgcccttggagaccttatctatgtggtcattgatctccctatcaatgtatttaaggtaggaagtaaccacaaatgtatttgcaaatttaaacccatgctctgattccacgtggagagttgctgcagacttttctgacctttggaattttatctgtgtttttactgagagctatttctgctgtcttctaactactagttttaagatttacaaattttattatctgtcttatgttacacttagtttctaccttaattgtaacaaaatagtatttcagggatgatggttcaaaatcatggtgtttcatgacttggattctcatgccacccctgggcttgctggttggataggctgtcttggcaagatccctggatttttatgaaatgcaatttccagagtgagagctactaggcccagaaaatacttgaaacaaacatatccttgagtttagttaccgttgaatatgatgctgttcagaagccagatatctacagtccagcttgaaatgaattgtatttattttattttgactgtctagattaatgattaaagccaaagggcatcctggcttttctcagtgatatgggtgacttagagataatggggtccacatgatagcaggccactgttgaccttgctgagcagcattactaactaataccacttaaaatttgcctgctttactgtggtctccttcatttcttcagtctgcatttattgagc

SEQ ID NO: 32827 - DNA, 2300 bp, Homo sapien
gttacaaagttatttatttggtgtatgccctatataaatgaagaggatatttcctgtcatagctaaagtgtttcgtttgatttagttctaggaagtccttaggttccctgcctccaggccctattctcttgcctcaggatgacagtatcacaatgggaaagcctcatcttctgaccaagacaggaccaggcagaactatctagaaactgcagtacaaaccagaagggcagtgtgggccttgcttcattttgtatttggactatgcatgacataaagttttttttaccttctaattgtcttccttttattattttgatgactatagagaaatacactttcaggatattaagatgctctgtgtttttaattacacaagttggggatggacaccattttttaaaagatgttctttacagagcctgtgcttcctgttctattatgtgctattattgcattctgttctttcaaggaaagcagttgcaggatgactcctggcctcaagtgatcttcccacttctgcctcctaaagtgctgggattacaggcatgaatcccaaatgtagctgcaggatggctgcaactgatttccactgaactcctggtttctgtttctgaatgctgtatctttttaagttctttattttttttttctagtaaacatccctgggtaatttttttaatggaaaaaaatgactttattttgaaaatattggaaaatgtctttattttttccctgtactggattgatagttttgctgggtaacaaattctaggtacagagtcattttctatcaaaagtttgaaagtattgcttgtgtcctcagtatccatatttgttgatgagacatttaacaatcacatttttatttaaaatggtatgttcttttattctctcttcacacatctgtgatttttctctttgtccttggaattttgtgacttatttgtgccccctgacaagctccctaaagtgcttttatttagtaattttttttagagacagggtctcactcttttacccaggctggagtgcagtgtcacaatcatagttcagtgtaaccttggactcctgggctcaagcaatcctcccaccttagcctcactgagttgctaggactacaggcacatgccaccatgtccagctaagttttttttcatttttgtagaaacgaggtctcgctatgttgcagtttggtctcaaactcctggcctcaaatgaccctcccacctctgcttcccaaagtgccaggattacaggaatgaaacccaaatgtagtatttctatcatacaagattgtaacttcaccttcctgacattatgacttggggaatctaactcatgacaaagcccatagttatttgatactcccattgtcaggcactcaatttctactgtggtagcattctagaagctgtttttcaaatggtgagtacctctctgatatgctaatttgtgctcattctagacttctttcctgcatacctcttactggggctttccagaaactctgcacatcatccctacctagcatgattactcctaattccattggatatgcctggtcttctggcctaagcagtaaagtagcttgcactacaggctgcacctgcttctgagccttctttgagctccactcaaaatagtctcccaacttacctaagaaattagtcaaagcagtattctgaagtagaatatgtactgtcactacagtccaaagaggcccattgctactgtgctcttttttgggggtgaaaagtttgaagtacgataacatttgctttaccttaaaggggatatccctgcatagcccaaaccattgagtccctaaaatcttcataagtatggcagacccctaaatcattgtaggatttatctctcaggctatgacgcaagacccatgggtcttgccaaggtatccagaatacttcccacttccttgcaccaacacaattaacatgatgtcatcaatataataaatactatgatgctctgtggaatgttaagatacacaaagttccttcctactatactgtgacaaaaacctgaagagttaacataaccttgcagcatggaatatattttgctatcttttctgcataaatgtcctctgctttgatcctctttccagatgggaaaagaaaacatctgccagatcaacaactgaaactgccattgcaaaattataactgagacagtgaaagaggtctgacctaaccgactccatcttgcttctaacctccaagctgtccttgttcgttcctgggtgtaggctgatctaactttgggagaaacttagttta

SEQ ID NO: 32828 - DNA, 2300 bp, Homo sapien
aagtactcaaaaagttttggatttgggagcattctgaatttcagattttcagatttggcatactcaatctgtaattttgtttttaatttctctgctgagctgaagaaatttcaccatagaagaattccagttcgcaaactggtatgtgaaatcatttgtgcatctgtctcatctcttctctcttttgcttttttctaatggatttagatttttgctttaggaattcaaaatctaaacaagacaaataagtaaatgagtataataccatataaatgctgtaagaatacatggggaaacaaaaataaaggaaggtctcacaaattaggcaaaaaaagtttgcccatgagaaagaatgggaaagattataggcagcaaaaacgctgtagctgaaagcacagagacaatctacgcatacggcatatccaagatagcctctactgtgtaccaaacaagtaaagagtagttatacttggccgtagagtaaaattaactttctcttcattattcttcttttttatgaactttaacaacagagcaagcattaatttaatgatcaggaattttttttaattaattttatttatttatttatttatttattttttgagacagagtctcgctctgtcgcccaggctggagtgcagtggcttgatctcggctcactgcaagctccgcctcccgggttcacgccattctcctgcctcagcctcctgagtacctgggactacaggctcccgccaccacaactggctaattttttgtatttttggtagagacggagtttcactgtgttagccaggatagtctcgatttcctgacctcatgatccgcccacctccgcctcccaaactgctgggattacaggcatgagcccctgcacccagccttaatttccatttttaaagtaagcttaggaagaacaaacataaggcctatttttccggtagaaagtagtttgggtcaggttgtaaaatacaaatgttaacaactgagaagtaggcagtgaagtcaagtccaaacagacgataccaaaaaaggggctcataatattccttaggtgtctctgtgagactcctgggctaggtgtactcaatgttacaagcctccttatccgtatggtcattaggcggaaattccccaggtggcaggtactagcaggtcaaatgcttaaatataatgccctttggagtcacaaagaccaaggttgctatctccacactaccacttaactagctcagtgagcctgggcaaatttatcagccacttgacttttttatctgtaaagtggaaaaatgcctacctctcaaaatttttgtgcagaacaacttacataatgtaggtaatgaacttagtacagtgcctgtccccctgaaaattacaattacaatataaaacgcatttgtatatgtaattgagtagtagatatttgtttactctattggtttagctaaaggctttaagcatatgaaactcctttgtcagatggaatgtcaactttttaaaacttaaatgagtgcaaatttttaacacaagttccaaatgtagaagggacattccctatttgcggttaattctaaaatgaagctacctttagaatgatccttctgtaggatccagaaataaccaagcggcctagcccctagattctagcaactgacagaaaactaggtggaggtttcccattcttccttgtcttcttactccagcgggcttctgtatccactctagattgaataggggatgttttgtgtagagatgggccttctctcttccagtccaactctgaagtaaccgccccttacccaagctttctttaaactggaataacgccagcagaagaatgtagtaggtgtgcttcaagtgtcctcaaataattcccgcagcttccagaatccttgcaatagcccgctggaccatctgcggcaattccacccacttccacgcacctgctcttctttctaaccccagtacgcaatcctgcagccccgcccccacagctgaccaatcagagggcgcaaagtgagtcggatggggcgggcccagtttggcgctgacgacgaatcacctgcctcagacagcaggggcggaagcggaaaagagctgaaagtcttggtttggccttgggttccgctgtaggggaggtcccgtgcgaaagaatgaggagatcctggggccttacctactagcggaatcgactgaagagacgcctgccagtgcgggaggtaggaagctcgatccccaaagaaaagagcgagtgggcaggcagctgcgagacagaaccggagtgtgcagggtcccta

SEQ ID NO: 32829 - DNA, 2300 bp, Homo sapien
tttgcttttcatttactgtttgattaacgcccccacaatcagtaagactttgtattagcttttggtttgtttttgtttttgagacagggtctcactctgttgcccagggtggagtacggtggcacaaatcatggctcactgtagccttgaactcctgggctcaagcagatctcccacctcagtcttcctagtaggtaggactacaggcacatgcttccacgcctcgctaatttattttttgtagagatggcatctcgccatgttgctcaggctgggctggatggaacccctgggctcaagcaatcatgagccacctcactcagcccttttcaagctttctatacattttaatgtggaaatttgttgttgtaaaaatgcatttgttctccatacttttgttttctacctcttttatctttggcccctggtagaggaagaaaaagtcctgttcaaacagtgaaactgggccgtgcacggtggctcatgcctgtaatcccagcacttcaggaggcggaggcggacggatcacttgaagtcaggagttccagaccaggctggccaacagggcgaaaccccatctctactaaaaatacaaaaaaattagctgggtgtgtaatcccagctatttgggaggctgaggcaggagaatcgcttgaaccccggaggcagaggttgcagtgagccaagatcgcgccgctgtactccagcctgggcaacagagcaaaactgtctcaaaaaaaaaaaaagaaaaagaaaagaaacagtgatacttaaggttgtagaccttagttctattttaattgtaaactgctcaacccttcaagcatcaaaaataaatgcccaccttttccccttaaaaaaaaaaaaagattcatactcttcaaggcaagattacaagttaatataaaagtcccccctcccccacaaatttttttcaattttttaattttttttttttgtagtgacgggttctcactttgtaggcccaggctggtttcaaactcctggcctcaagcgatcctcccacctcggcctccccaagtgctaggattataggcacaaggcactgagcctggccaagctcttttgttttaatatcagaatttatattaacatgttattttgtttcttaaggttggaatacacaccaaggcttggtttattgctggaatctttttgctgttgactattcctatatcactgtgggtgatattgcaacacttagtgcattatacacaacctgaactacaaaaaccaataataaggtatgtcttaataattttgattccactactgttgtgttggcttatttcataaatatgacataaaatgttttaaatttctgttttccttttccaataggattctttggatggtacctatttacagtttagatagtgtaagtatgtttcatttttatctcattaactaaggacttgtttgatgatactataattacagaatgcttaagataatgaaagtatgttattgacaaggagtcagattaataagtaaaaaggttcacttgtttctaatgatagagaatataaagtataattaaaaatgtaaaatgttatattataaatgtttaaaaatctatagctgtttgctttcttttaaactttcagattgttaaagaatgtaatattttaaattaatatactactctttttatttattacgtcttttatttgaatcaaaaatttaaaaaccttccccagtggatacacatgaaattgttgtagatgactgcttctaatatgagtaaatattaaaggaaatatctttagcagcattatctatgatcatattaagaaaaacttcagatttaagaacacaagtacttactttagcttctctctttattcattatttacccctcaaacacttgtttttgtttaccaatatctaagatgtttattgcttttaagcattcatttcacagattgatagccctcataatgataaattttagagagtcccatgtaagtatatgacaagacatctcaagcataaaaattagcttattgtgagtaccatgaatggagtggtgattcattttatcttagctgcaactatctttaacatctgtgctttttcatagtggatagctttgaaatatcccggaattgcaatatatgtggatacctgcagagaatgctatgaagcttatgtaatttacaactttatgggattccttaccaattatctaactaaccggtatccaaatctggtattaatccttgaagccaaagatcaacagaaacatttccctcctttatgttgctgtccaccatggg

SEQ ID NO: 32830 - DNA, 2300 bp, Homo sapien
ctgtaacatttatatgaagaaaatagtttgagacaacctaaatatgtcaatactagaataattattaaaataaatcatggccctgtcatataatagaatactatggagtttggaagaaagcatgatgtagaatatttaattatatgggaaaataatcagtaaatctttttaaaacagaaggtaaaactatacatagttcaatatagtaaagagggccgggcacagtggctcacgcctgtaatcccagcactttgggaggccaagacaggtggatcacctgaggttgggagttccagactagcctggccaacatggctagtctctactaaaaatacaaaaatcagccaggcatggtagcaggcacctgtaatccaagctacttggcagggaaggcaggagaattacctgaacccagaaggcagaggttgcggtgagccaaaatcatgccactgcactccagcctgggcaccagagtgaaactctgtctcaaaaaaaaaaaaaaaaagaatttagtaaagaggtgggtaataggggtcctagaaacaaatacaccaaatttaacaagctagaaacaatacaaaaagggaaaaagaaaaatccctgaaatcccaccacccagaaaagaatgattaacatcttggtaaacctgtgtcacatataaaactccagagaaagtttcatactataaaaatttttggaattcgacaatgttcagtagtatattgtagatacagttctttgtcagtaaacagaaatattattttgttttgtggagggggtgatttttatttttatttttattttgcttagtattctgttatgtggatataactttttactaatctccttttgatattcaggttgttcctaatttttttaccattataagaaacactgaagtgaatattcttatgtatacaactatgaaagcatgtccatgtcattatttgctgtttaaattttacctggggccattatctctagatttgcttgaaatgctcagcttgactccctatcttgagacaaaactactagaaaaatgaatttgtaaagcaaattaatatatttaacatagagtttcttcagcaatatgctgtaaaggcagggtggtggtggtacacaggttgcactggatttttttttaatggcacatttttaaaactactgctcattttatgcttgatatagatttggcgtttaccttttcctaacatataggcaagcagtagttattgctttgttggtaaaagttggcgttatttctgaaaagcatacgtgggaatggcaaactgtagaagctgtggccaccggactccaggtaagtagtgccatctctgaattcaatagaactttactatttgttaagcatttttacatatctccactaaacctgacaacacacagggtatggggctattatcctcactttacaggtgagaaaacaggggaaccctagagaaattggccataattactaatttgtagcagatccatgaataaaacctggatttcattattcctaagtccaattctctttccacatttctccttgtagtccttgggtggtggaatgcaatatacttgatgtgattgagaatgaaatgtactttgctaagaaatacttgaggctggcctggtgcagtgactcacgcctgtaatcctagcactttgtaaggccaacgttgggggatcactggaccaggcattcgagatcagcctgggcaacaaagagagacctcatctctacaaaaaactaaaaaataaaatacttagccaggcatgacagcacatgcctatactcctagttacttgggaggctgaagtgggaggattgcttgaatgcaggagttcaaggctgctacttgaggaagtgcaaaatagattcacattttggcattttgtctttttttgaaggggtcaaaaataattattttagaaaatggaaaaatgaatataatctgagaagaaaaaacacagctgtttatcttagcacttttgaaaagcaagtagagaaagatagcactctacaaacctagatttaaatccaaaggtggctgttatcttattgttgttctcataggattttattatctgtattgagatgttcctcgctgccattgctcatcattacacattctcatataaaccatatgtccaagaagcagaagagggctcatgctttgattcctttcttgccatgtgggatgtctcagatattagagatgatatttctgaacaagtaaggcatgttggtaagtaccagctatttaattcaaccaaataggttgggtaggatattg

SEQ ID NO: 32831 - DNA, 2300 bp, Homo sapien
ttacaggtgtgagccaccgtgcccggctgcaagacctcatttctacaaaatgaaaaaatttagctggggatggtggcaagtgcttgtagtcccagctacttggggcactgaggaagaaggatcgcttgagtccaggaggctgagcctgcagtgagccaagattataacactgcactccagcctgggcaacagagggacatcctgacacacacacacacgcacacacacagaaaaactctacccttcttaaactggaagttaatacatctatttctgtttagtttcttaatcaaggatctaatttggcaaggtcataaaggcctggaatcagtatattgttgtagccagtatgttgtttttggagttaggtagatttggattcagttcttgtctctgctacttactcattccttcctggccatccttgccacttgtttctcagagcttttgttgtatcatatataaaaacgggatgataccatttatcttgcagcactgttatagggattcttagagatagtgggtataaaatgccgaccacagtgactggcactcagtgaatgacattttttacttgtgtttattctaactctcttatacctgtagtaacttagacagatgatcttttgttttttaaaccttcttagagaaaggacatttacatgtttaagcataagaatagcaatttatggctgggcttagtggcttatgcctgtaatcctagcactttggtatcctcctgctgaggtaggaggattgctggagttcaggagtttgagaccagcctggtctctactaaaaatatttaaaaattcaggcatgatggtgagcgcctgtagtcccagctattctggaggctgaggtggggaggatagcttgagccctgagattgaggccacagtgatcataccactgcactcccgcctaggcaacaaagcaagacactgtctccaaaaaacccaaaaaagtataacaatttgtattttcaactggttccagggttaatgagaaggaattgcgattatacatttacattttaaaattttaccacatgtaggccaggcacagtggctcacgcctgtaatcccaacacattggaaggctgaggcaagaggaacacttgagcccaggagttcaagaccagcctgggtaaaatagcaagacctcatctctatttaaaaaaaaaaaaatagctgggcctggtggcatgtatccgtagtctcagctacttgggagactgaggcaggaggatcacttgagcccaggagttggaggctgcaggggaccatgttacaccactgcatcccagcctgggtgacagagtgagatcttgtctcaaaagacaaaacaaacaaaagttttcccatatatgaagggagtatcatatggtctttattgtaggacttggttcttccttatactttgaagttcctagacatgcaagaatgtctaaaatacttacagttaacaaatataactgatacgattctgttgaatgttaccttgttcttttggacatttctcttaaagaatgtccctttaagctaaagtgaggtttgatatttatccctgaattttatctttgttgttgttagcctttattaccaaagatgatagagtcccctgcagtactccaccaacaccccaatttggggatatggagagacctagtgatggcattaaaaacattatcatactgatagtctcagagtcaataatggagctctcaaatgtctccattatgctactggttaattgagtattcaaatttcagtttttccctaagtaaatctggtagagttttcctagttttttgtatattaaatgagtatttgtaatcctttctatagtgatctaaagaatggggggctagatggaggatggagatgtttatgtgatcctctggcttataagtactccatattttttttcttccttactatttaatgaagactactggataaagcctggagaccatgtgatgatggaagtatcttgtcaagactgttacttaagaatccagagtattagtgtcttgggtttggaatgtgaaatggatgttgcaaaaagttttacccagaataaagacttgttatcgttaggaaatgaggctgaactttgtagtgccctcgctaaccttcagaccagtaaaccagatgctgtagagcagacatgtatattggaatctacagaaattgctttgcttaacaacatcccatatcatgaaggctttaaaatggcaatgagcaaagttttgtcttcactgactccagagaaactgtatcagaccatggatactc

SEQ ID NO: 32832 - DNA, 2300 bp, Homo sapien
tgtactccagcctgggcgacagcatgagaccttgtctcacacacaaaaaattgtcacatcttttttgtttcaacttgtgacttttaattttgagttattgaaatcatagtaggctgggcgcggtggttcatgcctgtaatctcagcactttgggaggctgaggcgggcggatcatgaggccaggagatcgagaccatcctggctaacatggtgaaaccccgtctctactaaaaatacaaaaaagtagccaggcgtggtggcaggcgcctgtagtcccagccactcgggaggctgaggcaggagaatggcgtgaactggggaggctgagcttgcagtgagccgagattgtgccactgcactccagcctgggcgacagagcaagactctgtctcaaaaaaaaaaaaaaaaattattagtagttccatttgctgattcatcttttgagagtgtaataatctgtaaaagtagattatttgaacttttgaaattttataaaggcaaattctcttaaaaaagtgccactgagatgaggtaaggtgagatgaggttggagtagtttccttttacaaaatgtttaaattttcattgtaaattttcttttttgttttttttgtttttttgagacagggtctcgctctgttgcctaggctggagtgcagtgatgtgatcatagctcattgcagccttgaactcctaggctcaggtgatcctcctgcttcagcctcccaagtaactagaactctaggcacacaccaccatacctggctattttattttattttacttagaagaatcttgctatgttgtccatgctggtctttaactcctggactcaagtgatcctcccaccttggcctcccaaagtactgggattacaggtgtaaaccaccatgcctggcccaatgtaaatttttgttgacatcaaacattgttatagcaagtgtgtaagccataagtttatgatttgatgaattttcatgaagttgatagacctgggtaatcagtgctgacatcaaggaccagaatattaccgctatataatataaagtgtgcaggaagaaaccccatctctttaccagtgccccactctccctagagcacctactatctgacttctaacaccgtagattagtgttgcttgttttgaattttatacaaatagaaccatacagtgtgacttgtttttgcgtgcctagcttcttttgtgtttagtttgtttattctcattgcggaatcatactccattatatgactatactagatttgtctgttatattactgatagatgtttaggttatatcagttttttttcgctatcagaagcagtgtagctataaacattcttgaacattcttttggtgataatatgtattaatttctgttgactatattctcagaagtggaaatgccaaacactgtgaggttcctacattaagaatgaatctgaataggtatgctcagctcgaattggtactacaaagtagtcttccaaagtgatcttactgattttatactccaatggtgtatgagactgtatccttaccatacttgctattgactacttgtttttttccattctgtcagatgcgtagtatgcattgtgaattttttttttttttttttttttttgagatggagtctcgctctgttgcccaggctggagtgcagtggcgtgatctcggctcacagcaagctcagccttccgggttcactgcattctcctgcctcagccttccaagtagctggaactacaggcgcccgccaacacgcccggctaatcttttgtatttttagtagagacagggtttcactgtgttagccaggatggtctcgatctcctgacctcgtgatccacccgccttggcctcccaaagtgctgggattacaggcatgagccaccgcgcctggcctgcattgtgattttaactccatttcctgggtggctgttgaagctgagcaccttttctcatgtgcttattggccatttggatatgttctttggtgaagtgtctaagtcttttgcccatttttgttttttattgatatgtaggaattttaaaatatattttggacatgagccctttattgaatatagttattacaaatatcttagttgcttgctttttactttattacagggtgtttttttttttttttagtgagcagacattcttaattttattatagacctatttatagttgttttcctttatagttagtggttttatatgtgtgtgtattatgtagttatgtttaagaaatctttgctcatgaggttttatttcatttttgtatttttt

SEQ ID NO: 32833 - DNA, 2300 bp, Homo sapien
tcttatttcattgagcagtggtttgtaattctccttgaagaggtccttcacgtcccttgtaagttggattcctaggtattttattctttttgaagcaattgtgaatgggaattcactcatgatttggctctctgtctgttattggtgtatagaaatgcctgtgatttttgcacattgattttgtatcctgacactttgctgaagttgcttatcagcttaaggagattttgggctgagatgatggggttttctaaatatacaatcatgtcatctgcaaacagggacaatttgacttcctcttttcctaattgaataccctttatttctttctcctgcctgtttgccctggccagaacttccaacactatgttgaataggagtggtgagagagggcatccctgtcttgtgccagttttcaaagggaatgcttccagtttttgcccattcagtatgatattggctgtgggtctgtcataaatagctcttattattttgagatacatcccatcaatacctaatttattgagagtttttagcatgaaaggctgttgccaattccagtttcttaaggtgaccagatgttccatgttatttgtgtcattccattttttcaaatgacctattctatgtacagaaaatcttgaagttatagataaaccacgaaaaaatgcaaataattggcctggtgcagtggctcatgcctgtaatcccagcactttggggggctgaggcgggcggatcacctgaggtcaggagcttgagaccagcctgaccaacatggagaaaccctgtctctactaaaaagacaaaattacccgggcgtggtggtgcatgcctgtaatcccagctactcggaaggctgaggcaggagaatcgcttgaacttgggaggtagaggttgcagtgagccgagatcgcaccactgcactccagcctggcgacagagtgaggctctgtctcaaaaaaaaaaaaaaaaaaaaaaaaaaaaaaaagaaaaaaaagaaaagaaagaaaagaaagaagaaaaaatcaaagtccttactttgcatcataatccgctaggtgcaaaggtcacaaaagtgattaagaatagctcacaatgtagtgagctggaacctgaaaaacggattaggatttacacaggcgagtgctcagaaaaaagggtagttcagataattggatcagaagagaaggcaaaaatgcatgacgtgtttttgagaattagaggagccctcaaaatgtattagtgtgatatgcaaaatgctcgatttaagatattatccattaatgaatttgaaaatggggacaaaaataacttttcagccgtaataactatgctcccctccctttgagtttcgaatctgtatcttagaggccacacttgaatgtggaaaaactttgtattaatgtaaacactatacagtgataagacacgaacagtgaaataacccctaagctcatcttataactgaacagataggtggtcagagaacttggatttgaaccatgcctatgccactagctggttgtgtgacctccagcaagtcacttctcaagataccacgtttgccatcattaagacgagtgtgatccaaaggtccacctagccaggttttgtgagaatgatttgaaatgcctgtgaaagcatttcctctaccacgtctgagatgcttttgttatctccaggttctttcaggtcttgaaattttgtgcatcacgatccaaaatgtcttaagcatcatcacaaatgcttgaccgtccctcatgagcgggtggcgcttcgcgctgcctgggtctgtacaacagggtcttgcagtcgaaagccacacactcccggagtgcaagagggagagaaagctctgctttcagccgggaaaaaaaaagggcgcaagaccggacaggtcctgccacagacgttctcctatgctcacgcacagtggtcgctcctgcgggaatgggcagcagtgacgtgcccacgtcgggcgcgctgacgttcgcgtagcgtgcgccgctggccaggtgcgcaatagtggggtatgcgtcacggtctgcgccgcccgcggggccaggacggggcggagcttccgcctgggctggggttggcgagttcacccgcggcggagggtaactttgctgtgctgttttttgagcagttgtctggtccctggaagtgtagcatcgagagagttttctaattacgtttacaaaatatcttccctttggccatacaagtggtgactgccatgtcgaactcgcggcccaggtcccgccgagacgccgggggtggcgctggggcagccg

SEQ ID NO: 32834 - DNA, 2300 bp, Homo sapien
atataagtagatagtattggccttttgcagctaggttcttttacttagtataacgttttcaccgttattgtgccgtagcacgtgtcagtacttcattcctttttattgtagattaatatttcattttatggacaaacattttgtgcatccattacacagctgacaaaggacattttggttgattctactttttggctattacgaataatgctgctatgaatatttgtgtgtaaatatttgcgtggacatatattttcatttcttttgggtatatatctaagcgtggacttgctgggtcacacggtaacctccatgttcaatattgaagaagtctcagcagcccctctatgagaaaaggtttgggtttctgctctgaggattgagtgtggtcagtgcttggctgtttcgctaggccctcatttttgtttacaccccctctcttcttgtctttcttcccctttatttgcctcttttattctcttttctgtagactccagtctcctgctggttttagtaggaactgaagctttcaccgcctaaaagttatttgtaaaacactttgaactctctggaggatggacattagagtaataatgtttatctgtgggttaggcactcctggtgctgttttgtaacaaaagggcttattgagtaggaggcttatttaacttgttcgggagggttaccctcctacaacatgctgtccaaacagattcttaattacccagctgagagtctgaacgtcttgaggaattactttgaagtttctcgttaatattaccatcatatcatgtaagtctatatcgcgagtttgtagatgtatggagttcctagtgggtgcccggcacataataattgcttaataaattgcgattatgaaacgttactctaatgaactattagtgtttttttttaagaaatacttttttttttttttgagacattgtctcgctctgtcgcccaggctggagtgcagtggcaccatcacgactcactgcaacctccgcctcctgggttcaagcgattctcctgcctcagctgggactacaggcacgtgccaccgcacccgggtactttttgtattttaagtagagacggggtttcaccatgttagccagctggtctccaactcctgacctcaggtgatctacccgcctccgtctcccaaagtgttgggattacaggcgtgagccaccacgtccggcctaaggtatacattttaatactttaaaatgcctaactttttttgggacacactggagttgtttcataacacacaaaataggctttttgagggcactgacataaattctcattgatcgtcacccccacgcggtgaaaaccacacgttacctggcatgttttccggtagttatttttagaataataaagatcgtcttcacctaccccagcaaatttaatgtgctgaacacaacagaaacaacttttctgtggtttagccagccctctctcttcaactaagttatttagtgcggatacgcagagaagtgtaataggagctgctgggccaccaagaaaacgctcttgccattgtaaggcttcgatctcaagcggagatttaccacgcatctcactttaaactgggaaaggaaccgggataaggaaaagagccccctgtgcgagttcgttcccagctcggggttgggggcgtcccaggataaatgagataaatgagttaatcatctcctgcaaggcagccacttcagagttatgtcgcccgcctgcggggactaacgactgcaattaagacgctccttctcggtcccggtcgggttccgtgcagcggggagccgactgtgagtcaccccggccccgggagcccaagcaaaggggaggggagagcgcccagggtggaggggagccgcggggcgaaattctagccccaggacgcctcggaaggaagaggaggggcagctgcgcgtggggaagagaaggaagaggcgtccagggaagggaagggaggaagaaggaaggcggaggaaagagaaggggacgagcgggagcgcgggcccggccgggtggcgcctcggggagtgtctgccgcgcgggggccgggcggggcggggccgcgggcgctcagagctcggcgggggctgccgggattggggcgccgcagctagcgctggtctcggtggcagctcctccgcgccgcaggactcggctctacgggacatgtccgtgccgcgctcgccgcgcgcccgggcctgctagctcctctgtgctccctgaacgcgcggcgccgcacctggcagcggcctcggagctcggctcgggcagga

SEQ ID NO: 32835 - DNA, 2300 bp, Homo sapien
acaacttctgcttttttttggttccatttctacacatgggtgaaccataggatcacagaattttaggtctggatctatgaggcagttaaagaaaagtccctgatctttttggtaagaaaacttaggttctatattgtcagatggttttttttttttttttttttttaagttgtgcagctagttggtaattaaccttggagtagaaaagggaagaaacctcagttcctgagtctctcctcctccatcagtgtgggggagttaattgagggcttttagatgacctgacaggggacatactgtcctgggtttccagaagaacagcgtgtggtcccatgtggtgaaaaaagataaataaaagaagtagagaattaacatgctttgtttaatctctttgcctaacaggaaggaaatcataccagaaaaggctggaatagttcattatttttgctttggaaaatacaagttggaaaattagggaagagaatgttccttttttaggaggtgtggagagttagggagaatttgaaattaatggaaacattttgacagcatgaggacatggtgtgctctcattgatactcaagaatgtttattaaaaatctgtcaagttggctgacagctttaggggagacacccatcttctctgcatttataaatgtgtatacttattttctcaaaaagcttctatagcaaaaggaatgcaagtatgtcctaattctagacagtacctaagaaatgtttgtgatgttaaccaaagggtgagtactggtatatcaatattattttaggccctgttgacctattgatacgtattttaaatagcgttacagaaatcactggaaaggtttgggaaagtagatgacatttctggtagacaatcttattgctatacaggtcgatcatcctgaatctgaaatccgatatgctccaaaatttgaaatgacactacaagtggaaaattccacacctggcctcttgctctctgatggttcagtgtacataagctttatttcatgtacaaaattattaaaaatattgtataaaattacctttaggctatgtgtgataggtgtatacaaaacagaaatgaatttcacgtttagacttaggccccatacccaagatacctctctttgtatacacagatattccaaaattcaaaaatatccaaaaatctctaccacttctggttctaagcatttcagagaagggatacttaacctgtattcatactggaccattagggaagatctttcccaagatgttttttttccaacactgattatgtattatgattttttgaaaatctagagtaaaacatactgattgattgagacagagtctcaccctgttgcccaggctggagtgcagtggtgtgatctcgattcactgcaacctccgcctctggggttcaagtgattctcacgcctcagcctcctgagtagctgggattacaggtgtgtgccaccacaccctgctaacttttgtatttttagtagggacgggatttcaccacgatagctggctggtctcgaactcctgacctcaggtgatccgcccgtcttggcctcccaaagtgctgagattacaggtgtgagccactggcctattattccattttaaacgaattccacgtctgtgccaaaatctggagcaagtttgcttttttaagctttatgttatttttcttacgtattttgtttcattcggttggtgaggggtgagtgacgtggaattaatttttaacattgctaagtctgaagaactgaaaaataacataggcttggaaaaaagtccattaaaggaagaaataaaagtgtctcttctatcctaatgctgtcttgatgattaagcagtaggcttggtacagatatgtttttttagatagctttatcacattcagagtggtgctttgttttattttcagatatttttcataatttgagcttcccagtggattaaccatgtgtatccttttgtttctgtttaatcatagttttttttttatttgtaggaagaaaaaaagaagtttgacaaagagacagaaaagaattatagtctaattgataaacatttgaatttatcagcaaaaaagaaagactcacatttacaagaggtataattttttatttttctgttacgttttcaaaatttgataagcaatacatgtcttttaaaaatgtgctttaatttggataacttttcatctggcattatatagagataacaaaaagtgaacaggtattgtcataaattaagaaaaaagtccttgtgaaacaagaaaaaataatgaatacatc

SEQ ID NO: 32836 - DNA, 2300 bp, Homo sapien
cccacttaagagtgagaatatgtggttttaaccactagatattttttaggtgaacaatagaatcctttttatgccactgtttggaagataaaggtaacactgacagcaagctttcatgactcagtggttcctcagcatttatacaatggaactgacttgctgttcatagcctgaaaacaaagaagagtgatctacgataaattttactgttgttctgttcatcttacaaagttctcacataggtattcaccatttagttaactgttccccctgaaactaaaacagcaaagcatgatagtaagaaaagagcaagaagacctcacagagttggctgtgtaggaaaggtgatctttatatgtattttaaatggaatctgcagcttattacaataattaatggcctagagacaaagcttcccaccaatgttgaacataattgataacacattttaagaaagcagcttaattcattgcttactgggtgaatgggtatggttttgcttaggtgaataaaaaaagaaaaacctatgttcacttctatttacttgtactatgcctttccctgaaaaatatttaaagcagcttttaataaaaacacatttatataataatgaaacagacatggaaaattagtcatggtgaggagaaggaagtgaggagatggctcttgaagcatcaggtttgagactgagtttcctgtcagagccagttcaagtcctaagatatttctgcttagtgatatctttctgttttagcctccaaataataatgataaatatgttatggaatataactgtgagattttgaatatttgtgtatcttaatgtttgttacttagagatcttcacgttctggaaaatgttaaaatgttcaataagtgtgtactcacactttatatagttgttcttttactgagcacttgtatttctgcattgcaaattaagtaaagataaattcagggtgattcacatagggaagagagaaattgcatagattaaatggttctagctttagattatgaaaatatttaatctagggttatcggtgtacttttaggctgacgtgtatggaattgcaatttttataggccaaaaatagtcacatattttttgtgacatgtggtaagaaataaatttttacactaaaaaaaagagtacaataagagactaacagtattccagtatcttaaaactgtactgttaatctacctttgaaaattaacatttggccagggacactggctcacgcctgtaatcccagcactttgggaggccgaggtgggcagatcacttgaggtcaggagtttgagactggcctggccaacatggtgaaatcctgtctctactaaaaatacaaaaattagccagtcatggtgatgcacacctgtaatcccagctatttgggtggctgagtcacagagttgcttgaacccaggattcggagtttgcagtgagctgagattgcaccactgcactccagcctgggcaacagagcaagactgtcaaaaaaaaaaaaaagtaacattggtattgtctggcataacattaccatcatcagtaaggtctagaaaatcttaagaatcaagagaatggctgggcgcggtggctcacgcctgtaatcccagcactttgggaggctgaggcgggtggatcatctgaggtcaggagattgacaccagcctggccaacatggtgaaaccctgtttctactgaaaatacaaaaatcatccaggtgtggtggtgcatgcctgtaatcccagctactctggaggctgaggcaggagaatcacttgaacctgggagatggaggttgcagtgagccaagatcctgccactgcactccagcctgggtgaaagagcgaggctcccttctcaaaagaatcaggagaatgacaaaaatattaatattttagattctaaatagcatttaaataagccagtttgaaagaggatagggtaaagagaaggacttaagatcttgaaccttgctcccctgctctccagtatagaatggctgagtgtgtatatacttatcctgtaggttttgagaatgttcaaaatgattatttgcagggggacggagaggtgttctttttgaaagaatgtaccaagaggcatactgactccattgacagaaggttttgttttgacatagaagctgctgatcggtaagttattggaattattggacatggtgaaagagtcgttttaaaaaaatgatttaaaaaaatagaggttagttgcaactgtgatttctgtggcctgggagaatgttatcttgctatatttccaggctgtgtgt

SEQ ID NO: 32837 - DNA, 2300 bp, Homo sapien
ttgggaggctgaggcaggagaatggtgtgaacccgggaggtggagcttgcaatgagcggattgcgccactgcactccagcctggggacaagagtgagactctggaaacaaaaacaaaaaacccaaaatccctgcaacctaaatccaaacaaatcatcaaagtcccaaagaaaatagcagaacgttctttttgttccctcaatagcagaagacttatcgtagctaaaccctagttctaatcagaagccagtcagttaaccagtatttattagcatcacaggacatgcatagtcatgctctaggcctctgggatacgtgttcaacgttggttacatacaatccttgatttattagtggctgacaaaacaaaagatttgtaagtaattgaagtgtaccagatgatcaaaatgttgcaaatttgcaccgattaagagaatatgagtgcatgttgaaggattgggaagcatgtgatgttaattgaggactgtctttaggagtaggcttcctcagatttaaaggatgggaaagtatattttggcgtttagaggaaactcagcaaagatacagagaaagggtgactgagaaaagacaaacttggttgtgaaggaaacatggagaaacagtaaaagcaggcaatcaggcttatgcatttgattgtaaaggaactgggtgaatactagaaggtgatacgtagcaaagaaacaggcattcaaaaagtaaatatgaaaactaatattggtagtcatgcatgggatgccccagggttctgcttaggatgcagtatttataagcgaggtaactgattctggataataggtttggcagtggggtagatagtgcagatacagccgaatgattttgctgaagttgtaccagtcacatttagcagttggttgtatatagaggataggaattctgcaaggaattttaccttgaagtgttagtttgggtaatgaaggatgtcaaggaaattgagaggtccatgatctcataacgtatatcaggagcactaggggtgcttcttggaaattcagataactggtctcagtctacatctgttgaatcagaattgttgacgattgggtctctctgctttagacgatgagagatccaataggaatagtcaggtggagagaagaattttctgatcttctgcctttcggggacagaagatgccccaggggctttcctgagagagtagggtttatgaaggctctgggtcatggtgccatatagcatttgggataatgacagagagcatgtggatgtaaggcagaacttctatcctaaaatgtgaggttgagggaagaaataacaaaatggctaaatgtagtcatgtttcattgtgtcagaagccaaaagcagttacaatttcaaatgtgttttaggtgaatcccagacagactcagaagtgttcatggcagctcctgttcactcatcccaccgttttacctccagtccctcccacctgccgtctctgtgtgacatctggcttctggtgcccctgtagtcgtttattcctatgtgggaaaacattccccttattctcaagtagctttacaccacctttcctccactgtcttggtcttgctgaaaaccaacattactaacattactgtgcagccaccatgatttgtagctctctcatgatggagtcatctgctctgcccacatctctggaaaaagataatgggcttggccttctcccctgcccctcctgcacctcctgcacctccgacatctctcactcttgagctgagttctgcagggcaagaggaattgtccaggtttgcaaggatgtggggtgtcagaaggaaggaattttggcagaggggtgaacgagggtcaaagggtagatgatggaaacagtgtgatacatttgggacccgagggccatcaggcaagttaggaggagtggtaggaatggagagtgaagggagggagggaggcaggcactcagattactctgctgaagggttgccttgcctttgagtgataaggacctatcagggttaagttccaaagtggtgcaataagataagcatttggaaggattcttaacctctcagacccttagttcctttaaaaaaaaaaaaaagttggccgggcgcggtggctcacgcctgtaatcccagcactttgggaggccgaggcgggcggatcacgaggtcaggagatcgagaccatcccggctaaaacggtgaaaccccgtctctactaaaactacaaaaaatagccgggcgtagtggcgggcgcctgtagtcctagctacttgggaggctgaggcaggagaatggcgtg

SEQ ID NO: 32838 - DNA, 2300 bp, Homo sapien
gaatattcagttactgaagtaattggttggcaaagtctttagaacagaattatttagtcctagttataaaggattgcacctttaatcagggggcttaatttgatttcttgaatgtatctgtggcttgtctgacaagctcagtaacaaatgagttcagaattgtaggaactgatcaaaatgtaatcagtgtcaattgccattgttgtagtttattgcatattgctgtcagttgctgtaatcaagaaatgttgaagtgctttaaaagtcttcagacctttgagtaattgacctcatatgtatgatgctatgcctgtgaaataaccatcacttcctgttttactttatcttcagaaagtttcagcccaacattgagttgtcatccacccttcatcatcccaagcctaaaactttttaagtagcatgcacgacttaatgtggtggtaccattttgacaggtttttctttttagtgtttttaaaaaggaaatgctaacaagatgttgccttctctatgaagacaaatacagtataagggagggaaaaaaccctgaaacaacgaggttttttttggtcttagttaagacatcatcgtggagtgagggagaaatagtcttttccatgaacctcttactttctcctttgcatagtaggtgtgtagaaaaccaggcaaattgatattgatggctcaatatcattcgtcgtaacccatttcctgcctcctccctttgggtaggtaccatcactgcttgcttatacttttcagtgactcagcagtggcaataacctgctacgtttaattatttatggaaatctgtatacgttcttcatttgccttgatgctctcaatcgttctgtgagagcatttacattatctccattgtgcagatgaagatctgaagttcagataggtttgcaactcgcttgtggtggtatggctgggccaggttgttagaagcgtgtaagcccagctttgtgatacccatgctgcattcctccctgccgccatgccacagctgagtgtaccagcccagagttctaagagtcaaagaagccatcatactccttaggggtttgcctttcctgccatcctttcattttatttctaccagaattgacactttccattccacaatttactaactctcccatctccttttttttttcctggtgccatataccttttctttagaacttactagccgttttgaattttcttcttttactttataaagaagcagccctattaactgacttaccatttgaaaggatgtttgtaagaaacacataattacacgctatttggataaagaaaactagtttaagttagaatgaatgtctagagtgttgaacagaggcttccaataaatatttcccggatgactatattatagtgttaatgtgaaaggttaactgtaaatgactttttaagtctctgtgtagttattttctgttttggttgatcatatgttaatttcagaaagatagtctaatgaacagaaatcctgaaaatctgagaccaagtttatcatcctttcaccagtttgttgccattctgatagtcatttggccattcatggtgccaccctcggttttctgtgtcatgatgatgcaggatttttttgctccttggttcagctaaatccgtgtttttgtgtcatcaccaggaaaaattagacatgcggacacagtgaagggtgaggagagtggaacttattaagcttaaggggagtgctcagcaaagagagggggtcccaccagcgggctcccacctctcatattgaacgcaaggccaccacacatgaattgaagaggtctggctcctcctttgcataaggcgggaattcccagtagctccaccctgttcccccagtgcgcgtgtgggcccttagtctaagccactccacattgatttatttccctttctaagcatgtgttaaaagaccgaaatttttaccgtgggcatgtataggcaagccttatgtgcacaatgacctgggtggatcggaggttctctggggactctaccctacttagttggctgtctcctgcctctatcaatacacagtatgagggcaacaatgccacctaaaacacctcaaaccatgtgcatacaactgaaagtgccgcttgctataagccaaggctactgagtgatactgttaacgatgatgatgataatagctatacatgaattacattgtggatgttgaaataatatactatgtctaattcttccttactcccaacccatctcttattttttgctttgatctctactacagattttacgaagtgccagaa

SEQ ID NO: 32839 - DNA, 2300 bp, Homo sapien
tggacccagccctgagatttggactgaggtgctgggaaggactgagatcagtcctctgcagggtctcattttgcttggtagtctggctctgcagtttggggttgcctccacacctcaccccccacaccctttccccaacaccctcacttcaaactggaggaaagaggtggggcagttttcagcatttgcgctgttccagtcagtatgatcctgtaagagggtctgtttggaaggttttcatctgtccatcaccagttgttgggatataactttttcattgctaatttatgctttggatatactggctgtgtgtatggtttggttttctattctggtgacatcctagaggcatctgccatatttgtaaacatcaaacatattagtaggtaagccagggagctgttttaaatgtcacaggtgccattttttttatttttccagtggagtcatatttcctggcttttcttctctccttcactgttatcggacttctcaatttaactgctctcctgttcccaccaccccacaaccttcttacatctgaacaatgacagatgacagtaaatccagctgtggataatagtccaggcagcagaggattttttaggcagataagtagtttgctattggccagagtggtctattggaacacagattttgtggaaacatggtgttggcaggttaccagttggagcaataaattaaattttcactagcacatatttgtctacagtaacttaaatcattttttaaaaatttcatttacacatgagggggcagtatgggactataaagcaaatgctgtctttgaagtagcttatttttattggtatataatagtttttaggtgcgaactttttgactgtgcaattaaaactccagcattgttgttagttgttcagcaatacacatatgtaagtgatataccctcacttgtatcgaaggttgtgtaccacttttaatataaaaaatataaaacagtgagacattctcacagtgctttttgtttttaaattatacatgtgcagaacgtgcaggttctgggatagatgtgcagaacgtgcagatttgttacataggtatacatgtgccatggtggtttgctgcatccatcaacccgccctctaggatttaagccccacatacattaggtatttgtgggttttatattcatgttttgtttaaagctggctggctttcttcctgttttctgcttccacctgaggaacgtcagccctttggagatgcagcttctattaggttgatatctctaatgtattttactttatgactttattgaagaatgaagggcctgcagcattgctggaaggaagcctctgaactggggtctcacagctatggagggtctattatcagtcacctctgtgtgatatgctttctttgtggcacaaattgcttttctcaaaagaagaaatttgctaagcaaaggagcagcacattttaattaatgttgttattactgatctgtgaatgacattatagatagatcaaggtgctaatattctaggtttcataaatgaaaggggaaataaaagaggggttagagggtattaaatgaattgataaaatccagaaaacattttatgaaaaatgtaaatgggaagctagaaaggtaatttcataagcataggctatttttaaatgtgtaaaaagtatttgcagtcatatgtttctgtttacgtagtttggaaaaaattgaggccaacgttttggtgtaaatataaccttccataaaatttaatggaatacttgtttttactgttttatcctggctgcctcctttggagatgaagggctgtggtactgtctatatctgctaaagatagttttatttgtttagttttggaatgaattatttgatatataacaatctgatgttgttttgatttaaatttaatcagagattttattttggaatcttctgttaaaaaaataaaaggctatgacctcttcccttcattggaaggaatggattttgggctctagcctgtcttgaatgaactccaaatcaaatgttgtggtgctggtttactggagtaacacacaggtttctgttcatggtaaataattcctgtcctttatgctttgttggaagatttttcggacgccgcccgatactacattccctgagcccacctgcctgtcagcatcacccccaaatgcgccaccaaggcagtcgaagagacaaggccagagaaccaagaggcccgtggccgtctacaatctttgtctggagctggaagatggtaagatgttaatgatattttttgcttgatagc

SEQ ID NO: 32840 - DNA, 2300 bp, Homo sapien
gcgcaggggcggccccgggcaaggcaggttgcgcgcccagggcagagggcgcgggttggcgagcggaggtgggatgcgggcaggagacgagttgcccgctggcggccctggggcaagggtgctgggtggcgggcgagtgatcgcggcggctgcccctgcacggttctaacctagattttgcaagaagctgagatccagggcaagaccggccctcctcaaaggagataaaaacttagtaaaagagacacgtccattcctttaataatgaataattcggcaacgcttgcggagccgccgccgcctcgcgtgcccaggctctaggtccgggactccccttgctcccgcccgccgcccgcgctctgccgacgtgagatcgatgcccagttcgctgggccgggagagtgcgcgtgacggtgggccccgcgggaaagttgggacgctcggcggggactcctggctgcggggacgccgggggcagctccaagctggggaccgaggggcattagagtctggggtcaggaccagctcgcggcgctgccgctgtcgcccctatctccagggagttcctgactggagcggctgagagttcaagtctcagccctgggttaggggtccggaatcccggagcttaactaactgttaaggagaggaggggcctttgggcacagggtgtcccccggtcccccgcctcgggctttggcgggcgcgaagcgagggtgaggcgggaggccgcacagctgccgccgccgggctgcgggtcgccgagggccgggggaccagatttaggtgtatacgtcactgatgctgactccgggccagcggggagcctaaaacggggccttacatgagaagcctaaaagtccttagaaatcaaagttaggaaccccatccttttgcttagtaactgcagcatttgggtgggcgggaggagaatcgaggagggggcggttggagggaaaccgaaatttcttcatgcagacaaccgatccttagaaaacagtttggttccttcccccctcctgtctgtttctcccacttatgtgacccaccccctccacccattataacgtgaatatcctcgatggtaagcttgctttcaaattgaactagtggaaaaatccaatactaaagtagtaagtacagtgacaaaattataaggaagtagaggagcagctcttgaccctgccacttctttcatttatctttctctctctctcttttttttttttttttttttttttttttttttggtgttaggggtctaagggatgggaggaaagctgtgtttaaagggtttttccagcacggttaaaacaactaaattcaaatcgagtgaacgtgatcgtcttgctcgctggcagcgaaggctgctgctgctctgctgagaggtaactctggagacagtggaaaggggctgggagaggaacctcgagggtcgggtgaagcccacccagagtcctccccgcgcgcggacgctgttgggcggcgccagggtctgggctgcagctcacctggagctgcaggtggagagcgtgaggggacgacactttgctcgcggaaaaaccgacttcttccgcgtcagcacacttttcacatctctccagatatcctggggtcggtcagaaggagagcagggtggacgtaagcaagtttggggcggccgagcgatgggggtgggggcagcgtgcggaggccgcctgatgtagccaccgcccggcaccccaagctcccgccgcggctgcggctttaaggaagctgccgagtccaggctgtgtcgcagcaactttgtatcagtcatgtcgcccgcctggtgactgacagcctggattgtccaataagaagcccgcctgacccgtgcggcgtggagccttgcttctcttcgggccaataggaagggttcaggggggcgggatagcaacctgaactttatctggacatgtgacccgcttttaaaagggccagccctccagctggcccactccccctccgggctttcgcccgccctctctccctcccttttttgcccgccctggccctgcccctgcccctgccccctcctctcagcccctccgcgcccggggtgtcattgggcccgggagacgggagccaacttcaggctgctcagaggaagcccgtgcagtcagtcacctgggtgcaagagcgttgctgcctcgggctctcccgctgcagggagagcggcactcgctggcctggatgtggttggatttaggggggctccgcagcaggggtttcgtggcggtggcaagcgctgcaacaggtagacggcgagagacggaccc

SEQ ID NO: 32841 - DNA, 2300 bp, Homo sapien
tgtgtaaattcagttagggttggccacaggagaaatttgtgtgagatttggaagtagactttatgccctatctgtctgtgtgggctccaggcacccctgcagatcacatgttccccctgatctgctggctcgccagattgtcattgggaagcagcagggtttgcagctcctccagctcttgtctggttgatctcctcctgcagctcttcaatttctggaccaggcgcatgaaagacttgtggcaaagggtaccagcttcttcagtgggtaacccgcattgtcaaagtccttgcctggaaaacctgcattcgtctcccctgtaataattgcctgtctggggactgcggatcctcttcagagcctgcctccaccatgtcttattgcttctaggcctgtaattaaaatcctgtcttggcaaggctccaggggtacctgtaaaggcaaacaaataaaatatttgcctataacaacaaacaaacaaaattattatccaacatacctggaaacatgtttccaggtatggtgatataaattggataataatgagaatggatcctaagggtgttagataaggatcaaagaccatattagtctcaatttgctgatatgggtgcacttaaaagagattgtagattcaatgtgttcgcagctgggaatggctctaatagtcatcttggttagaagagtgaacttccttggtactctggagatggtggtacccatccaaggttggaatactgaagaggacctgctcattcacctccctactatgtctggaggacattctctcactcaggctttgcagcatacatctgtgagggagctccaggttgggtattcctagtagtccagaaatatcagtggatactactgcaatttgactcgaaattcagtggggatgatgtgatcctgtggtgacagggaccaagttgtggcacttaatggctggagacagagtggtttggcccacagagaactttgagttggccaatagagtatgactagaacagaaataggttggcagactttaaaaatatttgatatatatacggtaacaattttttctaatggatggaagtctaactttaatcattataatgatcatgcctttcagccacttccagaattgagctgatttatagacccagagcccctgaatgaaggggaggccaggacatacatgaggaagcatcctgctttacagccaaaagtttacactgtaaatgttcttccccagctttgccctgaagggacacatggccatttctcagaagaattgttggtccctggctctgatcttaatttttggagacaaagaatatcactgtgatccaccactcagagtaaagaccaaaggatgttaggtgaacacttctttcctctcacaggcctgctttcctcttacagtgggtccagggggcccccaaacctacactggggtgatttcctcacttataaatacgtagatagaataatagactcaactattggcagaatcttgacactgattcccataacctatgcagttagggctattatgatagaacagaccaagaacaagcgaaagtcactggaagtgactctacctacccaaatggtaaaccaaaagcaaatggctttctggagaaattgcaaaaattattgccaatatcaaaggcttgaaaaatacagggttggggatctctacttaacatgcctatttggccagtgcagaggactaatattgcagtatgtagtgagtgactacaaccttaaaaaggtagtaactccaattccagctgctatttcagatgtattttctttctggagaaaaatcggtgccaggtatgcatacagctaatgttctgacaaatactttttattctatgccatttagcaaaaatctcaggaacagtttgctttcagttgaaagggctacaatatatcttcactgtcctacctcaaggctatactaactcttcagccctatgtcataatgtggtccacagggagcttaattgcctcacaattcaaaagaacatcatggtaggccatcacattgttgatgtcatgctgattgaacttatgagcagaagtagaagctactctggataatgaaacaagacagatgcatgtcaagtagtgggaaatagatcccacaaaaattaggatctgccatccctagaaacgtctagagaaacagtggactgaagagtttgggatatctcttccaaagttaaaaaaaacagttgctgtgtcttacatttcctaccactaaaaaaggggacatacctagagggggattttggagacatcaaata

SEQ ID NO: 32842 - DNA, 2300 bp, Homo sapien
gatggaacacagaaaggagagcaatgagttttatcctgctgtgtttccaatcagattttccccgaagggatacttggccaggaaaacaggaaacagacaggtggtctaaggtctgtagggtaaagttaatatatagttgcttgattatccagtcgaattgtaggaccaaagaagaaaaaggagtagattaaaagcaattactgcaaatttatgaatcacatcagttgtccagacacaagtctgacctaaatctttccctcccttagtgaatggatctggagtactccctatatggaggccattctaaactcagcaccaacaaactagaccagaaaagagtgaaaggaaagtcccccaggatgtcagtaccaaaagccagctaatgatcatctacacaaaccctctttcacagaggagaaaagcaaatctcactagggtacacaacagcccactatcactgaattatggattggtgatgactatgcttcctttttatccctttagcacttatgaacttctaacacattcaatatttttcttctttaattcatttattacctcctcccatgagaatgcgatcgccctcagaaggatttttgtctcttttacttactgttgttacctcagccttcaacgtatgtctggcatttagaatgcacttgatcattatttgctgaatgaatgaattacatcttctccactatactttttacttccctattatacgttccatgcagagctcttagaagtgaagttgatagttgtaaaaaccacttccatgcaaatacatttttcataaactctgctaccttattgggtacataaaaccccaaggttgtacagaattcaaatctaggactgtctggcttcagagtcatatattggatgaattcgacccattcagttagttttctctgaaaagaaaactaaagaaatttttgtgacaataacaaaacaatgactttttcttaaaaaagtaggaaagataaaaaagaaggaaaatggaatcagtattataggaaaaactctatagagtttacacagcagtgagcttcctgatgtattttttcatatatctacatttatatctttatccacactgttatgtctatgttataatactcaagagaaatatggtggaaagaattcactgggcctgttgctaggtgagtgttaagaaaattgcaacttcgtatgacccttcatctgctgtaggagattctctatttttctctttttgtgtgaaaaaagatgaggatgaaagactatggagttggtagctacaaagaagagagttggtagttcctaggtgtatgagagaggcttttcctactctctctgaagtgcaatctatttttttcaggagtcatttccagggaagggaaggaacaacacactgaatgaggacatgtccacctcaggggagccaggtacaaccacagaagcagcttatgtaacaaagggttcatttgtggaattagttaaggaatcaagttttatatttgtaagagatgcaagtgagcatttaaagattcacattgcctgggactttccagtatcattttgcaacccagatccttaatggcaaatgtatagattagtagtgtgtgtgagaaattttatacatgtaataagacgtcaaataggatatgtatttctaaagttgctgttatgatccaaaaccaagaaccaatgtacctcatgttctatgttcggggaccccatcatcttcctagcagggattacggggaagaacctgtttagaaaatgtgtatccaacaactccttccacttggtggcatcatcccgatcaaagcaagaggaaggctgactggggagagaggcattaagatttggggagagagttgagtttgggtatgaaatgaaagtacggtttctccccttttaatgaaaagggggaaacctctaagagaatcccataaagattgacaggccctgcaagaggaacctggccgaatgtgcgctgagcagtagaacacaaagcttctcttttgtgccatcactaatgctgagtacagtcataaagagtgggttctggaagagcattgagagtccgaagtgtagaactttatccttttcagtatccttcttccaccaggaggaagaagaactgtgtctctgaagtttgggaagtatacgtagacatggagtctggccttgagctttctgtagtagaaaggcccatgtcagcagcccttaaagggacagggtgaggtgtactcgggggaaagatggtagtaaccatactcctcccaattttccgtgatacaccacagtgt

SEQ ID NO: 32843 - DNA, 2300 bp, Homo sapien
gaatgggagttcactcatgatttggctctctgtttgtctgttgttggtgtataagaatgcttgtgatttttgtacattgattttgtatcctgagactttgctgaagttgcttatcagcttaaggagatttcgggctgagacagtagggttttctagatatacaatcatgtcgtctgcaaagagggacaatttgacttcctcttttcctaactgaataccctttatttccttctactgcctaattggcctggccagaacttccaacactatgttgaataggagtggtgagagagggcatccctgtcttgtgccacttttcaaagggaatgcttccagtttttgcccattcagtatgatattggctgtgggtttgtcatagattgctcttattattttgagatacgtcccatcaatacctaatttattgagagtttttagtatgaagggttgttgaattttgtcaaaggccttttctgcatctattgagataatcatgtggtttttgtgtttggttctgtttatatgctggattacattcattgatttgtgcatattgaaccagctttgcttcccagggatgaagcccagttgatcatggtggataagctttttgatgtgctgctggattcgttttgccagtattttattgagtatttttgcatcaatgttcatcaaggatattggtctaaaattctcttttttggttgtgtctctgcctggctttggtatcaggatgatgctggcctcataaaatgagttagggaggattccctctttttctattgattggaatagtttcagaaggaatggtaccagttcctccttgtacctctggtagaattcggctgtgaatccatctggtcctggactctttttggttggtaagctattgattattgccacaatttcagctcctgttattggtctattcagagattcaacttcttcctggtttagtcttgggagggtgtatgtgtcgaggaatttatccatttcttctagattttctagtttatttgcgtagagatgtttgtagtattctctgatggtagtttgtatttctgtgggatcggtggtgatatcccctttctcattttttattgcatctatttgattcttctctttttttttctttattagtcttgctagcagtctatcaattttgttgatcctttcaaaaaaccagttcctggattcattaattttttgaagggttttttgtgtctctatttccttcagttctgctctgattttagttatttcttgccttctgctagcttttgaatgtgtttgctcttgcttttgtagttcttttaattgtgatgttagggtgtcagttttggatctttcctgctttctcttgtgggcatttaatgctataaatttccctctacacactgctttgaatgtgtcccagagattctggtatgttgtgtctttgttctcactggtttcaaagaacatctttatttctgccttcatttctttatgtacccagtagtcattcaggagcagtttgttcagtttccatgtaattgagcagttttgagtgagtttcttaatcctgagttctagtttgattgcactgtggtctgagagacagtttgttataatttctgatcttttacatttgctgaggagagctttacttccaagtatgtggtcaattttggaataggtgtggtgtggtgctgaaaaaaatgtatattctgttgatttggggtggagagttctgtagatgtctattatgtccgcttggtgcagagctgaattcaattcctgggtatccttgttaactttctgtctcattgatctgtctaatgttgacagtggggtgttaaagtctcccattattattgtgtgggagttcttttaaatcttacatgttaaaagtagagtctttctcctatgaggcatcttattattttctgttgtcagatttggtgttcttcacgaaggagcttagtctgtacctatactgtttggaatagagagctccccctgacataggcaggatgataataatagccaattatctaatacatcacaaataagtattctgattctagaattcttctgatgcccaaagaagacaggcatatgtgagaagaagcaatcagaagattggcaggatttaggaatctatttgaaatattcattacctattttgaattggtcttaaaaatttaaagaaatataaagctggataattaaagataaataataaaggaagaatacaaggtttctatgctgtgaagcaactgagattattatgattttggggcagtgaatttgtttct

SEQ ID NO: 32844 - DNA, 2300 bp, Homo sapien
ggactgtacacagcccaggacagttatgaatgcagcccaatgcaaattcgtaaactttcttaaaatattatgagattttgtgattttttttttttttttagctcatcagccatcattaatgttagtgtatttcctgtgtggcccaagacaattcttcttccaatgtgccccagggaagccaaaagattggacacccctgctctagaggaagccaaccgacaagtcatggtgacacttaagcaactctatggaaaggtactcatgacaaggaactgaggcctccttaccattcatgtgaatgggctgtcttggaaatggatcttcttgacccagtcaagcctttagatggctgtgacccctgtcaacatcttgacagcaatcacatgaggctttgaggtaaactgctcccagatttccgatctgccaaaaatgctgagattatgcatgtttattgttgtaaatcattaagtttaggataatttgtttctacagcaatagtttacaaagtctttttccccctaagaaatactaacagtgatacaaatgaacatggccatcttaaggcaagttgatgggctctgtggagttactggtacttagatggaaacttatctcaataaatttgcaatttagtttcttgtttctcaaagtcttgtaccaagaccagcagcattggcattacccaggggctcatcagaaatgcagaatctcaaactccaccccagagctacagaatagcaatctgcattttaacgagattcccctatgacatgtaaatatattaaagtttgagaagaagcactgatttatttgattcctggtgttacagcctgtggttggaaactctggatataccttaggggtacttttaaaaaaatactgttggagaagcccgtctccagaaattctgatttaactgatctaggttgaggccttttaaggtggtggacctaatgatgctgcaggattttcctctagaaaaactacattgaagcctcagatcagctctgacttcctagcatgccccaaccccgcaggaagttaggtatgcccaggtgtatgcccagaactgccttaggagtagtattgtgcaccgagcaggagacctttctggagctgccatgaagggtgtgtatgcgtgtgtgtgcgtgtgtttggtggggcgcaccaacttcacagatgctagaccgttgcatgtgcttctaccttcttttattcatgctcttccaggactcagttcaacccgaaaaaaagcaactatgcctttcttcctgaaaggtcagtttggattgctgtctagggctgctcagaaaaccaggtgttgaatgttctaaggtttcacgtgccaaattgggatcaaacatatttgagctttatttttcctaataacaaaatgcaagtaactagtatttctcttaagtcttggaaaagatgtttttattgttgaatagacactacggcattaagatttccactatgatgggtgctcacaaatgataggcctcttaggtaagaagctttaattgacaacattaaatatgcggggcggggggagtgggtgcagagtctctctttcctttgttagggcatcccagtgacagaaacaatgcctgacacatggtacgctctcgataaatattcgttgattacataaccccctctaccacccaataacttctcatcattcattcaaagttactgaacgtaccatattagcgaatctgcaatggaaacagtggaggctgttttctcaaaggattttctaataaagcaacaaatcttttttaaaaaaaatgaatggtgtgccccaagtcaatgctgggcttcggatttctgcggtagtttggcctggggtcctcactgggatgctggctggggatgtgctccctgcccttgaatctccttcctttgtagtttttggcctgcgcggttacgtttcccaggcggaggagcgcgcgtcgcggctgcgcccattaacgcgcggcgccgggcaggagccgtcaggcgggcggggctgcccgggacccgcaggagctgctcctcccgcgccggcgctcggccccctcctccgccccctcctccgccccctcctccccttctccgcggtttggcatccccggggccgggaagcctcctccagcgctgacagcctgtcggcggcggagggaggccagagcgcggatgcttgccagtgggccgggcctgaccgctgcgtgggaggcgggctgcattatttcccgctagggccgcgctccagggaaggaaggggccagacacggccctctcagccccgaacggcg

SEQ ID NO: 32845 - DNA, 2300 bp, Homo sapien
tccaccccagagctacagaatagcaatctgcattttaacgagattcccctatgacatgtaaatatattaaagtttgagaagaagcactgatttatttgattcctggtgttacagcctgtggttggaaactctggatataccttaggggtacttttaaaaaaatactgttggagaagcccgtctccagaaattctgatttaactgatctaggttgaggccttttaaggtggtggacctaatgatgctgcaggattttcctctagaaaaactacattgaagcctcagatcagctctgacttcctagcatgccccaaccccgcaggaagttaggtatgcccaggtgtatgcccagaactgccttaggagtagtattgtgcaccgagcaggagacctttctggagctgccatgaagggtgtgtatgcgtgtgtgtgcgtgtgtttggtggggcgcaccaacttcacagatgctagaccgttgcatgtgcttctaccttcttttattcatgctcttccaggactcagttcaacccgaaaaaaagcaactatgcctttcttcctgaaaggtcagtttggattgctgtctagggctgctcagaaaaccaggtgttgaatgttctaaggtttcacgtgccaaattgggatcaaacatatttgagctttatttttcctaataacaaaatgcaagtaactagtatttctcttaagtcttggaaaagatgtttttattgttgaatagacactacggcattaagatttccactatgatgggtgctcacaaatgataggcctcttaggtaagaagctttaattgacaacattaaatatgcggggcggggggagtgggtgcagagtctctctttcctttgttagggcatcccagtgacagaaacaatgcctgacacatggtacgctctcgataaatattcgttgattacataaccccctctaccacccaataacttctcatcattcattcaaagttactgaacgtaccatattagcgaatctgcaatggaaacagtggaggctgttttctcaaaggattttctaataaagcaacaaatcttttttaaaaaaaatgaatggtgtgccccaagtcaatgctgggcttcggatttctgcggtagtttggcctggggtcctcactgggatgctggctggggatgtgctccctgcccttgaatctccttcctttgtagtttttggcctgcgcggttacgtttcccaggcggaggagcgcgcgtcgcggctgcgcccattaacgcgcggcgccgggcaggagccgtcaggcgggcggggctgcccgggacccgcaggagctgctcctcccgcgccggcgctcggccccctcctccgccccctcctccgccccctcctccccttctccgcggtttggcatccccggggccgggaagcctcctccagcgctgacagcctgtcggcggcggagggaggccagagcgcggatgcttgccagtgggccgggcctgaccgctgcgtgggaggcgggctgcattatttcccgctagggccgcgctccagggaaggaaggggccagacacggccctctcagccccgaacggcgcgcgctgcccggcgggcgggatccgggcgcggccgaggcggcggcgctgcaccccgggcctgggcccgcgcgactcccccgggggcctctcccacgctccgcgccccgccccacccttccttccttcctcccctcggcgctcccgggagcgctcggcagacgcccgagctttgtgggcgcccgcgggcccagcgcgagcctcgggcggcccaactttgcctctcccggtcggctcccgagcgggacttgtgaggcgtggccgggtggaggaggcgcttgcgggggcgtggggctccccggcaggcgggaggcacggagcaagtcgcactggacaatgacctgggcagctcggcgctgcggacacttttagctgagggcgcgggcgggtcggctcctccgcggctcctcggccccacctgcgcggagagggcgggatgccagagccaggtgtcccggcgcgttaagggccctcgcagtcagacgtccctgcaccggcgctcgcacccttagtcggcccggaacgtctttttgcggacgccctcggagcagccgcgatggccagcaccaggagtatcgagctggagcactttgaggaacgggacaaaaggccgcggccggggtcgcggagaggggcccccagctcctccgggggcagcagcagctcgggccccaaggggaacgggctcatccccagtccggcgcacagtgcccactg

SEQ ID NO: 32846 - DNA, 2300 bp, Homo sapien
agatcagtggttttgttttagtataacacttatccagtaaaaagcttcaagtatcaaattcaaatgaactacaaccataaggttaatggattttcatcagctgaattttataagtgtagcaaataattgtttgtcctagtctccactgcagttcccagacacccctagagattgccatttgtgaaatgagtgggggaaaaggatactgatttttgctcatcttgaaaatatcttaatatctgtgttaacaaaacttagagaatatgtaactaactgtcttccacacatgggtttttatttcctagatgtgtttttgtgttcttgagaataagctgtatttaagggactactaaaagttggcatttgggtgaatgtgaaataaatggctaagaaagtctttgcctttctatgattttttaaaagatatgtcaaacagtgaagacttaaggcagctatgctagaactgaatgtagaacagtgtcaatgtatcagaaattaggtttttttctttctggcttgccagcacaatctgtattcccctgtgtccaggtggacatgcgattacaggtgtttgtagtggctttaaaactctgatgccatccactaaagaaaggaaatttgtatcttaataagctaagaaagcaaggcttggaggtaccaggcaggaggagaggaaggggtaataggattggcttttggaggagggagggacaattaggagtaatcacactttttctataaatggacagaaagtaaatattttcagctttgagggttctgcattctctgctgcaactacctgtgaaagcagtcataaacaaataataggtgtggcgatgttctggtaaaaccttatttatggaaggccaggcgcagtggttctcgcctgtaatcccagcactttgggagtccgagcgggtggatcacttgaggtcaggagttcaagaccagcctgaccaacatggtgaaaccccgtctctactaaaaatacaaaagttagacgggtgttgtggtgggcacctgtaatcccaactgctcaggaggttgaggtatgagaatcacttgaacctgagaggtggagattgtagtgagctgagactgcgccactgcactccagcctgggtgacagagcaagaccctgtctcgaggggggaaaaaaaaaaacctgtttatggggattcaaatttggaattcatataaatattcatgtgtcatgaaaaattcaagcattaaaaaatgttaaacaattatatgaaacaggcagtgggctgcacttggcccgcaggctttcattcatggatgcccattttacaggatcaaagagcaaattctgagcctgtactgtctgttcagcgctagtaggaaaggacagaggggcacagcctagagctgactaaaccacaggctggagcactgtcagccctggagcaagaaaatgctgaactgagatttaatcaccctggaagttgttgtagctctctacaaagtcttcttcccaactgctgtcaaaatccagcaggctcagggaaggtgccgaggctgctggccgcctccctccagctggagttgcaggggattagaggggatgtaaggtcaggtggcaccatctgccaagtcttgggacaaaacaggcttattagcatgtctgcagtgcaaatgaagagatgccagggcttctcattagagcactggtcccagtccacaacacacaccattccagtagcatttgtagaactggaagagtttgctacctagtatttaaaaaagcaaagccaaaacaatctcaagcattgatgaactttgtccatttggtttttgaaaaatggcagatcttctacaactcacgattttctaaaaactcctgaggatctctctctcttctctctgcaccgtagtagctggtgtaagaatgactcaaaaacagggtgggggccgaaagtttcctagaaccacatttctactgaatgttgctgtgtctcacaggccatccagctgagccgagatgggcagtacctgctcacaggaggagacagaggagtggtcgtggtccggcaggtgtcggacctcaagcagctctttgcctatccaggatgtgacgctggaatccgggccatggcgctgtcttacgaccagaggtaacactggaatcatgggctacaaataggggtttcaaaaactgcagaggggactggtcgtgttggcttacacctgtaatcccagtactttgggaggctgaggcaggagaatcacttgagcccaggagttcgaagccagcctgggcaacattgcaagaccctgtc

SEQ ID NO: 32847 - DNA, 2300 bp, Homo sapien
tattaaagagaagatgggttggggcagagaggagaaatgatgtaagaggaggagagaagaaaagtaacaattcaagttatgagggagacaggtttgagagctcaggtgaagcaattactcttagcaaagaaaagaccctgttagagaaatgggaaagagtgaggggatgttgcaaagaattggaagttgaggggctcacattgaaagttctaaattttattagaagtttatctcacagtcagctgaggaaaagggatgaagaaaatgtcaatggttatgttgaatttagtagaaattatagaactagtgactaaaagaatttttaagtagtgagaggaaacttatataacaagtttaatggacatattttgcatgtagtaaatcaattaacccatgttgaatgcacagttatgattatggagcaacatttatgaaatcatgtgttctcaaatagcttttattgtgcctgcagtgtcctttaagtatattccctgtatatgttttataaatatagaatctatcatttgctttagattttttaaatgtgcattagaggatggagttaagtctcacttaagatttcttttacattattatttgtgccacatatagataaacatgatatcatgatgcatttcccaaatggccatcagttgatattcaataactgtgtattgagtttaacttaattaagtctaatcactgagcaggtccatactcttcattttttaggtacaataaaaaattatttctgattatttaagtagatgggacaagacgattttactgtttaccaacatttaaatcagaaggagaaggaagtgggggagcataaaatttttttttctgctgctatgtttggtttttttaatggagaaattaaaattattgatagaaatatgtagtgacattaatgatctatgaattaaaaatgtcattgttatgatgttttataagactgttccaggtcagccaaaaatgaactctgttaccctaataggcctcaagcctaagatgaatagagtaaaataaaaagttaaaaacatcagacctaaaaaaggcttagataccaagagtatgtacagagaactactttaatattcagctacgtattgatataacatcagtatatatttgagaaagaaaaaggaatggaaatgatagaatatataataagaaaggaattcaaacaatattaatatacttgtctctatgttcaccgtaaaagtctgttcatgttaaatctaactaaaaatatgtatagactagtaaataggaactgggattcaaacaccagcattttgattccagaaacaatgatctcacccactatgctacctccctaaaaaggtaatatccaaaaaactgctgtacatatgtagaaggactacctcctcttttgctgtaatttgtatttttaataaatctaaatatgtcattgaaaatgtcattagaaagatgtatagaagagcatgtggccacatttgggcatgtaaggaagcaacattgataatactgctcattattttcagaggattataggatttgaaaactaccacagacatttcagaattatttagtgcaatgccctcattttatagatgactggtgaatgtccaccagggttaagtcatttaaacttgattgcttagttggttgattattaatggcagagaaaggattcttgttttgaaaaactgtgagaattacaaatagctttttaaagtcataaaaaaaagagtattttatttggggcaggctttcaagtgataaaaaaaattatcaaatgtagtttaaaagaacacaaacttaggaccagaaaatctggatttcaatatggtttgaccattactagttgtgtgatttggggcaagttacctaaccttttgtgactcaattttttcatctgtgaaatggagatgatacaatttcataggattgttgtgaggattaaatgagagaaagtatggatactgagaatgatgtctggcaatcaaaaattgtttaatcttatttttagtaaattatattactgaatctgtttatttcacttttaaaattataaattacgagtaacttttttccctatcaggacggagttataatgacttaaatcagtatccagtgtttccttgggtcatcactaattatgaatcagaagaactggatcttaccttgcccaccaacttcagagatttgtccaaggtaatttctcagtaatgatgtgaaatataattgtcttgcatataaaaataaattggattgtctttcgttattttacttaacttaaaaattttttt

SEQ ID NO: 32848 - DNA, 2300 bp, Homo sapien
acagcatgcttgaccatataaaattattaacaggcactatggtgaactgttcaaggcaaacattcaattactggttattttagattgattccagaataataattacaagtagcttagaaacaatctccttaacactttggaattttagaaaattaaatcctttgacagagaataaaagagaatgtagttttactgtgacttataatgtggacagtataatcttgatgactgtcattaacacatcttacatatatttaaatataattacttcaataaaatttcatcaactagaatacactaacaaatcatatctgggttatttacttttctttctgtttttagtgaaataatttttaaattcagagaacttaatagtgttttatttcctcatttacaatttgaccaaaaataaaaatcaatgttcatttttttaaaaaaaaaaagcattttcataagtatgtagaatgattaagtatataagaactaaaaatgtagcacccacatagatgtttcaaagttagaatttagaggataagactatataccagtaaacacgtggtcctttgttttccaaaaagtataaatcctccagaaatgctttcttttcttaagtcaataatctgattattttttgaaagcttctaaaatatttcctggaaaataagatcatgtattctaaaatttgtttactctttagtaaagattattgagatacaatatattatttttacagataataaaataatagataccttttaagtctcgttaacatgataaagtaacaaatgcactgacgttaactcagtaaatacatttttaagtaaagatcagcaaaaaataaaacagtttaagaattttgtattctctggaaacataaacaggattataactgtcagattacagaagcactgacttcagccattagtttggtttggctcctgagaaacacaacatgaactactgcatcatttcttttcaaatccatacattccctgcagccgttcaagcttcatcagcagtgcaggaatgtataaaaatgacaggcaaagggcattaggtttttttacttccatactgttttcctataaatggaagacaggattctttctcaaagcacttaagctcaagctcagtcaatgctgaaggaaaaatacaactgaattctctatgcaagaaagtatcacaattggattatttactacttttcaaggacatgttgataaatctaatactgtattattatcttagaataaaacattgtaaggttagcattctagcttaattacccattattcttcaattagaaatattttcactttttaaagtactctgtcaactcatcaccttattttaacaccaagtattcagttttgcttctaattttaattataaaaatttccttaaaatatgccaattttttttgaaaatatatttgtataaatagttaattttttatttccaagtttctgtactcataaaggtttcggtgaaataggaaattccattaataattaaaagtttatttaaccatgataagtaaaaataggatgtaatgagtaatctggttatttgactggaccttaaacattcacattgctataaaactagtaccgtaattactacaacctgactcaattttttgaagaaactgggaaattttcagactaaagttttaaacatcctcatattttagtttatagtaactaaaaacatgcccacttcagtactatcacctacattctttatgttcctaatgtaatgatgcaagaggtaaagcctagagaagtctgaaggttacggactacctgatatccaaaacaaaaaattcagatcacaccctgaatgtcctccttccctttttaggaatgtcctgcagctagcccagcaccacagctctgggctgaagcatgccaatgttggcactgcctaagccaaacaaacaagatgtttaacagtcaaataaaatgtcctgcagcctccctaatgaatttgtcaaggaccatcagatttcgcaccccctcctttgcctcattaactcaagtatgatgagacggattataacaagagaatacagatgaatcggtctgaagacttgaagtggcttttagcctctagagtttctttctctcacttggtctcctttaatagaatatagtatctcctgcagaaggagctgccagttcgttttaatacaccatcaaggagctgctgatggacttctatactaacatacataaaagcagaggtgacaggggctcttcaattacagcctcctcggataccgtttcccccttcaatta

SEQ ID NO: 32849 - DNA, 2300 bp, Homo sapien
cagcgcagtgccctccggcccaggcagttcccagagcgccggcaaggcctcccgggttagagccgggctcccacaggcgcgaactccgagggcgcgaggtcccctagatccttaggcggcgaggcgttccgggacgcacgcggcctccccggagaaggctggaggtcaagcagcccaagtctctgccactccagagaagttaactaaagctctggagtccaagagtcgcgcggacacttaattctgactcttcttcctaatcgcgggaagacaaaccctaagcaacaaatccgagatagtttttttttaagcaaatattccttagaaagggacttatggcaacgagagaggaagggtgacaaactgcctgtggtccgcaccaggtatgtaagaaagaaccaagaggcccaattgtctgataccaagtagatagaaagaaattaacttccctatgcaattcaattcaggttcacccggccggactttaagagggtaagtcaagccctcccaaggggttttgaaaaagccgaactaccaggtttctaaaacgaagtcttcacccaaatggacgcatagatttttatttttatcgcataacccagggctggaatataacctcccaaatcaaactaaaaataatcacatctacctgaaatacgttaaaaagattcagaatccagacatcttaggttcatacataaaccctcagtatcaagcaaatcagaaacaatgttctagctttttttttcacccaaaagtatggaaaggctacagtgggtacaactcgtttaggataatacatatactaaaagcacatgcatgcctttcattgaaatgcctagggaggagtgaagccatctgtgtaatcaataacaggatagttatagatttttgtggcagtgaagtcttttaaaagcaagagtcaattatgaaaataaaatcattttacaaatgaaactctgtacctgtaccccctaagaatacattcacaattagatttacaacagtaagattttaagaaaactttaggtttacatttacttgccttgtttttcattaagtttgaagcaattttagtagcttattttaaaagtatatcctactaagttctacgacatgtaagtttgcaccatttctcacaacttagatattttctctctcgtaactagttaattcttgtaacgataaaataatggtattaaatacatgtgaatcttaattatgaaataattatcaaacaaggtgcttggactagtttttgccctgccctgtttttaaacagcatatcgaaattactaaaaagagatttataaaccctcaccttatatccactccaaccctcactggtgcacatatacagcaactgctctgattcttggcaacaatgggaggggaggggaagagaaaggaggatgactttaaaggaggaaaaaacctggaaaaattaggtcctttcccagattcccctttcgcttcccatttgccttcaagccaaagtaattttgttacagtttgcaccttctactacacaatgttgatagaatcatttaaaaaaaaaaaaagtgaacctttctgaaccattgctactctccctcgcgttattccagccatctccaggagagtcccttctatataaactctttttcttctttgctactgataagagaggaggataaagaggaacggctgtaaaatgtgtgcaagcatttgactcccattatctcctcctattttcttacttctctctttaccctgtttctttatcaagtgcagtggtggctgctaccgttcgccaagcgtgcctgtcttctctctcggattggctaaagcactgacagctcggatagcgattgtaggaactgaagctccaccccctcatgatggccctgggaccattcataaactaaataactccaggaaacagcgagggagagagagaaagaaagagagagggagagagagagacagagagagttagaggaaagaagagagagcgagcacgaggaaggggggcgggggagagaagcagggggagagcggggcgagaaagaggtcggaggggagaggagggggagagacgactcagaaagtggaatctgtaaaagcaagctagaggagaagaaggaaaaccctgaatcgttataactacaccccagatgcaacgcaagcaacgacttcgtcacactaaaacggattttgtgagggccaaaagtataaattacgaagcagaaatgattatcaaacaacttccagcggtttgcacctaaagaaacacaaggagaacccactacaaacaaaca

SEQ ID NO: 32850 - DNA, 2300 bp, Homo sapien
gtagctccaggtggcggtcccgcagagtcttcagcactgagaggcacttgtttcggcagccgcccatcagcaggcggttctccgcctccccgaactgtagcacccaggcgtcgctctctgccgagctctgcttgccggtcagcgagtagcactccttcgagagcaagttgaacccttcggccttgacctcggccacccgattggggccgggccaagggatgtggggcataggccactgtgccgcgctgcgaggccagatcccggtgcacttgaacgccggagtgatttgcaccacatagcgctccctgatgcgcaacttgacctcgctggtgtccgcgatcatcttgaccacatcccgatagctgcacttgtccaccgcctgggccaccagcgtctggaaacgcgagcggatcttacgcgctgagagatagcccgacgccgtgatgaactcgacccagagagacatgctccgcttccgcccatcgctcagtttgagcactgcgcagccgggcagcgagccgtcgtccacgaagttgaagacgcccatctggtttaggtagagcaccacctcaaattcggtgggcgaaatgacctcgagcccctcgtagcgggcatcgatctcgctcaaggagctgatgaagcgaggctcctgcacctccacttccttgagcacgtccgagaccaccttacagacctctcggatggttttggcgatggccgccttgcgcgcctgacagcgctcagtgtagtacttattgagctggtaaaccagcttggcctgagcggcgatcatgttggggcacaggtccgggctatacaccggcgtctcgcaatacgttgagggatccaaggctcacgcactggtggtggcccagcggctttcgaaagaggcggtgcgctccccgttaagccctactttcactctcgttttccacctgggctgaccggctgataccgtagccggcttgttttttccttttccctctttcgaaacctcttttcttctgcagaagaattaggggagaaaaggtgattttctaaaaagaaaagtacctcttggaacctttttgctttctcttgatatgtaaagatgaccgtgtgcgagagaagcggggtgggcgtgaggaaggagaaggagagggaaaaaactcaggataccaaaaggttaggcttagatgtctgcagccgagattgtccagaaatctggaaatgaggttttttaagtgccaaagtaaatttaaaaataaaagcgaaacattcagtggttcattcttaaacttctcttccacgctgataggacttcttcgctcagtgtaggtgagtgccttcttcctcaccctcccccaaatggaaggtgcaggaggtaattaatgtccagagagctgcgaagtacaactcagtccgccgtgcacttggaggtttgctgacgccccacagtctcagcgtgttggtctcgtctcttctcggggggtcgtgttatcgcagttttcctcttttcctactggaggcgttgtttggactgggtttgtttgtttgtagtgggttctccttgtgtttctttaggtgcaaaccgctggaagttgtttgataatcatttctgcttcgtaatttatacttttggccctcacaaaatccgttttagtgtgacgaagtcgttgcttgcgttgcatctggggtgtagttataacgattcagggttttccttcttctcctctagcttgcttttacagattccactttctgagtcgtctctccccctcctctcccctccgacctctttctcgccccgctctccccctgcttctctcccccgccccccttcctcgtgctcgctctctcttctttcctctaactctctctgtctctctctctccctctctctttctttctctctctccctcgctgtttcctggagttatttagtttatgaatggtcccagggccatcatgagggggtggagcttcagttcctacaatcgctatccgagctgtcagtgctttagccaatccgagagagaagacaggcacgcttggcgaacggtagcagccaccactgcacttgataaagaaacagggtaaagagagaagtaagaaaataggaggagataatgggagtcaaatgcttgcacacattttacagccgttcctctttatcctcctctcttatcagtagcaaagaagaaaaagagtttatatagaagggactctcctggagatggctggaataacgcgagggagagtagcaatggttcagaaaggttcactttttttttttttaaatgattctatcaacattgtgt

SEQ ID NO: 32851 - DNA, 2300 bp, Homo sapien
aacttctaaaattcctctttatacaattcagcttttcatctccctagcatagtgttttgcacagactaagatatttgattcttggccaggcgcggtggctcacgcctgtaatcgcagcacttttggaggccgaggcaggtggattgccagagctcaggaattcaagaccagcctgggcaacacagtgaaaccccatctctactaaaatacaaaaaaattagctgggtgtggtggcgtgcacctgtagtcccagctactcgggaggtcgaggcaggagaattgcttgaacccaggaggcggaggttgcagtgagccaagaagatcacgccactgcactccagcctgggcgacagagcaagactgtctcaaaaaaaaaaaaaaaaaaaaaaaaaaaaaatatatatatatatatatatatatatatatatatttgattccttatgcatgtacatatacaccatgcaaaggatgaattgcttttggtgtaaggaacaaaaaaaaccaatttttttggatgtttttactggtttacaatgagcaggagtttattggctcttaaaaaaaaatctttaaaaagtctcataggggttggctggtcttgagaatttgattgatctggaagttcatgattctggagtgagctctgtttttctacaattttcatagttctgctctcattttggccatatcttcaggccagcttccctcatggtacagagagcttccaatactcctagaatttgctgcttcttttacaccttgagaggaaggagggaaccaactgtccaactaaatcttgaactttgccctacctgtaccagttacatcaagtgtccttccctaatccagtttgccagtgtgggtgtgattattacgattggttcaggacaatcaggactcctatttgttgctggggtggtggtgggagtagtgcgtggcagcaatctatcgaaactggtatactgtaggagaggcaagcatccacaatgcatattccgtatgtaaactagaaatatttatcccaacatcaagtttatgttacttatctatcaaaggatatgtgtgtgggggtgggggagaggactccagtagacactgaatagaacaaaggaccaagtctacatccatctttgttttcttattttaaacaatgccttaactacagtatcataaacatgacaccacaagtatccgaattccaaaagaagagaaataagcattttggagactagcaattatagtgtatctgattactgacaaataattctaaggtgttttttggtaaaattgatgatatctaagacagtacttttcagactttgatgtatataaattgcctgggaattaaaattcaaacacaaaatgaatagatttggggtggggcctgagactctgcatttgaaataagatcccaggcaatcccagagctcttggtacattttgctaggacttaaaagaccaaacagtttcatgttctaaaggtatttagaactagctcaatttactattgtaagctgctattgtctcttttctggccctgtgcagtggcctcataactgccaacttcacttctcttgtcccactacaatccattctctaaatagcagctatatgatcattttaatatgtaaatttatcacttcactgcgtaaaactttcctctgggattccattacatttgaataaaatctaaactccttaccataatacaaatgatgtagccctggcctgccttttgaaaattatttcttaaccattattctccttattcactatgtctcaagtcctttgcaacttcacttcatgctgtttgtcgtgctgggcccctgcttcttacaagactgtctttgtctcattgttcaggtctctacttgaatgtttaccacttctgagtgtatctcatgattgacttcacagaagtaaattcttgtgggatgttttattgagacagcagatcactaaatctcagttaggtgaatgaggaatgtaaaagtagatttaaaattttggttgttttgatttagggtaaagattatttcataatggattttaaaggtttttttcacattttttatagtattatttttttttctctccaagtcactgtgtgcccagtattctgcagacaaacgagaagatgagaagatgtgtgatcatttgataagagcagcaaaatatcgtgaccacgtgacagcaactcaactaatccagaaaattatcaacattctcacagacaagcatggagcctggggaaattctgcagtgaggtaaagggatacctttaggatttggccactgat

SEQ ID NO: 32852 - DNA, 2300 bp, Homo sapien
tttatacgttaatatatctgtgatctgactacttaattttttgccagtaggagtatgtaatcaactgtttggaaatcatttatccagaggatgaattacttcttttgtgctatttgagctctgcatcattagtgaaatgtatttgtttgggggacagctcttctgttagcttgtatgacgtgtgagtttatggtgaggctatattagaagtaatttatatatttcaacaaatttgtctagtcagtcaaatatttttctgcctcagtctctttctactctcctttttgttctttttttttttttttttttcaagacggagtttcactctgtcacccaagctggagtgcagtggcacaatcttggctcactgcaacctctgcctcccaggttcagacgattctcctgcctcagccttctgagtagctgggattacaggtgtgtgctgccacgcccagctaagtttttattttatttttttaatttttaatagagatggggtttcactatgttggccaggctggtctcaaactccttacatcaagtgatctgcccaccttggcctcccaaagtgttgggattacaggcgtgagccactgcgcccggcctctactctcctttttggaactccagtgacatgtatgttagacttttggatactgtcccatatttccattagattattcatttttttcaatcttacctctttctttgtttttcaggttaaataatttatattgatttatttttatattcattgattattttttctgtcatctccattctgctaatgtgcccatctaggcttaataggtttttacttcttaaataatttcttaatagattttttacttctcagttttctccattgaatacttctattctgtctttccattcatttcatttttctttaccttttcttttttgttttctttctttcttttttttttttttgagatagagtctcacagtctcactctgtcacttaggctgaagtgcagtggtgcgatctgggctcactgcaacctccgtctcccgggttcaagggattctcctgcctcagcctcctgagtagctggaattacaggcatgcaccaccacacccagctaatttttgtatttttaagatggggtttcaccacgttggccaggctggtctctaactcttggcctcaagtgatcccacccgccttggcttctcaaaatgttgggattacaggcgtgagccactgtgcctggctactttacctttatctttacctcctgaagcatagttataatattaatagctgctttaaactctttccatggtaattccaacatctgattagtagagatttgtttttatctgtttattgttgtttctcttgaaattcatagttttttgattttttgtatgccaagtaatttctggattgtattcctgattttgtgaaagttatgttggtagactctgagctgtgttatatttcttggagaaggctgatttattttgtttgtttagcaggcaatcaacctttattagggtcagaccacaagttttggcctgctttctatatgtagtggtttcaatatcagttcagttttcaaaagctttgccttgctttttttttgggtttgtcctgtgtatatgccactcaggggctagtctgagatttgagttcgattctcaaagcttttacttttctggtttgggtctgtcatatgctttgcacagggatgagtcttgtattggttcatagagaacttttcttctctccatgactttcctaccctctcctgcctttttccagtttgtctggcttgaaagacaaggtttctgtcagcactgtagccagcgcttctatttatctgctatacagttctttcaaggcagactcaaagcttgtttttaaatattgcaatggtagatatagtgtagcctttattctagtccttgtttagttgtacaactaaagcttagtccaaagccttggatgtttgagatctttccactttgaatagaattcagacttctctcagccctgtgtgacctgtagaatttttcagcttacaacaatctcggtagttgttcttctcttgatggtgttctgattctcacccaatgcccatgcagtttagtattcatccaaatactcaaagggaccactactaagatttctagagcaatttctcaggtaaccttcttctctggtactcttctccttgaattccagccatctcattctctctgaactctgatctgtgtctcttcaactcattagaatgatggttgtctcaactcaatggtttcattgtctcaa

SEQ ID NO: 32853 - DNA, 2300 bp, Homo sapien
gagaatcgctggagcccgggaggcagaggttaaggtgagccgagattgcgccattgcactccagcctgggcaacaagagcgaaactccgtttaaaaaaaaaaaaaaaaaaagagcacgggtcttgctgttgcctaggctagtctcaagtgatcctcctgcactagcctcctaaagtgttgggatgacaggtgtgagctactacacccagccctcccttgctttttgcgtctgttacctttttcttcccaaatttccatgtgagagttaaaattgtctttttttttttttttttttgagacagaatctcgctcttcctctgtcacccaggctggagtgcagtggcaattctcctgcctcagcctcccgagtagctgggattacaggcgcctaccaccatgcctggctaatttttgtatttttagtagagacgggggtttcaccatattggtcaggctggtcttgaactcctgacctcaggcaatccatctgcttgggcctcccaaagtgctgggattacaggcgtgagccaccgcgcccggcttctgtccacttctcaaggccatctcaaataactttttcttcaggaaactatttctcaaaccactataattttttcctaagttctctagaattcttcctttgtttaatcccactttttgcttcactttcattttaggagctaggcgtatttttaaaaaggccctttgacctcaaaggatacacgtgggtgaaaaaccaccttcctctaaatttatttttcactcactaggaagaatggtttactgttaatagcgggtggaaagaagggacactgagtatgaggacctatctgtactacctaatataatttatcttttgatctactctgagaatgacgcgagcctaatcttcacattggaaaatcacgagaggaaaaaacccttcggaggtctacaggcacaaggaaccctgtctccacgctgtttatagcagctgtctcaggaatcctctgcctagaatgaatgtgggagaggtttcgtggcgcggcagctgcaaagcaaggaatctttcccattcctcgtcgactcggtcccctcccctcccctcccgaatggcggcagctgccgaggtatcccagtggaaatctccaagtctccgccgagagcggcgggcgggcaacagctgaaagcagccaggggtggggactcctcgctcccattgggcagggacagcagcctcactggctccagcgccgtcacctctctggctcgtagaggtgcctcaggtgttcttctccaagtccaatgagacacctaggcaacgcagcgcgtgttccctccgcgccaagagaccctacggtaacttaacaacagcaggagcgccaaaatccccgcctcaggacttggcagaagcacctcccgaggtccgagagtgggagaggggaaagtgtaggccctcggacggaagggtctctcctcgccgggccgggtacacacctggtgctaccagagcagcgcgcctagtgcagccggaagccccagcccagcactccggctggctcggggcccccttggctgtccgcgcgtcgtcaccgcgcccccgccgcgcggctgcctccgccttcgcgccctcccgccccgcgcactcgcgctcgcgcacgcgcacgccgcgcccggcagcactcggcgctgtcatggcggccgggagcagcttcagtgggcacacgacagccgcgcgacccgtggcggggcgagctgtggcagtagcatcctcaccactcgcagcagcctcagccgcggcgcccgtagcgccagcagcggctgcttttgcaaaggctgagcgcaggggcggggcgggccaggaagccatggagttctgtgcagccgcggactcccggggagcggactagggaaacttggaggctgcgaccaggtgcactgacctctctgtcctcccttctctccctgcggtggccgctgggtttctctggccgctcccctcccttcctgccaccacacacacctccccaccccttcccgtcgaatctcaggtgcctgagagaggtgcttcactcctcccactgggccgagcatttagaataatcaccgcccccttcccccgccttttcctgccctggatctccgccgccacctcggtctcgctgctcctgggcggggggtgaggacgagtccggagtatctgggtgaggaagaactttctacctctgtgatagcttgtgggccccccttctttcctccgatccctcctttccccgcgacagtttctctttctagtgcacctgtgaggagaggttaccctg

SEQ ID NO: 32854 - DNA, 2300 bp, Homo sapien
gtcgccttttactttggaaatgtgttggcaattcggatcatcagaaagatgtctgcttcatctctggaatatctaagtctacttacagaaaacaaatctttaacaaacatttgcaaccacatgagatttggtgcagttgaattcattttagtatttttaaaacgtgtaacacttttctaaagaaaatatccccttgcttgttcttctgcttcttttttaaaaaaatagagaccttggtcgggtacggtggctcacacctgtaatctcagcacttcgggaggctgagacgggcagatcacctaaggtcaggagtttgagaccagcctggccaacatggtgaaaccccacctctaccaaaaatacaaaaattaggcgggcttgtaataaaaataaaaaaaattagcgcatgcctgtaatcccagctacttgggaggctgaggcaggagaatcgctggagcccgggaggcagaggttaaggtgagccgagattgcgccattgcactccagcctgggcaacaagagcgaaactccgtttaaaaaaaaaaaaaaaaaaagagcacgggtcttgctgttgcctaggctagtctcaagtgatcctcctgcactagcctcctaaagtgttgggatgacaggtgtgagctactacacccagccctcccttgctttttgcgtctgttacctttttcttcccaaatttccatgtgagagttaaaattgtctttttttttttttttttttgagacagaatctcgctcttcctctgtcacccaggctggagtgcagtggcaattctcctgcctcagcctcccgagtagctgggattacaggcgcctaccaccatgcctggctaatttttgtatttttagtagagacgggggtttcaccatattggtcaggctggtcttgaactcctgacctcaggcaatccatctgcttgggcctcccaaagtgctgggattacaggcgtgagccaccgcgcccggcttctgtccacttctcaaggccatctcaaataactttttcttcaggaaactatttctcaaaccactataattttttcctaagttctctagaattcttcctttgtttaatcccactttttgcttcactttcattttaggagctaggcgtatttttaaaaaggccctttgacctcaaaggatacacgtgggtgaaaaaccaccttcctctaaatttatttttcactcactaggaagaatggtttactgttaatagcgggtggaaagaagggacactgagtatgaggacctatctgtactacctaatataatttatcttttgatctactctgagaatgacgcgagcctaatcttcacattggaaaatcacgagaggaaaaaacccttcggaggtctacaggcacaaggaaccctgtctccacgctgtttatagcagctgtctcaggaatcctctgcctagaatgaatgtgggagaggtttcgtggcgcggcagctgcaaagcaaggaatctttcccattcctcgtcgactcggtcccctcccctcccctcccgaatggcggcagctgccgaggtatcccagtggaaatctccaagtctccgccgagagcggcgggcgggcaacagctgaaagcagccaggggtggggactcctcgctcccattgggcagggacagcagcctcactggctccagcgccgtcacctctctggctcgtagaggtgcctcaggtgttcttctccaagtccaatgagacacctaggcaacgcagcgcgtgttccctccgcgccaagagaccctacggtaacttaacaacagcaggagcgccaaaatccccgcctcaggacttggcagaagcacctcccgaggtccgagagtgggagaggggaaagtgtaggccctcggacggaagggtctctcctcgccgggccgggtacacacctggtgctaccagagcagcgcgcctagtgcagccggaagccccagcccagcactccggctggctcggggcccccttggctgtccgcgcgtcgtcaccgcgcccccgccgcgcggctgcctccgccttcgcgccctcccgccccgcgcactcgcgctcgcgcacgcgcacgccgcgcccggcagcactcggcgctgtcatggcggccgggagcagcttcagtgggcacacgacagccgcgcgacccgtggcggggcgagctgtggcagtagcatcctcaccactcgcagcagcctcagccgcggcgcccgtagcgccagcagcggctgcttttgcaaaggctgagcgcaggggcggggcgggccaggaagccatggagttct

SEQ ID NO: 32855 - DNA, 2300 bp, Homo sapien
tcactgcagcctccacttcccaggttcaagcgattctcgtacctcagcctcccgagtagctgagactacaggtgtgcactaccacgcccagctaatttttgtatttttagtagagacggggtttcaccatgttgtccaggctggtctcgaactcctggcctcaagtgatccatctgccttggcctcccaaagtgctggggatcctcctacctcagccttccgagtagttgggactacaggcatgagctatcaagccgggctaatttttttttatttttagttgagattaggtcttgtaatgttgcccaggctggtatcaaactcctgagctcaagaaaacctcctgccttggcctcttaaagtgctgagattacaggcatgagccaccacctggccaaattaaccatcttaatcatctttttaaaaaagagatggggtctcactatgttgcccaggctggagtcctactcctagcctcaagtgatcctcctgcctctgccttccgaatacctggaactagcggcctgagacacctggcagggctaccttaaccttttttaagtgtagagttcagtagtgttaagtacattcatactattatgaaactaagactttgaatttatcctccaggcaactgagatttatggaattactgaaagatttcaggaccctactagaggtttaggaaggttgtcttggggggtgggtgtagtgggaggtaggggatggaggctagcaggactggaagggattgtaagtttaaaagcttgcagggggccttgtaagtaagggttggttttggcttggtcacagggttttctgccagaggggaagttagagaagggaactcaacacaccactggctgagtaccaagcctgtatgggccagatgctttccgagggctgcacacttgagctagccagccacaccttgccaggatgtgctctgttaacccctacagttaaaaaaaatgggggaggcgggtttggattagttgcaaaaatggaaacatttggagatctcacttttttttttttgacgcagtttcactcttgttggccaggcaatggcgcgatctcggctcactgcaacttccgcctcctgagctcagattctcgtgcctcagcctcccgagtagctgggattacaggcacccacccggctaattttttgtatgtttagtagagacggggtttcactatgttggccaggctggtctcgaactcctgagctcaggcgatccgcccgcctcagcctcccaaagtgctgggattacaggcgtgagccaccgcgcccggccaacgccctgctaattttatcattttcttgtaaagacggggtctggctgtgtggcccaggctagtctccaattcctggcttcagttgattcccctgcctcagcctcttaaagtgctgggattacaggtgtgagccaacgagttcggtctcactctattttaaaaaaaccttttaatcaatatataacagacatatagaaaaggacacaaataagcgtagagcttagtgaatgttcacaaagcaacaacacctgagatgaaccagcatccacatcaacaagcagaacgtcgctagcatctctggagtgatgctcatttagccctatgaaacctcatgaagccgaccgttttatcacccccatattacgcatgaggaaacaagcgtggagaggtcggtctcaagcaaagccctgttgaaaccggcatttgaatcagatccgctgactgactccaaagccaatgctctcaaaaagcaggtttgggggttagacggtgagttcagctttgaacgatgttgagtgggcgtctcgttttacagaaacttacttcccgacgtcacagccacagaaaccacaggtaaccagacgcctgcacgtcaggccaccgacgccttggtctacacagcgcagcctccagtgagcccgcggcatgccgcgcggcctccccacacacgatggcgatgtcgcaaccacagtagaaagagtggcgctctctactgtcccggaattcttgaggccggaagaataacagggcaaaggtcacgtagacggcgcgccccgcccccgtacgcctaagttctcgcgcgactcccacttccgcccttttggctctctgaccagcaccatggcggttggcaagaacaagcgccttacgaaaggcggcaaaaagggagccaagaagaaagtgtaagtcgcgactgtcgtggcgtcttgctttttgggggtctgctggaatcggcgggctggtcctagatcgcggcgtaggccggatggcgaggattc

SEQ ID NO: 32856 - DNA, 2300 bp, Homo sapien
gttccttggtcttaggtcatcagatctcagtaatattagggtttttattagtagccctggtaacagatgactgtctacatggccctgcaagcctgccattgatgtgtctttgaaattgatggagaatcagatagcacctgctacaatttgcactagtagcatagtagcctcataagacactaaattcctttgggaggccgaggtggggggatcacgaggtcaggagatcgagaccatcctggctaacacggtgaaaccccgtctctactaaaaaatacaaaaaaattagctgggcatggtggcaggcgcctgtaatcccagctactgaggaggctgaggcaggagaatggcatgaacccgggaggtggagcttgcagtgagccgagattgcaccactgcactcttgtccacaaaggcaatgaccagaggtttggggaaatagtcccaaaaggttgagctagtttgcaaaggtttttttttttttttttttcaccgaagaaatgcctaatttcttcttaaagtaaaagtagatattttcttttcttttttttttttttcttttttgagacagagtctcgctctgtcacccaggctggagtgcagtggggcgatctcggctcactgcaagctccacctcccggttcacgccattctcctgcctcagcctcccgagtagctgggactacaggtgcccgccaccatgcccagctaatttttttgtattttttttagtagagacgaggtttcaccatgttagtgaagatggtcttgatctcctgacctggtgatccgcccacctcagcctccaaaagtgctgggattacaggcgtgagccaccgcgcccggccaaaagtagatattttcatgattctatttccctaatccacaactggaccatagtcagaggaaagcactttgggaacagtgctagaagaaggagggtggttttagtagtcactgctgtcaaaatagcctgtgtcaggcagtggtaaattctctgtcattgaagatattcagtcagaggaaaggatgccatagaaagaattaacatatcaaggaatgattggacaaggtgtggtttaaaacagtggacaaccaaacagggttttcacttgtctgcaacaagatgagaaaaaggccgagcaacagtggctcacacctctaatcccaacacttttgggaagtcaaggcaggaggatcgcttgaggccaggagtttaaaaccagcctggtcaacatggcaagaccccatctcaacaaagaaaaagaggaaaacaaggcaatacctgaatcaggtatgtgcagcctttgtcggggtaaggggggatgccttgactgaaatatgtcaccataaagttgctaacttcctattttgtgatggggttttactttattctgaataataaaatgttatttcatctttttgtattaaatgtcatttctgttataatatattgttagcaaataatagatatttcttattcttccttcctttctttttttttttttttttttttgtttttgagatggagtctcgctctgtcgcccaggctggattgcagtggcatgatctcggtctgcctcctgggttcaagcaattcttctgcctcagcctcccaagtagctgggactacaggcacacaccaccacacctgactaatttttgtatttttagcagagacggggtttcaccatactggccaggctggaatcaaactcctgacctcgtgatctgcctgcctcagcctccaaaagtgctggggttacaggtgtgagccaccatgcccggcctctctctctttctttctttcctttctttcccttctttcctttccttcctttctttctttctttctttttttttttttttggttttgttttgttttgttttgtttctgagacagggtctcactctgttgcccaggctgaggtgcagtgacacaatctcagttcactgtgcagcctcagcttcctgggctcaagcgattctccacccctcagctccctgagtagctgggactacaggtgtgagccaccaatgcctggctaatttttggtattctttgtagagactgggtctcacccaggctggtctcaaactcatgagctcaaggcgatccatccgccccaacctcccaaagagctgggttacaggcataagtcaccacacccagccataaatgataggtatttcttatgctgtaagctatgcaaaattaaaaactcgtaaccttctatcagttccctttttttcctttaacatcttggtctttaaaacaaaatttaaaaaagaaagaaaga

SEQ ID NO: 32857 - DNA, 2300 bp, Homo sapien
tctgcttcccaggctcaagcaatccacctcagcctcctaagtagctgggatgacaggcacacaccaccactcccagctaatttttgtattttttgtagacagggtctcattttgttgcccaggctggtctcaaaatcctgggctcaagcgctccacctgcctcagcctcccaaggtactaggattacaggggtgatccaccacatccggccttccattgttttttgtgacaaatttagaagagttaagcctgatgggatcattgtgtttgtgaaaatgtcacttgtaattggcctgtgtgtcccttaattctttatccctacccactgataaagtgaaacaggaaggaaactgactacagttctccaaaaggaaatgttcacatggttgttgcctgcatttttggagaatgataagttccatcctttagggttggttactcaagtgcaggagcaagagggggttagtgttgtttgcttgctttttgtttttgttttataagccatcagttattgagcacttaagatgtgccaggcactgggctaaatgttagacatgcattgtctcatttaatcctcttagtaaccccaagatgaagctgagcctcagagaagagaagcgtcttgcccagtgtcacgaagttaagaagtggcagaactgggtctggaaaccttgcctgtgtagctccaaagcctttgtcccggccaggcgctgaggctcactcctgtaatcccagcaccttgggaggccaaggcaggtggatcgcttcaggccaggagttcgagaccagcctggccaacatggtgaaaccccgtctctactaaaaatacaaaaattagctgggtgtggtggtgtgcacctgtagtcctagctaatcgggaggctgaggcaggagaattgcttgaacccgggaggcagaggttgcattgagccaagattgcatcattgcccttcagcctgggcaacagagcgagactccatctcgaaagaaaaaagccttttcattatcctctactgccttcttgagcctcttgaacatagggttcccatcccaaattggcagagctgcctcttcacagagcaaaacctttctctaatgtgcctgggataaaagtgttcttacactagcccaccacatctgggtgttatcctgccaatcttagagttaactacagctcataaaattaaaagtgtgaattgatgaagttctgtgctatggactctaattgtctctgaatcaagtaaagacctgggaattcatagaccaacccattctgatccttcctaatttaaataaagaagagcttcactgataattacatactttatcagaattttttcatagtgtcaaatactatgcataaatattttatgcttttacctaattctttaatataacaatataataggtcatattaagaaaaaagttttttggctgagtgaggtggatcatgcctgtaatcccagaagtttgggagggtgggaggatcacttgagccaagagttcaagaccagcctgggcaacatagtgagacttcatttctgcaaaaataaaataaaattaaatagccgagtgtggtggctgcacctgtagtcccagctactcgggaggctgaggagggaggattgcctgagcccaggaagtcaaggctgcagtgagctatgattctgccactgtactccatcctgggttactaagtaagaacttggctcagaaaagaaaataaagaaagtaaaaaagtgtttgcttaagctttgtatatcccttaaaagcagaaaagccacaaattctatcacacttgtcatttagagttataatttaagaaaaaattattggaaacttttacttctgaaacttgatagcaacataaagtattagataatttaaagaagccttcaggctttgaaatcttaagaccccttagtttttttttccccactactttttaagctttgtagaactcaatttcaaataaaatcttacacttctgaccacacctctaatttgataacaggttaacagtcttccggcagaatggtgtgaagctcttcacagttttacagcagagaccagtgatgacttatcattcaagaggggagaccggatccagattctggaacgtctggattctgactggtgcaggggcagactgcaggacagggaggggatcttcccagcagtgtttgtgaggccctgcccaggtatgacaaccgcaagacatgaatgcgactcctcacggggagcctgaaaccttcaaaactatatacattcctttcccctctggccatgctcagtttgtc

SEQ ID NO: 32858 - DNA, 2300 bp, Homo sapien
atccaaattcaggatttgttttaccatttagcacctgtagttcctcttaatcagattaacacctagctaaaccgatcgatttcagtcatgtactttctaattacttaaccttaaatttatcttatgaaaatctgaaaaaaatataattgttgccttgattttatctttgctagattgatatcccagaaggaggaaatgggaaaagagaatgtgtttcatctcattgtgttaagtaagttttatttgtgttcttttacacaaaatacaaaggagataaccatctatatcatgaagaattatcaagcttaaaacactccaaggccaggcatggtggctcagacctgtatcccagtactttgggaggctgaggtgggaggattgcttgatgccaggagttcaagactaacctgggccacatagcaagaacccatctctattatttatttattctttattttaaaagaaaacacttcatatggtgataattcagattctcatcgtgtctttttaattacaaagaaaacttgtttaaaaggtgacaatgggttaaaattctgatgaaaatacatcatgaacctgctgatagaagcttacctaagcaactctccaacatcagtgcaggacataaagaaagcagcaaagacagtctatgccagtgcttcctgcagcctggtctcagcatgagcagagatagtttcatcatttactgcattttattttggccatctggtgttcacccagtttttagaaggttcaagtatttttgtcatgagaaataattaaatcctatagaaatatgaatcctacaataactgctagacattttgtatgtttttgtttttaagaggaactagaagaaagtgaaggaagagttaagttgaaggggttttcctttatctctgaggacgtttccctgaatttatatacccttttatgtgtcattgtaactcctttgtgatttaaagcactgccacaatgcaactttatattctagttaaatgagcaaattaatagaattcattacctgctgaagactgtaaacctgtctatgaataggtcagacataagcagatgctcccagaggactttagaaaacaaatgcaaaggttatcacaaataagaaaacttctgatccacaatagttgaattctatttcagattcagtttttctctatttttaagcagcatatactgtgtctcagcaggttgaattcgaagtgggcttttacagtcattgacccattgatctgacttaaatcagaattctattaaagctagaatcaaccttttctttttaggcaattgcttctccttagcctgttgctattgaaacttcctttctaaaccctcaaatctagggattagtattaaagcacaccttctagagacacaattttatctctgcttttatcttattttcagtcaaaattgcagatcatgtaaggattgttccaaatgtcagaaatgaagcccttttaaaggagattaaaaaaatcatttttaaaggcaacagggttagttccaagactgtgtgttatgatatgccaagtttctgttttctttaaacctcctagtttttaaggccagctcactgattaattgagcatctattgaacatcaactttgcccagctgatgcccattgcattctgccctgattagtagtcagaaaatttgattaattgccctgagattctcagggttagcactcctcaactcagtgcatttatgattggaagggttcagactggaccacggattgctgtggcccaaggatacaaacatacggagactggggagtaagaagatcaaaagacacagcagggtaaactaaccacccagctgcgtgcactccgcgaccttgagcttcagcctttctgagtgaataggttcatatctgttacttaaaagtgtaacttactctttttcatggaataatttcaaattagcctagtataccttattccatggtaaacccagaataaatatttattgaaagactgaatgaaggtttttaagcattttaaaagcactctctagtctaatccacaaaatgtgttcttcattcagaggctcaagatgtgttgctcggtttgaatatattggagagcagaaggatgagttgagtttctcagagggagaaattattattcttaaagagtatgtgaatgaggaatgggccagaggagaagttcgaggcagaactgggattttccccctgaactttgtggagcctgttgaggattatcccacctctggtgcaaatgttttaagtgagtatagagaattttttttattatg

SEQ ID NO: 32859 - DNA, 2300 bp, Homo sapien
tgaaaccaagttttaagggcaagcttaatttgttttttaaaatgggattttataatattgaaacatgtttaaatgatcacagttattggcaattaatcatttggtatttaaggaaaaggttataaatattcagtataatttaaaaatcataaaagtgagttttggctcatttataagaaggagaaaaacagtctgaagtagcccaaagatttccaagctttaattaaacatcctttacaaaaaaaaaaagcaatgtaatttaaagagtcagcattttttttcttatgaagttttggggaaatattatttcctgagtgtgttggggacttagaaagtaggaaaagtggaaaacaaaaaaacacagaattagaagaatttattgagggactgggtgtggtggctcacgcgtgtaatcccagcactttgggaggccaaggcgggtggatcacttgaggtcaggagtttgagaccatcctggccaacatggtgaaacgtcgtctctactgaaaatacgaaaattagccaggtggggtggcacacgcctgtagtctcagccactcgggaagctgaggcaggagaatcacttgaacctgggaggcagaggttgcattgagctgagattgcatcattgcactccagcctgggggacagagtgagactctgtctccaaaaaaaaaaaaaaaaaaagaattttgtgagggctttttccccctccaaaaaacagaaattttggctttgagatcctttggcttcccactcaacagaagatctgaaaatattctccacgtattaccttcatttcccaatccttgggctataacatgttcagaaaacctgtttaaatggaacagtttgacccttcccctacagaaatcttcctattaatctccacacttccagtttctctcatctaccattaggataaaacattccaactgtgactgtcttttattgttcatattattctccttcactcttttcctcttttctacgaaactcttttttagcccatccagcccttttgctagagtggtaccagcacactgctttcttggaccttaactatttctccttacatgccttcctctcagaccatcctgcaagtttcttttacgttcccacctccttctagttcaaaacccactgcaaattgttgaaaccaaacagtgatgagataagatctgcctattcaaagcaaaaccaactaataaccatccctcttactatgtgtttaaatttaggagcagtgtgtttcttatgtgtgatcacggaatgaataaagagcatgtatatatatatatgtgtgtgtatatatatatatatgtatatatatatgtgtgtgtatatatatatgtatatatatgtgtgtgtatatatatgtatatatatgtgtgtatatatatatatgtgtgtgtgtatatatatatatatatatatatttttttttttttttttttttttgagatggagtcttgctctgttgcccaggctagagtgcagtggcatgatctcggctcactgcaacctctgcctcctgggttcacgccattctcctgcctcagcctcccaagtagctggaactacaggtgtccgccaccatgcccagctaattttttgtatttttagtagagatggggtttcactgtgttagccaggatggtctctatctcctgacctcgtgatccacccgcctcagcctcccaaagtgctgggattacaggcgtgagccaccgtgcccggccaagagcatacatttttaaattctcttcagggcctgcttaaattttccctcaatatctcatgaatccactgagtgcatgaccatgcagtgcagttgctcaggctgtggtccacaacaggagactggtttcttcctgtcagtgttttcacttgttattaggacatgaataatttaggcagaaataggttaatattgtttaaggctgaaaactcttttaagctactttctataattcaactgcatttctacttgtagatccagccaaaaggttgcctagaatttctcttgacaagttcttgtttcagattaaccttaactaaaaagcattctctgctacttgcaggaatccaaccacccaggtcaaacaggaggttttgtgcgagtacccccaaggttgccaccgaggtaagtaaatgtgggaaaagttagagaaaaattaatgactcagagacccaactcttttttatcaccaagattgagtgttgttggccttgaatctttttttagagataaaataatctcaccgatttcacgcaggcccctaatccactgtctgctc

SEQ ID NO: 32860 - DNA, 2300 bp, Homo sapien
caggcagaggcgctcctcacttcccagacggggtggccagtaagaggcgctcctcacttcccagacggtggggcggccgggcagaggcgctcctcacttcccagatggggcggcggtcgggcagagacactcctcacgtcccagacagggcggaagccgtaaaatagtgtttaatgcatagcaggcacccagtcaatattgaatgaacaaaactgctacaaagaaattgatataaaagtgctaagaaattgatataaaactacaaagaaattgatataaaatgatcctgggtttgtttttcaaaatatttatataataataatacatgtaatatttatagaaaatacatggacagatataccaaattttagacaataattaattttagagagatgagattacaagaggttttctttttctattttatataattcttaatgtttctcacttttacaacaaatatttctgtgaagtaaaaaaagtactattatacttgttatatatttgttataataaattaaagaattaaggaatttggttaaatctaaaaacaggagctttgttttatgggtgacataggtcacagtggaaaaaagttatattattaatatagtagtttttttttgagtttgatgacattcttttgataatcttgagttggtttttttaacgtaagactagcctcactcactgtgagctggtaagattccacagaggagtcatctattttttttttcctcagtagcataataataattttagctagcttgccatctggggacccttcctaagtggtagataagaaacttaaaataggattgtactttaccatcatatttccccacccagcactgttactggcataaatatgtgagcaagtgactggtgagagagtgatgcctttggcagggtatctgatggtgagatcgactgagaactgagtggaagagaaggcgaagtatcagattgccaaaagggcttttattcttagctcagcccttcacgtatcctgcaaagagctgctcagcaaaaggtgcttattgaattacacctcataacaggcagaatttgaatgctgttcatcacaggagctatggagtgcatagttttatagagagtatctccccgcaggcaagatacatagaacaggtgcagaattacagcatatactcatttcgcctcttgttaaataaaagcaaagacagtctcatgcgatcctgtgtgctgagtagaatatccattatagagcattttcttttatttttgttaatatttttacttgtagatttcccattaaaaaaaaaaaagtatagtcatttttccaaaccactaaaaaggacacttatattaaaaactgtttcagtaaaaaggtttacagccatgcttttgtttaaagtatttctcctaagtatatactgtccatttaaaatattgggttggcgcattactttcaatgacaaccactgcaattacttaataaatcggttaagatggaggaatgccgagtcatatatccttcccccaaaattaaatatttgaagggatatgtcttattttatttctgggatagaatgtttttcattttcatgttactgaagtgtagttttactaaactactaaatcggagactgctaagcaccttccctgtgccaggcacagcactgggtagggtgagggccctgggagtaaatattctgggacaggcacagggggtgtacagggaaagagtctttcctctctgtggcatctgggaggctttaggatgtgggaaagatggtctcctcatctcagttgcccctcattttcaggcagacacgtatgaaatgattacactcccctgaaagatcagcttctacataattcaagatcatcctcaatctctctcatcagagaggaagaaaagccgcatgaattatttacagaacactaagttatttccttttatgagctccaactttgtttttgtctctgcaaactgagattttgtttatccatgaatagtttccccaggggcatgaaaaatatgactcttaaattatgaatgaggttttttgtttcagtccatgttaactaaaacatgcaaaataaactatgtttttcattagatccctttcagctccctgcaaaaacagaaccaataaaagaacgagcagttcaaccagcacccaccaggaagcccactgtaattcgaattccagccaaaccaggaaaatgtaagcacttctctgctttctttattagcttcttcaagaggctgggagaaatatatgctaatttatcaatgtctgcttttgaaatta

SEQ ID NO: 32861 - DNA, 2300 bp, Homo sapien
gtctcaaaaaaaaaaaaaaaagaaatgctactcgaaagataagacaccgtgaatgattattggaagaactattcaaatatgtaaaatccagtttttggaaagacaatgtcacctgcctcacctgctgcactcatgtttccttctgcaacctgcttcccttctgcccacaactgaagttcctcaccttgttctgctttttcatttttcaatatacttctcacctttttcaatatacttctcaccttctaataaacctcgtgaattgcttatctgttacatgtattgtttcttgtctcgatcttcctgctggaatgcaagctccatgaaggcagagttctgtgctttgttcactgctatattcccagcacctaaaatagtgttttgttttgttttgtttttttaactaaaaagtaaagtttaatgttgaaaatgcaaacttggggaagacagaaaagatcacacacaaggctgtcacttcacacttggaaggttgcacagcggccgggcagaggcgcgcctcacttcccagacggggcagccggtaagaggcgctcctcacttcccagacggtggggcggcctggcagaggcgctccttacttcccagatggggcggcagccaggcagaggcgctcctcacttcccagacggggtggccagtaagaggcgctcctcacttcccagacggtggggcggccgggcagaggcgctcctcacttcccagatggggcggcggtcgggcagagacactcctcacgtcccagacagggcggaagccgtaaaatagtgtttaatgcatagcaggcacccagtcaatattgaatgaacaaaactgctacaaagaaattgatataaaagtgctaagaaattgatataaaactacaaagaaattgatataaaatgatcctgggtttgtttttcaaaatatttatataataataatacatgtaatatttatagaaaatacatggacagatataccaaattttagacaataattaattttagagagatgagattacaagaggttttctttttctattttatataattcttaatgtttctcacttttacaacaaatatttctgtgaagtaaaaaaagtactattatacttgttatatatttgttataataaattaaagaattaaggaatttggttaaatctaaaaacaggagctttgttttatgggtgacataggtcacagtggaaaaaagttatattattaatatagtagtttttttttgagtttgatgacattcttttgataatcttgagttggtttttttaacgtaagactagcctcactcactgtgagctggtaagattccacagaggagtcatctattttttttttcctcagtagcataataataattttagctagcttgccatctggggacccttcctaagtggtagataagaaacttaaaataggattgtactttaccatcatatttccccacccagcactgttactggcataaatatgtgagcaagtgactggtgagagagtgatgcctttggcagggtatctgatggtgagatcgactgagaactgagtggaagagaaggcgaagtatcagattgccaaaagggcttttattcttagctcagcccttcacgtatcctgcaaagagctgctcagcaaaaggtgcttattgaattacacctcataacaggcagaatttgaatgctgttcatcacaggagctatggagtgcatagttttatagagagtatctccccgcaggcaagatacatagaacaggtgcagaattacagcatatactcatttcgcctcttgttaaataaaagcaaagacagtctcatgcgatcctgtgtgctgagtagaatatccattatagagcattttcttttatttttgttaatatttttacttgtagatttcccattaaaaaaaaaaaagtatagtcatttttccaaaccactaaaaaggacacttatattaaaaactgtttcagtaaaaaggtttacagccatgcttttgtttaaagtatttctcctaagtatatactgtccatttaaaatattgggttggcgcattactttcaatgacaaccactgcaattacttaataaatcggttaagatggaggaatgccgagtcatatatccttcccccaaaattaaatatttgaagggatatgtcttattttatttctgggatagaatgtttttcattttcatgttactgaagtgtagttttactaaactactaaatcggagactgctaagcaccttccctgtgccaggcacagcactgggtagggtgagggccct

SEQ ID NO: 32862 - DNA, 2300 bp, Homo sapien
ccactgaggccagcctcgtggtttccaggaaccccacccccaggactgggatttcctacatcatctgcagcaggctcttggaggcctaatgagctggttcctgctgaggtgaataaacattacattatctctttgcattttattttttaaatgaaattggaagataagaacagtgagactgtcaacaccttagctattgcccttagatgtctaaaatcttcattctttacttttcagctcccaccatcttatgaacaagttataaaagaaatcaaccaagttcaagttaatactacaaataataataatgctgctgctactccaaggcacactattacttctgcaactcagactgacttttcagaagaaatagacaacgatctgcctcaaagtaatgcaagtaatttgtcttccctaattctgacctagttctagggaagtaatccgtaggcttccagcctttaaaataatttgcaatttgtgcataattcattgagctctgctgcccagtcagtgtgatcactgtgtgcttgctttatttgggtgtgcagtgatgattataatagatcattcttacaaactgcagccccaatctcttgagcttaccctagtttatatcacaaaaacattatccgtataattcatggtgggtattaccattgattccctttattccctctgagaaggatcttatatttagcaacttatacttgataggatgctaagggtggttgtcctgttaggcttttttaaagtgttgcactgtggcttatgcctttaatcccaacgctttaggagactaaggcgggtggattgcttgagcacaggagtttgagaccagcctgggcaacatggtgaaatcccatctctgcaaaaaaatggaaaaattcgctgagtgtggtggtatgtgtctgtagtcccagctactcaggaagctgaagtgagaggatcgcttgagcactggagggtgaggctgcagtgagccgtgttagagccactgtacaccagccagggcaacagagcaagaccctgtctcaaaaaaaaaaaagtgttatatgaagagcactcctacaggaaacagaataaacatttccatttttgaatcactttttactaattaaaagaaaccaaaatctcttgatattccatgtatgtagttttaaatctgtgtatcttctatttttttccttatacattgttaacgttatggcttgtttttatttgttttggttttgttttggtctcgtcagcactacaggcacctctcaagcctcttcagcctttctcagcagtctcgtctggcaatcttccaacaaatgtggcacctttaatcgtctttgatatttctgaagaaccgaattgtccagaaaaccccagtgctacaagatgtccagtgccaaaaccaagatcaaaaagcaacctcagaccaatacccagagattctcacattaaagagcaaagtcaacagaaaatcagcccagcagccgtaggagaggagtcatccccaggccggccccagtctctgctggacaacgctagcacctcagacagtcaggcagtgatgaacattatgaacacagaacaaagccaaaatagtattgtttccagaattaaagtgtttgagggtcagacaaacatagaaacctcaggactgcccaagaaaccagaaattactccacgttcacttcctccaaagcctactgtttcctcagggaaaccttctgtagctcccaaaccagctgctaacagagcttctggagagtgggactctgggactgagaacagactcaaggtgacctccaaggaaggactcaccccataccctcccctgcaagaagcgggaagcatcccagtaaccaaacctgaattgccaaagaaaccaaaccctggccttatacgaagtgttaatcctgagattccgggaagagggcccctggctgagagctctgatagtgggaagaaagtgccaactcctgccccgcggcctttgctgctgaagaaatctgtttcctcagaaaaccccacctacccttcagctccactgaaacctgtcactgttcctccccgactcgcaggggcatcacaagccaaagcatacaagtcactgggagaagggcccccagccaaccccccagttccagttctgcagagcaagcccttggtggacatcgatctcatcagctttgatgatgatgttttgcccaccccatcggggaacctggctgaagaatctgttggttcagagatggttctaggtgagtgaaaaatcagcagtggaggggaatctaaactcatgatag

SEQ ID NO: 32863 - DNA, 2300 bp, Homo sapien
aagtataagtatataagacacacagatacgcaacacacaccccattatttatatgtatttaagctaaaagatggctttatggcaaaatgtgaaatccaaatatttgtatactttgagggaaaagatcaagccaagaacatgtgtttcaatttgtttttcatggtcaagaggtgagggatgggaaatattgtgagtaatggataatttacccttaccctcaaattatcaactatgtgaattcttaggagtaacattttataagtactgcgtatctatatttacacaggaatgtaacacagataacactaatagtgaatttggggggaaaattttaaaatttcccccagcagataatcaagtcttttgttgaattttaattactggttcaatagaaaagtgctatgagaagacatttgtattttcttagagcagaaagtataaaaatgactgtagaatttcctgttttaaccaagaacgaaggagagctgtgagccatttgcttcctgagtggccacattccagctgtgcagactggtcatagcacatctgccaatcagaacaggccctggagggaagcccttggatactgagtcttgtttacatgcatcgtgactctgtttctcccttcctcttgtgtgttgtaccactaggaagattagtggggaaatttgctattacatgcctaagtaaactatgtaactaggatcacagccacaggaaatgatgttctggacagagttttagctcggctttagccacaggtaagagttgttgctttgttatatgaggatagctaatctgtattcagtttctggctttactttgagacattatacttcatttttgtagcgaagctagcaggctaaaaactggagaatgattgagagaaatgatttaaatgtgccctgcgttactatgactttaaaatcttaatactcatcaaatgaaaaacatgatattttcatttaagggaggggtaaaaccaagttaaattaaaacagaaaagttttaaaagctgcagtaatactaagtcacagtgtagaaaaattggaaccagaaatgtgctaacactatgtgtttggaaatcattatatctaagcaggcatgctttattgtgaatctttttacttattagtctttcagagaacagtgttttcatgagtactaactctttggctttgaaaaacatttcttttttattatgaactcattcagaaagaattgttacatacgtttaactgtgtaaatcctattccttttcttccatatttctttctagaagttttagagtatgtttcataatcctcttattctgttctaacagcaataaaattaaggaaaaactaaaagcattcctgtcttaatctttacgttgccattaaattctatcttgttagcattaattcagaagatactatagaaaactgtattttgataatattccataggattttttcttaacgtcattgcttaggatatattgtggtttgtatattgcttcatattgtttatttttgcataacactgcggccttttacttcatttatttttaattcttaagcatatagtggaggaaaaattgttactcaggttcaaaaaagacaacctgtgggttttatggttctcttgtatatgatagtctcaaggttgattaatagcatgttacagcagtctagagagtcacttttgaaaagttcaagcatctgtgctcttatttcttaccctatagcagggtttctcgacctctgcactgctgacattttggatgagataattcttttggtgaaagggaccgctctatgcattgtaggatctttagcaacattcctgctttctacccatgagagttcccttcttcccagttgtgacgatcaaaaattttatatagagagcacattatatctaattactggagaaacattgaaatccaacttctgaaatgttctgggtggtagatagttaagggtgaagctgtattggtcttagtatttgcagatgttgtagctgactgctcatttttccccctccccattctgttagaagcttctgccaaccatgattcatggaatgatttttttgagctgagtaatctgtggctttgcagtttccttgctttctttccttagctaaatctcttctagtgttagcaaagtatttagcacaggaaagatcttataaaatgaaataatgcatgtaatgatgcattttccaagtagatgattttaacaaaccgtaagcttttatgcctgtccttcattgtgtcttttctgcctctgtcaggcgaactgtgatgaagagcc

SEQ ID NO: 32864 - DNA, 2300 bp, Homo sapien
gttaggacttcaagatacgtttttttttttttgagacggaatcttgctctgtcgcccaggctggagtgcagtggcgcgatctcggctcactgcaagctctgcctccagggttcacgccattctcctgcctcagcctcccaagtggctgggactacaggcactcgccactacacccggctaattttttgtattttttagtagagacgggttttcactgtgttagccaggatggtctcgatctcctgacctcgtgacccacccgcctcggcctcccagagtgctgggattacaggcgtgagccaccatgcccagcctcaagatacatttttgaggagacataattcagctcaaaacaatagctttaaaataatctcctcttgatttaagctagcttaagtgagcctcagttgcctgtaactgaatagttcttaccaaaatatctacattttctggtcttccattattatttgagacaggttctttccgtcgcccaagctggagcacagtggtacagtcatagctcatgtagccttgaactactgacttcaagtgatcctcctgcctcagcctcccgagtagctggggacttcaggtgcacatcactacaccaggctaatttttaaatttttgtagatatagggtctcactgtattgcccaggctgatctcaaactcctggtctcaagggatcctccccgttcagcctttcaaagtgctgggataataggcgtaagctaccacgcccagccacttctattattattattattattattatttttttttttttagacggagtctcgctctgtcgcccaggctggagtgcagtggcgccatcttggctcactgcaacctccgcctcccgggttcaagcgattctcctgcctcagcctcccgagtagctgtgactacaggtgcacgccactacacccagctaatttttgtatttttagtagagacgggatttcaccatgttggccaggatggtctcaaactcctgacctcaggtgatccacccgcctcggcctcccaaagtgctgggattacaggcatgagccaccgtgcctggcctattagttttaaactgcttatatgtttctttcaagcatcccaatattttaagttgcaagagagcagtaacattttaatagttcattgaattctgcctccacagacctagcaccctacaaacaattggcacagaaaacaaaaggcagagtgaagatttctgaggtagatgttgtggtgtaccatccagacccccctttagaactgaagcattcattcccttagcagctaggagtgttggctgctgacagttcacagctaagtcttattccaagaactgccaacagagccacctcacccaaggtaatgccccctcctaggaggtggcctgcatccaatgatgcagacccctaagaacgcatccttcttagctcagtacagaaagtctctgagggccacctcagctccagagaaacttgtgagataggctgtggcctctgttgcaaacgcatcacagttcaactctccctctaaccaatcctactacccacccaagagctgctgatcctgagaccactctaaaataaatttcctgcacacaaatctctgtcttagagtctgtttcccaggaaacttgacttgcagtgcagctaacactgtaacagaaatgaaaacaaacaaacaaaaaaactcagaaaaattaaccagatactgggttcatttcctcttttccatttcttgcttttggagaatcctgtccaccttctatctccttgctagagacagggtcctgtttcttccagtgccctcaaccagccactcctcaacaccacaggcagaaaccccagaaaccctgctctcccaggacagcagggggcgccacagaccccagttcctcccctgggtcctgcagctgcacttctgaagtctggtcccttcaggatctggcagcgggtgaagaccaaaggagaggagggggtgaagcagaggaatccatctaggagaagctagttctggcagctccccattggcctcttcctgggagcctgagtccaggaagcaggaagcgctcactggctctgaggacagagacatgggccctgctggctgtgccttcacgctgctccttctgctggggatctcaggtgagcgccagggtggggttgagaaggcagaggcagaggatttttactaaagagggcatcacatagaacaatgtgacacttcacccatgggatgttagttatgagtagcacagcctgagaaggtcctgagaggctactatatacccag

SEQ ID NO: 32865 - DNA, 2300 bp, Homo sapien
actatatgaatgagatattcttagactgttatagatcagtatataaatataaggactcagcatattctaaatttacatattttttcttttctatgaaacttttctttgatagctttaggcaagtggtacatataatcacagagtgtaaaactatgtgaaaaatgatataacagggagagccaaattcaggagtaaatattttcacattgactccagttaactctgcctcttggtcaattattcattcccaggtgtatgaatcattgcagtaagaattggattttttttccccagtcattcataaatgttaccagttggctcatttggaaacttggagtttatattattagtgacatgggactaatcattggaatttgagctgatctaatctggtaatgattttagttccaatcagtgtatgcagatcttgcctcagaacactgtgtagtattagttggttgtttactattgagtaatgagtaggtcactggttaggtaaaaagaattgacctcctactgccaatcattccttgattctgttgtctaagaaaatatcttttctttttcacactatgcaaggaaacccttgctcttggtggccagatgaggaattggactcctttatgacacacatcttttaaaaaaattgatatgtaatagttttaggtattttgggggtaatgtgatattttgatacatgcatacaatatataatgattaaattggagtaattgggatatttataacctcaaacatttatcttttctttatgttgggaacattccaattcttctagtcttgctattttgaactatacaatacattgttgctaactatagtcctatagtcaccttactgtgctgtggaacactggaacttactccttttagctaactattttcctactcattaaccaacttctcttcattctctcctccctccaccctctctcagcctctggtaactacgaatcaactctctacctcatgagattcactttttaagctcccacctgagtgagaacatgtggtatataaatcttataaataaaaatcttttaaattaaaattatcaaataattaaaggggtatctgtgatgactggatttgccctatttaacctccagtaaaaaattttcctaaacctgcgttggtataaatctaaatgggtttgggtgtggtggttcacacctgtaatcccagcactttgggaggctgaggcggctggatcacctgaggtcaggagttcaggaccagcctggccaacatggggaaaccccatctctactaaaaatacaaaaattagccaggtgtggtggcacatgcctataatcccagctactcgggaggctgaagcaggagaatcgcttgaacccaggaggctgaggttacagtgagccgagattgtgccattgcactccagcctgggtgacagagtgaaactctgtgtcaaaaaaaaaaaaaaaaaaaattctaaatggtataaaaaatctttgtagaatcatatgaatatcaagtaagattttttggaattttgttttaaaaatagtaattcctagctgtaaatcacttttgtttgtttcagactgatgacctattttccatttttatggaatatcaaaatgatgacatcacaatgcttttgtgatttaatttgtataagaaaaaagttatttagttcagttaaatgacacattgatgtttacttatttagatcctatctgtattttattccccaaaaagaaatgcagctatcttaaatatggcagcgacgcttcagtatcttctctggaagctgcaggtatggacctgactaacatggctgagccaatccctgctcttctgcctggtgttcatgttacatttcttggttttcattagagtttctcagccccactcaaccttagcactgttcattgtaaaacaaacaaaaacgtaggggtttttattacattaaatagaatcttttatcaggaaccacaggataaatttcattctgactcagtaccaaaatagttctttctttgagcaactggtttatttttaccctgtggacactgaatcttaaaacagatcgtgtttctgtctgcatgttggctgcagcaaagcttagagtccctctaagctgaacatctacaacacttctcttctggctctcattctaccttgtggctacagttactggtacgcatatcttatcctactcgtttaaaagttgcttgaagaccaggattctactgtggtcatccctcggtatctgtgaggaactggttccaggacttttccagttttaaacttgac

SEQ ID NO: 32866 - DNA, 2300 bp, Homo sapien
taataataatcaggataattgccacatttctttctagggctgtcaatgcttcttattcccaaagtggggagctgttaactttgtctgcagcaacacagtaatggacaggagccttaatgcatggtctttttgtttatattctgttgtcaccctagagtttgaagtatttcaagtgttttaaagcacattttgtatgaagataattatcatgcttctaatgtatttgggagctgaggtattttaattaatgatgtgccagcaaccctttcaaatagggtgaagtgtgatttttaaggccttcatctgcttggtcataattagggacatttggaacgttcaggcataatatctgctgatttgcacactttcattaagcaatcaggactgaatgaccaagtgaccacactttcattggatcaggttccaattgttgaggtggaggggccttctgtgctttctcctcctctcccctgcccagtttttcctataacatttacacacattctgtgttcatctaaaacaacactactgtgcgtattttttcaaggccttgatttttgtagaatccctgtaccgcattttcttttttcttcttttttttttttgccttatgaaccagtctggccgaatctctgttagaaagtaaaattttcatatgagacagactgttatgggagtgttaaaggtgattaataatgtaaatgaaaaagatgaagttcattccatgagggagggagaagaagagttctctgagaactgaaagagactgttgatttcatatctaagctccataaagagaggaaccatgtttgacttgttcactgttgtcttccttgtacctagcactggtcctggtacagagtagaatttactgaataaatttatgtgcaatgcatgccacttacgtaaattacattggtatctacaaggacagagcctaagtcagaatctggatctccagggcccaaaaagaagtatatgaagaagagaatgaggtaaagaaggcaagaatttaaaaaatcaacacagaaatatataaggaatgtaaaagaaagttacaaaataaaaaaggtaagttttgctcagtagcattttatatggaagaaatgtagagtatgtggatacgtggcatcgcatatttcaatgctgctatttgattatttttttaaaagcagaagttgagtagctacatgacagctctgctgttgtttggtctatatcgtttttttggttttgtcattgcgaaactgggatgattttcaagctcagagtcttcattatttttcccctttccaccttaggtttatagttgctgtgttgaatttcataaatctttttcttgctatttacacagattgtgtaatttctaatctactttcatttgccagatcctttgtacattaagtgggtcaaaagctagtacctcaagtatcttcattcaacaggattttgagttttaagccagtcctccaaacacacactctgttgtgcagttttcatggacaaggtactctttctttttctaccctcatggccactctcattacagacatccagaggtgccacaagagcctcctggaggaaggttagcgtatgctcctttagtactggggcactttcaggcaacacagtgagtgccatccttatgtcctaaagctaggtaaggattctaactcctgaatcagatcaaagaggaacttggtggggggtgctttctgggatggcggtggagtcagggagaggacagacatttcctgaggaataggagaaacagataataggagaacagatagtaggagaagacatactgagactgggaagaaaaataggtttaattggacttagagttccacatggctggggaggccttagagtcatggcgggaggtgaaagggacttcttacatggcagcagcaagagaaaatgaagaagcaaaagcggaaacccctgataaacccaccagatcttgtgagacttattcactgtcacgagaatagcatgggaaagccttgcccccatgattcaattacctctccctgggtccctcccacaacacgtgggaattctgggagattcaattcaagttgaagtttgggggcacagccaaaccatatcaaccttattgatgtttttgcaggtgagtgcaacactcgactgtcagataataattgtagccctttagctgtggagagagatctgtactagctacccactctagggctggagcatgtatataagggagtcagtttaaggagtgtttttggtggtatgtaggatttatttccccagcctggttgacg

SEQ ID NO: 32867 - DNA, 2300 bp, Homo sapien
gttctttactgggaggtccttaggaagtagcgctaaccacaacagattcgaaatgccaaccctgggagagggcgacacacctgggaggtcacagcttggatttcgtgagcttgctgacacccttttaaactacacctccatggagagtaaactccaggggtggcatccttcttataggaaaagaagttgtgtttttccaatatccacctatttcatctcttctgaccttaactaaaaagatgacagtgagggaattattgatgaaactgggtcagccattcttaggaagagcctctgggctgccacagggagcgatggcgaggctcttgggcatgtcctggggctggctctggccctctcccctgcccgagatagtcaccacttgaggatgggcctccatcacagagtggcagagctgctccagtgccccctggtcctgcatcagttcaagctgcttttctgaaacaatctgccctggagtcttgccttccctcttccacagttcctcaaacacctatggaccagagaagggagaggaaagagaaatgagaagtcagctcttctgccagctccatttgcagtgctgtgctgtgtggagctggggtgggaatgagcagattcaattaagtccccactgcctgggcctggcccaaagggaaagggcacctggctgccctgccagagcgttggctctcctgaggcatccctgagtgcagggctggggaacaaggccagctaggtggagtgaatgcacctggggtctcctcctgaggctgaagtctccctcagcataaggtgtgagaggactcgggccagccagatgccctcgtgcccagagggatggtgagtcctgcccggctgactccacatggcgggggggggccgcgggaggcgtggaggtgcccatcactcatgggcgcctgctgacgggagtcggcgggccactgatggatctgtctcatggccgccgaattaattgaggtgacattttggtgaaggatggggccacacagcctgcaggaggtaaccacggtactaaataaagtccagaaacagcatgctgggaaagatgactttagggaggcaggaaagtagccccgtaatgaagatacaaaatggcaaacaactgaaaacataaattagaatccacaggggccccctggcctaccacattcatctcctacaggtagagccggacccaaatcagactaggataatgaacgctaatgtttggggcattttttttttacttaaaaaatgacaacaacaaatccccaaattcatcaaacctgagaaaaaggaaaccattttcaaggaaggctatttcctagggtagctgttttcctcatttctcttgtcttctagcgaaagccagaattgggagccgggaggagggcttcctctgttggtctcccaccggtgccacctccgtccagtccacagtcatgactgaacacccaactttccctgttaccttggtggccgagaacgggccaaccaggagccattcctcctggaaaaacagagctcttccataattagcacgaacagcaaagcaaataaaagggagatgctctgagtctcagcagggctcaaagtcttccccagtctgattcaaaaacaaaccacaaatacttatcactgctgggacaggcactgcgccttcagcctggtgcctcagaacgtgcgctgtgactgtggccaaggaggtgtgcttggcaggtcctgggtaagctccctacagggcacccctctgccgctgcccgactgctcaggaaaagcctggccctactcttagaaaaatacagaatgcacgtgcctccaactcaattcagcagatatgtacgtggcctgacaatgaggaaaccattgggagaaagggggcacagaagcgggaagaaacttcctcactctcaacatgcttatcagtggagtgctgccagcagaagcactggggacctggatggcgttccatggagctgccctgtaagtcggaggagtccatctgccccctttctctgacacgtttattttttgaactaggacttaaattttaaaaatcattttctaataataaaagttaatacacattcactgcagaaaatataaggaaatacaggagagatcaaaagagatcaccggaattcccattttctcaagaaaaccaatgttaatattttggtgttttttcttcccatctttttctttctgttttgtaacatacttgggatcataacgtatattcagtttgtgtcctgctttctttcatttagcacagaagtactttcttaataaaaaga

SEQ ID NO: 32868 - DNA, 2300 bp, Homo sapien
aaataactacctttaatatcagatgaacatcatgaaggaagaaggaggaggagggaggaaggaaagatagcaataaagactttcaaaaactgaagttatggtgtacttttttttagtttatttcttattattaattatatagtgtcaagcattttatctggatattttatgtatttattgactttgtattatttatttatttttattttatctggacattttatgaaaagtacatctgtgttgcggcacgcatcagtccttcacgcctttttagggctaaatggggctgctcgtctgccaagccccttcaccattgtacggacacattccattttgtctgtccattcatcagttgatggacatttgagttgtttccacattttggctattaggaataatgcagccttaaacattcatgtacaagtttttgcacacaggctggatgtatacctataggaatggaatttctgggtcatatggtaatgctgtgtttcattcatataatgaggaagtgccagactgtattctaaaatggccgcaccatcttacagtctcacctgttagtgtgcaagggttccagttgctccatgtcctcaccagcacttgttattgtccatctttttgattctatagccgtcctagtgggtgtgaagtcgtatcagggaggatttgatttgcatttccataatctgttgagaatatttttgtatcttatttttatagtgtacttttttaaaaaagaaaaatgtgttacagatatttttttccaaatttaatagaagagtccaagcatggcttgggttttagaaagctgtgagccagaacagagactctctgatcctactggttattggtgttgcctctggcagaactggaagaggctccaataagtgattagatagatgaccaggggataaggaagaaaggtgactgagtgactgactcctagggatgacagacacacagaaagaagaatcatgtcctgagagcagaattccgaattccaaagaacctcccactttgtgctctaattggttatgaatctgcctttctctgcctgtctctcacccacttccttgtgcattatcttcattccttctgcctttcactgcaccctcctcccaggtgtcctgccagtgctcccgacatttacaaacctcatcccttcagcaccccagagccaggggagttaagaggttgctgccacaaagcagccttgttcttcagaatcagaaatagaagctgggaaattatatatcatcatgagcagttatctcctgggaactgtagacaaaagcaccccgtgtgcccctcacaagacccaggctgtgtattgaagtggcaggtggcaccccgtctcctcccctcactaaagacagggtcagcttggacacatcagactcccaaactgtcagagttacagctaacctgaaaacagcctcccaggattcccaagcctcttgtgactcgccctggatgtcgtccagacagctggttagtcatggttcaagggaaatcgcatgggttgtgtaggtgtacgaaggagatccttcatgcacgtctggaaacagatgcagatgatccaccatcccctgaggattgtccagttaacgtttctggaattgggtgccgcagagatggaaatcgcgtttaacacacaagtgttccataataaccaatctcttgtctactttgtggtctgctttaaagagaaatcgccaaaaaccttttaatgtacaaaatgttatatatcatgcaccaaagctgtattacaaatgactagatgtctttttctctctttagtgcttcagttatctgcacagtttactgggccccgctttattaggggcttgggttgatgtttgtgcctttctagaaaagtaacctttcacaatacttgcctttgaccaaaaagggggctcccttctctgtaactgtgacagctccctccatgccatgtcccttgaacaggtctttccaccatatcctgaccttggaaacccaggacaggcagggagaggctagagtcttgtgtgctttccttcaggatacttcaaaaatagctttagctagaaacagttgggtggcaactaagagggtgtgtaaattcagtcctcagggaaccaaaggccgagtctctgccccatgtgtcagagccggctccagtgtctgtgtgtgatggggagttcccagcttgcattacccagtactcctggtcggccatttattaacacagaggaccagcactgtgctagaaattccttgttacatctgtttgtcttgggtaggcagcagcaggg

SEQ ID NO: 32869 - DNA, 2300 bp, Homo sapien
ttactgaataataccgcttcagaaacaaagatgagcttcccttatagcgcgttttacccgtaagattaggattttcattaaatgtgttgctctcccttacagtggttttcaaaacattcccaatcttccatttgatggagtgaatcgccttttaaggatgctgattaccagcgatgaggtaacaagtgtccccctctctttttagctagagatacaagattccattctcctctgttgtcctaacaaaagtgaagccattttgtgctcagaggcaactctcctgacccctagtctgggccagaaaaacctgaggagctaaataagtaaaagaaagctagcttacctagagtaaaggtggaaaacatggaaactcagagggaagactctagtaaaggatctagagaatcatctgaaccttaaataaagggcaataattagagagaaattttggaacaagtctccaccactcccttccagtccctgtcatttttgtcattttcatccttggtcaaatgactgatacttctggtgtggcaatttagaacagtgatagtggatgaaaaagtagaaaagatggaaaaaataaatgatgacaattttaaggacagtaactaaagtttctttcttccatatggatatgcaattgaagtgtattaaaggaaaagatcaaaggttacagccaactaatcaatggattattgatcaataactgaaaatctatcaatgtgaagtatacaaaatatgcagcttttccccttgccctgctctatactcagaattaggcatcactgatgtctacttgatttctcctcttgaatgtctccaaggcaaccaaactcatatgttttctttgcaaacctgttccttttctggtttccttatctcggtggataacttcatcagccagttgtgcaaaccagaaatccaggagttatttgtttctcctagccttccaccatcatatccaatccatcagagtccttcaattttacttcctatatctatctcaaacagatccatttctctttggctctgccaccaccctaactcatcatctctcccctaaacaattactgctccaaagggcatccactccatcctttgtcaaatgcattctccacactgcactactttattcaacaaatatttttaaggaacctactttgtactgtagtgaataagacagacgaggaatttgtggaaatagaagataaacatcaggcagtcaaaagcactacgaggacaatcaaagtcgggtgatgaaatagagagtggctaaatgactattctagactgtgttcaaacacaagaaatcggtggcagttttaacaaggggtattagttttgacacaggaaaatgaaggaagtccgctgggacgatggtatctgctcctagcatataaggagtgtgtttctgatactggccaataataaaaaggaggttaaaatgtacatgaacattcaatctagggctgtttgtctccaattacctctgcttaaacatagcacttactacctatatggaagtatcttatttttgttaacttctgtatgtctcccttctttagaatgtaagctccatgaacatgcgggccataactgtcttgatctctgcagtaactacagtgcctaagagaactgagcctggcattacggtaggcatgcaaataagtatttgttgcattaacgcacaaattgctgagtgaagcaggagagtagacagagaatataacggattgggtttgggggctgaggaagtctctgctgagctgtcaaggtcatttacttccccttgcaaggttaactgggttataaaatcccggccacgctttagcaccaagcatcaagcgctcacactctaacttatacacacgctcacagccacaaacctctccaactccccgctaggaggagtcacacctccccacccagaaaccctcccaccctctcctctatttctccttccctcccctctccgcggggttccggcaggcttcgaatcacaatgctcgccgggaatagtagtcttccggtccgagcctatggcgtttttaatgcatttccagaactacgcttcccagggagcctcgcggcatagtgaggctgagtcacctgaccaagaccctggagttacaatggcggcgcccatgctgcgctggggctgccgtggaagacgttgggctttcgcccgggttgacggtggttcttgccaccgaagaggggctccgactgggtccacatccaaccagattaggggagagagctcagtggctcagcagcccctccacacggcccagaag

SEQ ID NO: 32870 - DNA, 2300 bp, Homo sapien
tagaaacagactcattgtcagataaatgtaaaacaccgcggtccgggaaggcatttaatatgcacagggctcctatggaaggccaggggagggcactgaactcagcctcagtgagtctggaagtgtcctcttctgagtcagaagctggacgtggtggtggtggaagtgtgacccaaggggtggggagaatgtgcagttattcatgttattgaatgaataaatttaatgtccctaggcatctgaatttctgaataaagaaaaaaagctccaagctgcatgctttattccataatatgctctctggcttgcccatattttaggctagttaattcccacatgacaagaatgtaacacacctcacagagctggttacttagttcgtgtgtcttggagtattttatggcaattttgcaagagtgaagatgactttaaggagaatgaaaacctggctatcttgtgaatcaccttagcatcagggtgttcactatcaaacgaaagcagagtggtggcctattaagatgaataagaaagctttcccattttcttgaggcctccctgactatgaggggtcagtttctagatgaatgagatgctaagtatcactgccacatggattcagaatagcagcagggaggtatcaggcactcagcatctggccaactggagttacaggatttcccctggcaacatggctctacaacaatccgagctgggactaaggcctcccactccccttcgccagcatctgtaattcccgtcagagatgaactcagttcttactggtaaccttgttctggttaccttctagtttctctctcgaggtctaactagaaggtttgacaaaagatgagagtaatttatggatacgttagaccttggcaccttagttttagtcttctattctgtctcaagtggggctgacctttaagattggctgagaacatagtttcctttctttcctttcaaaatctttgtcttgtctcttattctcactccatttggagtcatgttctctctcacacacacatatgcctgtgtgctatggtttaaatgtttatgtccccccaaaatttgtatgttaaaacctaacccccaaagttatgatatgaaaagatggggcctttgggaggtgattaggtcatgaaggctttgccctcatgaatgggattagtgcccttataaaagaggcctgagggagcttgttcatcccttctgccatgtgacggctcagccagaaggcaccatctatgaggaatgggtcctcaccagacagtgaatctgctggtgccttgatcttggacttcccagactccagaactctgagcaataattctctattgtttataaattttttagttttaagtattttgttatagcaccctgaacagactaagacactatatttagaatgtcatagatccatgcagtttcagcatgatggctggcagaatatcatttgggaaaaaaacattttctttttcatgcttttatttttttttttagatggagtgtcactctatcacccaggctgagtgcatgtggtggcgctatctcggctcatcgcaacctccgcctcctgggttcaagtgatcctcctgcctcagcctgtcatgtagttgggattacaggtgcccaccaccacacccagctaggtttttttgcatttttagtagagatggggtttcaccatgttggccaggctggtctcaaattcctgatctcaggtgacccacccacctcagtcacccaaagtgctgggattacaggtgtgagccaccgtgcccaaccttcatgtttttttctaccccagtttgcagctaggtaaaggcaatgtcaaataccaagttgtgccttggttatacctacataaaaaaaaagaaaatagttttataatctgagtggtggttttaaaataggtccataaattctttgatactccttccttcaaaaggtggaggctaattaccctccctttgagtgtggtctctgcttagtgactcacttcttatggatagaatgtggtggaaatgatgatgtgttaccccgtacgctaggtcataaaaggaactgcagctttgttcttgctgtctcccttggatcacttgcttggggggaaccagctgccatgttgtgagatgctcaagcagctgtatggaggagcccatgtggaaaaaaactgagcacccctcacaaccgatattcccttaccaggagtgtggcaagcctccctggaagcagactcttcagcaccagtcaagctttcagatgctgcagccgtgggcaatgactttgctgcaatc

SEQ ID NO: 32871 - DNA, 2300 bp, Homo sapien
gctccagcacctcttatactcaagccagtgatgtgtgtttcggaggtcctcagaggcatctcctcacaagcctggctgtgtggcctcagtggtgctgaggaggagatgtgtcttctctggctggccccaggccttagatgcactccatccagctccgcctcctctcgcctctgtgtccttcatgcatgttcctgcctcccgggccactgccaacatcaatctgcttagggacccgagaccagtctcctcagagagtgtgtaatgagccatccaacaaccactgtggatgtgtccagactgtctcaaaggctgttggatatttgctgggtccgctctgggtaaccttgcctttgtgctaccgaagaggaacaatggctggatcatcctggaacctcctcctggagaatgagcagcagcatttgtcctggctgccttctggaggaagtgaaatccaagctgcagagccactctcacagctggtgctggttcagtctaccgcagatgcgaagtatctaatggactgcctcttgtctaggggcaggtgagagcagaactcgtctaacacactttgaggacagaggggcatcacccgtctgtgggcattcccagccacatttccctccctggttcagggggaaggtctccctgcattatctaactccaactcatcatgctcaaaagaaaagtcaggcgatctaaagcccacagatagccttgctcccctgtctctgtcaaaaacacatatgaaagcagagaaaaattcatcagacacggaagcaattggagaagagaccaggagaaaacaattaggtaatgaggatgtgcattaaaccatctctggcaccttcttgacccagaaacattctttatgtcctggtaatgatggcacattgaacattccagggaattccaatcctggaaatcaagaaggagacttactctaaaggcataggcgaaagtgagttgtcaccagggtgcacagcttcctggacattctactggaataaaacttggctccccaggggccagcaggagtcacccaagggcaggtcccaagcagtctcccttccaggctctgtagtaaaaatgaaccactcttgattcgaggttcagagtctgaggtcaatttccccaccccagatctcactgggggcattagatcccctagggccttcttcagacccctaagatttatcactggcttcagagagatgaaccaattcaattagcttttccattctcccagcttattttccaggagcggagtgtggcgctcattgtcgcagtcgaacaagctaaagagcctgcaaggcccaatactgactccaggagatactgggaagggcttgctagtgatggaacctggctatgaatcttgctttcctgattctaaaattgactctgcctgaaggtgctgctgaggtgccctgggtacttctccagcggtgggtagaggagtgacagagggaggagtgcccctgacacacaaacaatttcaggaagacagtttccctattatctattatatagattggggggtgcattcatttattcattcaatatttattgaacttccacgtattccaggcactgtctaggcgtctgggccaggatagagaggggagtaagatagacctttccttgctgttacagaacttacgtctttgttggagagacaggaaataaacaagtaagttaaaaacccacaatttggggtagaggcccacaggtcaggttctgcaggaagtagactctgacaaagagatttgcaggaggtttttggggcgtgatctcaggagcaacaagtgtgaagggtgagggacgcaggtcggacagatggaaaagttgctttctgtcttcctcctgaggagctttgcagcttgggacaacaagcagtgttgtcctaattaagattggaggactgggcatttgcactcccatgtgaccagcctttggatgcaagctgcctccaggaagtgggtgtacatgtgggtggagcagcttcctctgacagaggaaatgacacacctctgacactttgcaatgcttggaaagtgtctcaggtgtgagttggtggagcctgcactcccagcagctaaggtgacaagcgtttttcggttctgccaggggatctgagtggcacacaacaacatccactatgaaatgtggtgtgtgctgggtgggggctgactgaggagctcgagagtaggagtgaggcaggctattttaaagaggtggcaagggaaggcctctctgagcaaaggcagagactttaggcaaagacttgattggtgtgagga

SEQ ID NO: 32872 - DNA, 2300 bp, Homo sapien
cagactattttccacagcagctgcaccatttgcacaagcattccaatttcctcacatcttcaccaacatattttagaatcattttgagaaatgaaatagtgaatacaaaaatatgccatatagaatgtaaactttacattattgctacatactgtgataacagtattggaaatttgacaatgtcttgcatttcagtggttttgagcagagagatggaatactctttataaagatggaatactttataaaatgtataactgttattattggtgaaggcaatttactcttgaactgtaacactttagggattgatgaaccattgcacatcaagagaagaaaagtaataaaaccaggtttcatacacagtccatggaaaagtgcatacatcagacagcacagaattgatactaactggaggcgaggagaactcaaatctcctaaggtaactgaactctgcacaatgtaacagaaaccgttaatcagtgttagtacctagtgtactatttcacttggcaaactgtataatatgacactcctcttctgtagaaagaaaaccgtatattttaaaataactgaaagtattaactgacaatattcttttattgctaatttctctaatctgacaactaattgtgcttgaataaaagataagttaaattgagtatctttttatcttacgtaaatgaaaatctctcaatatcctattgaattttactgtgtcatacacattctacctaagaatttgctgcctcctctgatcacatactccaaacatgattttttgaggagtgtctgtgttttggatttggtgacttttgtgtgtcttatttttacaaattgaagcataattctggttttctgtctaataacatttcaaatacataaagaatggtaaaaacacttgaaattattgggcgtatttttacaactggaaaaaaccaatttggggagacattgttatactaatatgtatatattatgattttttttgttttaagaatgctaataattgttactctttgtggttaatagatgcttattttgttcttgtgtgtcaaagttgtaaaaattagaggcatattcttctggtttgaacagatggaatagattattgtcaaatacattggtgtttgaaccatctttatgaggtcttgatgcagtaaaactttaatagttgatgttttgagtataaataatagactatggaaacaataaaatgtttaattctggattcgtcagccaggaaaaataatgctttatataaatttaaattctagagatagactacaaattactgttcctgtttatgccttcatttttctcttcaccagtattttaaagaacataatttaattaacatatttctaatctgcacatctttcttataggtgctgaaaggacatgatgatcatgtgatcacatgcttacagttttgtggtaaccgaatagttagtggttctgatgacaacactttaaaagtttggtcagcagtcacaggcaaagtaagtttactcttcctacacttcacaaagtcataattttgtgtatatcattgcaagtagcaactggaaaaaagaaaacaataattcatttttgattcttagttatttggatagcaaatatcagagctcataacttagcttttttccccatatttatgaaagccaatggcatgaggatagtgatgcttctcatgatagaggtttcattaattttttttcatttacatagtttgtctatctttgtgacagatactttaacattttcaagggtgctttatgtttttcttggctcaatttttccccacttttatttactatctaagttatacctcattactttgtaatgtttttcaaaagtatggttgagggatatttatttttccttataaactgctttgttgataacctacctgtagtttagaacttaataaatcatgttaatttatacttatctcaaacccttgtgagatgagagtggacaaggcatttaaatgttaagtttgaagaaaaagcccaagcaatcagcttgactgtgtaccatatcataccttaatgattctctagtgaatatttatttttatctgtccagtagagaatattttcatgaattaagtaattgccacctaaaaaataacagaagagagtatgaaaacaaaaaaaaatccatgtcttttaaaatgtcttttaccatgttgcttcttggcaagtatcttataaatattccaagtcagatgttaaaattttttaaagcagctttatatttccatagtgtaatattagtttgggatttattacagg

SEQ ID NO: 32873 - DNA, 2300 bp, Homo sapien
aataaaaatcattcccaaatgggaaccatggtagatggaggatatgtggtagtagaaagacttctcagtgtagaattttttgtatatcattttgatgtttgaagcatacaaacctggtaataaaacatggatctacaggacagtacccacatacaaacaatatttgtagggaacaggttttcctgtaactcacagccctaagtaggagccatataaccatgggagcagtcctttgaatatacaaagttaagagatattttctttaggttttgagacagtatcccctacttcattaaagttggtctcttcttaactgagtagatttaatttgaaaaggttagttcaactagaaataggacatgatttcagttgaagccaaagtatatactattatagcactagtattacacgtgtcttatggaaaacttgttaccactgacaaattctggatgaaatttcaggtgttctcatagcccagaacattgaggaaaatcaccttttttccccctttcctaaatcttgagtcctcagaacttctgacaaaagagtttatgggtccattcctaacaattagatttttttgtttttttgcttcccttcgaagtgagattatttagataactaacttctgctgagtacatatacatattgttcctgagggtaagaattaatttaagagccaggtaggagattttttttaaagataagtagacagtagaatataatttctagaagactcaagatgtacatcttcataaaattttacgttatcttaatttcatttatgttttaaagtaaaagatgttgcattgacataatgtcttagttataaaggtaaacatttttatttttaaaattatgatactactttatgcagtatttagaaccattttactaaagaaagccatttaccaccatagcagagagtattaaaatgttagtaagtccaaatggttgttttgttttgtttttctggagaaacttacttcgaatagtggtaactataggcacacaatttacttgtaataaagaacactaatggggagggtaggagtaaattaactagaaccttaataatgggcttttctagctcaaggaatcttataattgtccctgaaggtagttgtgaaggaagttgcaagatgaaatatctagatttgtgtagtagtcattccaggaaaaatgttgccttctggcaaactttggcatctttattatgtaaaatgcctttttaatgataagcaatatagattgtcaaaataattttggagatagaagtctagtgcctcctgtttactccagattaaattagcaaataaaagtaagcctctccagccagcacagtgtttgctcttttggggataaaatagccttttggccaaactttacacacttaggtagtactagtttgttaatcttacaaagatattcttatgattagtaagaattgatgaagtgtatggcaatttccctgaaaattactatgttttaaaggattgaaatggaaaagcataggcaatgtttttattaaatcaataccaaaatacgcagtttgaaatataacttagattacataatttctgcaaatgctgtcggctccaaaccagtttactttattgtcagtcaaccccagagtatattaatttctcttttcgggattgcctgttttgtaccatccaagctacttgaaaaatctgattagtctgtgccaggactacggtaggatgacagtgaaaatagcatgctttgcctcagttcagggggaccgtatgaaaatatatcctattttcaaaatgtttctgaaaagacttatttgtggaaatgttccttgctatttaaaactcttcaaaaatgcaggttttacaaaatacaaaaataacctcttgaaagtttgaaaggggagagggggctgtcgtgtgggggcggtctctgctgcccacatcctccctctgttcagtgcgttgtgttcttacgggttccctggagcggatcaccatataattgatgtgcagtctgcattgctgaatcctggactgcaccattctgtgttcaagggaagatgtaatctgatccctctgctgctgagggaggaatctgttcagtcaaggctttgacagggcatagtctcctccaataatcttctccgttctctctcattattccctcgagttcttctcagtcaagctgcatgtatgtatgtgtgtcccgagaagcggtttgatactgagctgcatttgcctttactgtggagttttgttgccggttctgctccctaatcttccttttctgacgtgcctgag

SEQ ID NO: 32874 - DNA, 2300 bp, Homo sapien
ttatacaaccattaccactatccatcttcagaatattttcattttctcctactgaaactctgtgccaactaaacactaactctcatttccccctctccctgtctcagacaaccatgattctgttttctatctatgcaaatttaagtattccaagtaccttatataagtggatcatacactatccttttttgactgacttattttacttagtatagtatcttcaaggttcatgcatgttgtagcatatgtcagaatttccttctttttcagagctgaataatgttcccttgtttgtatatgtcacattttgtttattcattcattcattgagacttgagttgcttctaccttttggctattgttaataaggctgctataagcatgtgtatacaggtatctgttcaagtctctgcttttaattatttaaggtatatactcagaagtggaaatgctggatcatgtgctgattttatgtttaaattgttgaggaactgccatactattttctacagcagctacattcattcatttcacattgccgccaaggatgcacaagggttctgatttccccacatcctagcccatgcttgttgtttactgttttgttttgttttaaaaccatcctaatggatgtgaagtggtagcgcattgtggctttgatttgcatttccctaattagtgatgttgagcatcttttcatgtgcctattgaccatttacatatctttggagaaatctgtttttgtgtagcattgctgccagtgattttgcatttttaactacattttaaattgtggtataagagaaaggtctactaataggaatgggactatttcttgtgcatagattgccttcccagcagcccactttaatatttagcaatgctaatctttccaaagtcaaaaagaaatcacccatttctaactttctcctttcaaatcctttcttgtctccgtcaaaattcctgctataaaactccataaaagcttggaagttaaaagttggaaggagagataagtggagctgactggctgttggaagaagaaaatagaatggaaagagagaatagttgattgagcactgtgaatggatagttcacaatcattatctactatctgttaggaatatggattatagtataaagattaattaacacttgcacaaatggttaatttagggaaatatttgagataatgctggaaagtttagtttggggccactttgaagagagtcttcatctccagactttatcttaggccgtggagaaccattgaaggttcttgaggagtaaacggcacactgcattccctctctgtgttttaggaagatttatctgaccatactgtgaaggagaaattaggcactagggatttgcaatggactggctagttactctcccattttactataattacttcccatcatagattactttataaataaatacactttttacatgtctttaatcagttgggtgactgttatgctttcaagtataatcaataagtttttcagaattaaagattgacaattgaaaactctggtacaaagattaatctgaagtgtgtattaatagctattagagaaccagagtatacagtatttaatgtctagtgagtatgagataaagaatggtgtgtatggaaaagggaaagagagcacacacttgaaaatagtgctcattataatatatctaaggtagaacaaacatacatatgtgtgtgtgttttttttaaaccatacgtaaacacagttcaaaaaattcaaaacaaaatttgtaacagaattcaaaacattcctaaaatattaatgctgacatttggataaggaagacttaatagatactcaagatacaatgtttgttttttttattttatttttgtaagtaaaaatttactttcactttctaggaaacactcttagattagttagttggagaaatattaaaagggaccttacagcacagccctgctttggttgtgttcacattactgactttgtatgagaggttcaccagctgtttgactggcaggagcaggagctttcacttcagtagtttataattcctggctattctaggatagtttgcacttcaccaagcctcagacaggtcaggacatttggtaggggaaggttgaaagacaaaagcagcaggccttgggttctcagccttttaaaaactattattaaatatatatttttaaaatttagtggttagagcttttagtaatgtgcctgtattacatgtagagagtattcgtcaaccaagaggagttttaaaatgtcaaaaccgggaaaacc

SEQ ID NO: 32875 - DNA, 2300 bp, Homo sapien
tcaaagatgtatcctaaattgatacagaaataaagataattcaaaaaagcaaagcctcaaaccaaataaaaaagtgctgtaatttgttactctaaaaaaaaaaaggggggggtgaaagggaaaaaatcacaacttttataaaatgattaatgtgataaatgctcttccccaagtaagttgtgattcctaacaactcaagttcctgagtaactgacatctgttacagtgtcctcctgacacacatgaaattggacccagtaactgagaaggttaactcctgtaccaataggtactgaaatgaacctctctcaaaacaggtttgttgttgttttttaaaaaaggaattttactttcaggggtccacaggttaagtagttctcattcgggaacctatatgagagtacccccgaaacaaaaagtacaccgcacacacccacagtaccaggaaaaggttacagatacagatggcctctgtgcgcacatatgctctggcttcctcaatttccctttgccaactgctggccagaaaggtgcgagtattcactttggagaaaagactcctccgacagaaacctgcatacttgcattactcgtacaaagagctaaaaagttacaaaatacaggcctccctaacaccttcccccctccgtgaataaagctagactccctcattgatagactcccaacactactggagaacatcagcaaaactccaggaggaagcgccggcatcctcccactttctccccctcaattccctctcccggggccactcacacttttagaaaagagccgcggcgccgagaaagtgggttggttcccttcctccttcggactgaagcggcagctgcggaaggctccggcgcggtactgaggaagaagcggtgctcgtgtcgctaaaccaggcggcaacccgggtctcttccgcgctgccaggggaggggaggcggcggccccgcttacctcctcttttcctcttcctgggtcttttcaggctgcggcttctgcccgtccagggccacttctcccgggacagtcaggtttgggagactccggattttgtttttgtaaagtttcctctgggtggaggctgcggccggccccccgggtcccccccggccccgccgccctcgggactggggcgggggaggggggctctaggaactcctcccggagtccagccaaggagccggggggccggcgactggccaagggagaagacccccggagggggctgaggggagggggaaggtgaggaaaggacggcggcgtcggtcctgttctctccgccgccccagccgccgcttcacatcggggtccccgcccccccggccggggggtggttgccgagcttggttggggccccggttcatacactccggggcaagatgctacggccccgggcgggtggccgagtcggcggcaaggcgagggacccggccggctccgctcggcgccgcccccgctcccggctcccgcatgtgtcgctgcggctgggacccccctccctacaccttgggggtctcgccccacgccccacgggacgaggcagaagctctggcgcctcctcagcgttctctcaccgcggagcagctacccactcccggcccgtggtagccgcctccctgccccccaagccgccggctccggctcaggctcgggctccggctctggctccggctccggcgtgtgcagccgccgctgccggccgggaaggtgagggggggaaaggagtgcggccgcggctcccgctggcccaggtgagagcgaaggtctcggcggcggccagtgcagggggactggatctctcggatgctccttcgctctcagtctcagcggcggcggcggcggcagcggcagcggcagcgcccggagctcagctcgctgtctccctcgctctgtgcggggctctcgcctcactccagagagaggggcgggaggagagcggcgcctgccgatgacgcaagtcacctagcaaccgctctcttccccctccctcttctttccgctctgaggcttcctccgctggcctttttcccccttccagccaccccgccctgggcgcctctggcgcgctctgatgacgctccaagggaagaggaagtggggatcggcgagcgggtgggtgcgcctcgggccgcgggactcgcagccgccaccgccgctgccgcctctacggccgcgtcagaactgaagagaggaaggggaggagccgagtcgagcctaagctgccgcccgatcttacccctgacccgagggcggcctggagagcttggtctgtagcggtttccttcggggca

SEQ ID NO: 32876 - DNA, 2300 bp, Homo sapien
tatcttaaatttgttttcctagagaactacactttaaacttcatgagtttctacttaactttcctttccaggataacatctgtaggaaaagctgcataatagtaataacacttattttagaaagaaaataacctttgagtcagacctgaaacaggccaacatttcttgatgacaacgtacactgatgaaccaagaccagaagctctcgaaagctccaaaccgtaagaaagaaccattcgtaaaagtgagggactattaaattcttcccctgacagtcaaaaatccttcagcaatctcccagaggatggctcccttccaatcctcccttcccgccgccctaacaatctgcgcgaggatgggtcccttcccttgctcggcatttcgtctccttttccactaaagactcaggttgtgactctgtactcaagccgcacccctgtttcctttcatggctagggggaggggaggaatgtattacaactcatttttacaatgcactgcagtttacaaagcgcttgcacttccaccatatcctctgagcttcacgagtgccacgtgagagaggcattcattcattcattcattcatcaaacatttgctcggcccgaccacacgttatccaacgctgggtctcaccccacgccacgggaagggtggggcgctctctccctggagcaggtgcagatcaggctgtagggtaactcctcgatcagtccggcttttcgagggtctgtttggggccaaatgcctcaccttcgggtggtgcgcgcagctgcctgaagacgcggcctgggcctcctccttcctcccaaaggagcagtccccacctgccccgaaggaaaccgctacagaccaagctctccaggccgccctcgggtcaggggtaagatcgggcggcagcttaggctcgactcggctcctccccttcctctcttcagttctgacgcggccgtagaggcggcagcggcggtggcggctgcgagtcccgcggcccgaggcgcacccacccgctcgccgatccccacttcctcttcccttggagcgtcatcagagcgcgccagaggcgcccagggcggggtggctggaagggggaaaaaggccagcggaggaagcctcagagcggaaagaagagggagggggaagagagcggttgctaggtgacttgcgtcatcggcaggcgccgctctcctcccgcccctctctctggagtgaggcgagagccccgcacagagcgagggagacagcgagctgagctccgggcgctgccgctgccgctgccgccgccgccgccgctgagactgagagcgaaggagcatccgagagatccagtccccctgcactggccgccgccgagaccttcgctctcacctgggccagcgggagccgcggccgcactcctttccccccctcaccttcccggccggcagcggcggctgcacacgccggagccggagccagagccggagcccgagcctgagccggagccggcggcttggggggcagggaggcggctaccacgggccgggagtgggtagctgctccgcggtgagagaacgctgaggaggcgccagagcttctgcctcgtcccgtggggcgtggggcgagacccccaaggtgtagggaggggggtcccagccgcagcgacacatgcgggagccgggagcgggggcggcgccgagcggagccggccgggtccctcgccttgccgccgactcggccacccgcccggggccgtagcatcttgccccggagtgtatgaaccggggccccaaccaagctcggcaaccaccccccggccgggggggcggggaccccgatgtgaagcggcggctggggcggcggagagaacaggaccgacgccgccgtcctttcctcaccttccccctcccctcagccccctccgggggtcttctcccttggccagtcgccggccccccggctccttggctggactccgggaggagttcctagagcccccctcccccgccccagtcccgagggcggcggggccgggggggacccggggggccggccgcagcctccacccagaggaaactttacaaaaacaaaatccggagtctcccaaacctgactgtcccgggagaagtggccctggacgggcagaagccgcagcctgaaaagacccaggaagaggaaaagaggaggtaagcggggccgccgcctcccctcccctggcagcgcggaagagacccgggttgccgcctggtttagcgacacgagcaccgcttcttcctcagtaccgcgccggagccttccgcagctgccgcttcagtccgaag

SEQ ID NO: 32877 - DNA, 2300 bp, Homo sapien
aaatgaattccctgatgtgggagactgaaagtatttattcatacaatcaacacaattagattcttactgtcttagctcagataccataacaaaataccacagactgcaagacttaaaacaacagacatttatttctcacagttctggaggctgggaagttcaagatcaaaggtgctagaagatttagtatttggtgagaactctctccctggcctgcagtcaccacctttccgtatccacatatggcaaggaaagagaactctggttttcttatcttctcataggagcaataatcctgtcatagggtccccactctcatgacctcatctaaacctaatgacctctcaaaggcctcacctcttagccctaatccatcacattgaggattagggcttcaatatatgaatttgaggggaatgcaaacattcaattcatagcagtgaccaaacatttttattgtttcaaccaaaatcagaggactccattgtcatgggattatgaagatagatgaactattgaattggctctgcaatgtccagtttgatcattctgtaaagtaattgcctaacctataccgcagagtgtggtttaaagcagctgacttctgtatttgcatagttcctttcaccttagaataactttcttgtaaattatctcatttgataagttttctgtagcatcaacttacgaggtattttcctcagttggccccttctgaaaggtagacaacattatacgatattaggacaaagaccttcagcttatcttaccatgactactgcttagacaggtaaggaaaagtttttcagatagtcatcaagtcagtagtcctttctcatcctgatggtttttattttccttttcttttttctttttcttttttttttgagatggagtgtcgctcttgttgcctaggctgaagtgcaatggcgcgatcttggctgactgcaacctctgcttcctgggttcaagcaattctcttgcctcagcctcccaagtagctgggattataggcatgcaccaccacgcccagctaatttttgtatttttagtaaagacagggtttcaccatgttggtcaggctggtctcgaactcctgacctcaggtgatctgcccacctcagcctcccatagtgctgggattacaggcgtgaaccaccatgcccggcacagtcaattcattttcaaagaattattttccattgataggtaaccttttatttaaatattaggacacagacaggcgcagtggctcacacctgcaattctagcactttggtaggctgaggcgggtggatcacttgaggcatggagttcgagaccagcctggccaacatggtgaaaccctgtctctactaaaaatacaaaaattagctgggtatggtggcacatgcctgtaatcccagctactctggaggctgaggcacgagaattgcttgaacccaggaggtggaggttgcagtgagctgagatcatgccactacgctccagcctgggcaatggagcaagactctgcctcaaaaaaaaaaaaaaaaattaggacacagagtgcatttctttacatctaaaagtgctgtatggcatgtacttaattttagtaaatgtgaatttaaatttattcagacattttgttaaaatattatcataccctataggagatgtcctgtaatatcacattacttggcttggaaaatcacccttaacatgaggaagcttccgaatccactttgcttaagcgtatctaaaatgtctggtcaatgcaaaactgcctacctttgtgcaaggtttttctctgagctctgattccatattcaatacactcccagcttgagcttcatttatgttaaatcaatgttctgtgtcacacttagcttggaggccaagtatagtgggtcaaatttatcacagaatgtatctaggaataatttaaaaatcattgacaatataacatactaactttgtctccatggaaatttcaattttgtatctattcccacaggtaattatgaggaattagaaaactcaggagatacaactgtggaatctgaaagaccaaataaagtgactattccaagcacatttgctgcagtgaccatcaaagaaacattaaatgcaaatataaattctaccaactttgctccggatgaaaatcagttagagtttatactgatggtgttaatcccattgattttattggtcctcttacttttatccgtggtattccttgcaacatactataaaagaaaaagaactaaacaaggtaaatatttggtgtatttccatttccagaaaattgcttc

SEQ ID NO: 32878 - DNA, 2300 bp, Homo sapien
acaggaacagaaaaccaaacaccacatgttctcactcataagtgggagttgaacaatgacaatacatggacacagggaggggaacaacacacactggggcctgtcgtggcgggggggtacaaggggagggagagcattaggacaaatacctaatacatgcagggcttaaaacctatatgatgggttgataggtgtagcaaaccgccatggcacacatatacctatgtaacaaacctgcacactggaatttaaagtaaaatttttttaaagcttaattaataaacacaaaaatatgttataaaactgcaaccaagctctagcttttaaagttagaagaagaaagtattataaacttactgaaagactgtcacattagtaatacaatgtgaaataaaacaatgacaagagaatgctactaaactcaggatgtcatgaagtatgttggaccacagtcagatgccccattctttcatttgtcaattatgtgaactccatgtgcaaattatttaaacaattttatagttaagatggtaaaatgaaagaaaacatgtcagatgtcaagccctcaaactcttccctgcgttgtggagtaactgacatgtttgaatttcaggatgatcaagaaatcacacccaaaagcctgactccttttcattctcctgtatataatgaagagcctgattagcattagaagaaggagagaaaaacaaaccaggaagtcttccagtggttctcagcctagtctgcccatagaatcactgaggcatctttcaataacctgatgcccacaccataccccaaactcagttacatcaaaatacctgagggtgcagcttctagggagaacgaagcaggaggatcacttgagtccagtccaaggctgaatgagctatgatcacaccagtgcactctagcctgggtaatcgagcaagaccctgttctaaatatcgatcaatctaaatatttaggggtagaacccaggtctcaataatttttacagttctccttgtggctccaggacgcagctgaagttgtgtctcacttctctagaccctgcccacttctggcctcccctgagccacaccagatcattccctgtcttgttctctatggtcctcggtgaatttgagaaaaattagaggtcaaggagttggatgccaaaggcttgcctagcagctgccaactctatcaccagaatacaatagcttaaaaatcatcactgaagtctcaagaacctggaagagtctagctaggatatgagagagggctgtgacaatcacaccttcctgaataagcctgaattagagagatgcatgccagggtttaaaccctgcatatccagaaaatgttatggctaatagaagagctatcagcaatagctttaattggtgctttaagacagcggtcctcaaaccttagtgtgtattggaaacacctacagcccttcttaaaacacagattgttgggcgtagtcttacagtttctgatgtaataggtctgggagggggcccaagaatttgctttttttttttttttttgagacagggtctcacttggttgcccagcctggagtgcagtggtatgaacatggctcactgcagccttgcactcctgggctcaagcaaacctcccacctcagcccaccaagtaggtgggactacagacgtgcgccaccacgcctgactaatttttgcattttctgtagaaacagggagtctcactttgttacccaggctggtctccaactactgggctcaagcgatcctgcttcagcctcccaaagtgccaggattacaggcatgagccaccaagtcctaccagaatttgcattttcaacaagtaatcaggttgtgctgatgctgctggtctgcagggcatactggttgaagttgctcaaacaatctcatttagttgtggctaattatcagtcacacctgttgttgttctccacatttgctgtgcatcagcgtcacctgggaagttttcaagccctaaccaaattagttatttgagactatctgggggcgtggcctgggtaacagtatttcttaaaagctccccaaataactctagtaagtatgtatgttaggttgagaatgactgagttaaataataactgagtggactttattttaatttgccattgttcgtgaagacagtcattagttttaaatgtgattagacaaccctccacagaagcctttgggaacaaaattaaattttgtagagacagggagtctcactttgttacccaggctggtctcaaattactgggctcaagcaatcctcctgcttcagcc

SEQ ID NO: 32879 - DNA, 2300 bp, Homo sapien
ttgcctaaattaatggttgctaaaattaaaacagaggtaaatagccctttacctaccacacagcctccctgggattttaactgcagcaaagagatcattgaggtgctaccattttctgatcaatcatggtaattttcttccccctaagatcagcttaatcatgctaagggtcttagagagcacaggggtcaaaagaaaattacatggttgggcaggatttctctgcagctccagtttattttgtacctcactctgatttagtgttgcactgctcagaagcaatgcatagtgcacttgttgaaacagtaatgaactgtttggccatgtcatggggctcagcagaggtccacagaataagacagtctgtggtccaatccacagacacctgactgcaaaagcttccacagggagctgaagtttaagatgaaagaaacgaaggctgacaaccttgcccttgacaaacatttgcctccagcctgggattcaacaatgttttaataacatttaataatattttaatagggcataaatggtaaaatggagagaactcccaagccctgggcctgctttcttgcacgtgtgtgtcacagctgcagaaacacgtgcttgtacaggaataattgccaccccaactcagtaccagcaggtcttggagcccgtgatctattcacatgctcagcaagtgtttaattaatagttctttctctgttgttttcaaatcaatcacccagttttgagcacgtctattttctcctgctgtttgttctgtattgtcacctgtggtgcaaaaagcatattttatcaagaattgacttaattgccagtttaaaacattaaagtgcatactgtaaatccattaacaaactgatccttacatgaatcaccaacctatttcttgtgaataataactgagataaacagtgactaatgacattgaaaagcagcaatgcattaaagaaaaattaacagctatgtcaggggctaaggaattccagtcacctcatacgtttgcaccaaccagatcactgaagacaaacgacgggaagtcatgactcagatggtgatctgcagggaaaggtttagagatgagatgtgtctgatgcctcaacactacccctctctccatctgtctgtctctcttggcaccacgattatgaaactgcattctgaatgcttaggccctaaacctaaaccaagggaaggacctccaatagaacacccaacacacactaatctccactgtatactagacacaacctttctgtattgtttcgattggataggatttctaccattattctatttcgtttctgtcctgttttgtttgttgtctgagaacttgattgtcaagtaagaaggaaggaaggtgagatgcagattcacccctacctccaccctcagagcatattctcctttggaaatggaccttgaaaagatcatttctctctggggaagcagaacataaccttaaggtgtgggtgtggcatccacctccatctggcgtgggccttggtgggaggagggcattccagagtggagaaaggagaatggacctggcggagagaagtggtctggcagttttctgatgatgcagttgtccctgctgtctgggcctgcgctatccaacacagcagccactagccacttggagttattaaaattttataaaaattcaataaaatttaaattccatcagcactagcctcagttcaaatgctcagtggccaatgtggctgatactgtatcagacggcgcagacttggaacatttccatcagggcagaaagttctacaggacagcttcttcctagggtctaggcagccccggagcctcacctgggggataagcaaaatcacagagtgagaatgcgtgtggtccaggacccctcccagtcccagataccgaacgacatctgagcaagggactctgttgccccggggacggtttcaaaagctggaggccgggactccaaagggctggagaggcgtgataatagaaccagtgcttcaacagcaacttctcttttgcaatccttgctggtctgacaggctcctgcagaattacatcacttcctaaaaaacaggcacacacctctccttcaagtcagcaccgacccaaacaagcaggaaacaggaaatgttcacgtttcagagaggctgcagcccggcgcagcatcctgagcgcgcctctgccgaggcgagcggacatgcaggctccccgcgcagccctagtcttcgccctggtgatcgcgctcgttcccgtcggccggggtaagccgcctccacttcctactcctggga

SEQ ID NO: 32880 - DNA, 2300 bp, Homo sapien
gtttctagtgttttcttggagccagactacattctaatttccttcagggcagtggaaatcatggaaagattaatcctgtgtatatatagccttgcacagcgtaatactgtggatgaggattaatcgtacacagtaccagaattcactgaagagtatctaacttggttagcatcttcaccaagcagaagttagcattagttccaaatccatctgaatctccatcaaaaccatcagcagctgccaaggaaactatgaacaaactaaagcaagtcttcacctttccaaaataagaaacacttcagagtctgacagtctaatagttagactaactttagtcaagctaagcatctccaaactcaagagacagctagcaggaatctttaagataacagccagcaaaaacaatttagtattcattgtccacatcattcaagcaccgctgagtcctaccgtacacttcctccaagtcacccttctgaaaccctaggaacaacacttgtacttagctgcaagttctgtagttgctcagttcctacacaattacagcagtaattaatttagattgggattattttcttataattgagaagactaatggtctccaaaccaacaagatggctttgtacagaaaaatccacagtaagctataacaattgaagttacagtttgagtgggttggcatatatatttgctcctttcttttgtttaagacagaaccacttaagataagagatttatgttttggaatttcagtactatttttttaagaggtggtatcctagagagctcaatcaatattgttatacattggaaacatttatggtgccataggtgtttactattcacagatctggggaagatacctgccagggatatttcactacactgaaactccctggaaatctgtagaggtagagctctgcctttgggcattagtcattaaaaatatcttgtcagctactgtgacaagtaaaggcagctgagaagtacggtctaaagaagggtaaatctcgccgtgtgcacagttacccttcgcatttctacaagtgaaatgggagtaaaaatgagcattcaaagctgtcaaaggaaaagcagtccagcagttcgaagggatattctgtgatggaccaactgtatggtacagtgtgtaaatgaacttcaggtctatctagcgccacgggggagccacgctttcgcaccactgagctctggggatggggagagtagtgcaggttggggccccgtttaggaaactacgaagggctctgagagagcgaattgttcagcagtttccgtgacagaacaatgatctatttaagaagtaatggggcaagcaaagaaagcagagctcggtcatccggaaaaagaaagaggagccggaaagaaaagtatcaaggaatctactgtgagagagcgagcaaaaagcaaaaagcgatcacaaatccagagcaagtaagagctcagggatgccgggcccgggggtctagcctttctgaagggagagggctccccaggcacgggggcagcgcgaggcagcgcccgcattccgtctgctgccttatcttcgcattctccctaccacccccaccttccccccgggactggaataaccttcttcgtgctctccggtggctgagaaagcagctttcgctcttctgtggtagcgtggaggtgaggtacatctacctccaccctcccggcaccagctcacggtctgttgggggggtcctcctaacgtgtgaggctagggtgtgtgaatgaaaaagagggaggcggaggcctcctggagaccttcgacctctcaagaccaggcaggggcgcccttccgcaagctcccagctctagccggtgcctctggccccgcgcgcattaggtcgctgccagaaaattacccgggcaacgacaccgccggagtcccggatgtggttgctagggcagcagagggaggggcgtagcccgcctcccggagaagggcggagggatcctcgtgggaggtgcgctgacaccaccgagacgtggccgggcaaggccggattgagggagagagaggccgtccagggccagggacaacgctacttccggtctcctcacttccggcttcgctgctcttggttctggttctggaggctgggttgagaggtcgccggtccgactgtcctcggcggttggtcagtgtgaatttgtgacagctgcagttgctccccgcccccgagcagccgaggtgcgtgggggaaggggaagaaggaaaaggtccgggtcgcgtttccgctcagtttttgccagggttgaggcgattccag

SEQ ID NO: 32881 - DNA, 2300 bp, Homo sapien
accccaagtcatcatccaggattaaggcaaatcataatccaaggaaaaccagtttatcaatttggaaagaaactaaagtaactgaggcagggatttaatccacaaaatacattagaaatcttttctcttttctcagataaaagtgtgttagacttggtagttgggagaagacgtgggtcatgctaagcaaggaaaacaaaacaaaaaacaccacaggacaaacgaaagaaaagcagaattaaggcagcagtaaaatatagtaatctgtagccgctctgagagaacagcaatgaaatggccaattcggccgggcgcggtggctcacgcctgtaatcccaacactttgggaggccgaggagggaggatcatttgaggtcaggagtttgagaccagcctggccaacacggtgaaaccccgtctctactaaaaatacaaaaattagctaggcggtagtggcgcctacctgtaaacccagctactcagaaggctgagacaggagaaaagcttgagcctgggaggtggacgttgcggtgagccgagatcgtgccaatgcactccagcctgggcgacagagtgagactctgtctcaaaaaaaaaaaaaaaaaaagaaaaaagaaaaggccaattcctgaagccttaacagacggctgacttaaggtaaccatttctggtgcacatttctatgccaattaagttaattaaatggcaaacatgaacacacccttacaggtgaaagtatgaaagcaaaagtttatgcgaagttctggatctcttccggcttttccttatcaaataataatgtagttagatgaattttatactttaggagaaaacagggtaggggcgggggacagaaatcctaagagtggccaaaggatctgcaggaagtataaagtgtaaactttttgaaatcaaagggctcaagaggaaggtaagaacaaaacaaaggaagtaataacaaaataaagtaaaagggaaaaacgtctagcatctaaaaactgtttttaaaaaattatttccttttcctagacacgtaaacagtagtaacttggcaaacaggaacggagcagaagacaatcgaacaactccctttccaaaactccagcattccttagtcaggcttgggacatttcacaggcaagactcctctctgcaccactgccagatgaatctctcagagggactgtcactatctcccttcctcccactgcgggagagaggaagctggggatgcagggagaagaggggagaaatgagggttggacagcaagcctgaaggtggcccactccgacactttgtcaagaaaggtccggattctggatcctgcaactccttttcccacccaatgtatgcaaagccaagagagtgcctccctgcaagggccggtcctacaccttcactcgactgtttcgggggcacactcagagggacagaaggaatgaaggacagaagaaaccaaaggcataacacttgggcagatacggcacagactaaggagaggcgtgccctgtgaaagttcggaacggtgaacccgtaggcaacgtgcccgccccaccagccacctcaaaccatctttcccccgccttttcccaggcgagccagctccgccctcacctttcttagggtaactcggtagcttctaagtcgaggcttatcctttccgccgctctctggaatcgcctcaaccctggcaaaaactgagcggaaacgcgacccggaccttttccttcttccccttcccccacgcacctcggctgctcgggggcggggagcaactgcagctgtcacaaattcacactgaccaaccgccgaggacagtcggaccggcgacctctcaacccagcctccagaaccagaaccaagagcagcgaagccggaagtgaggagaccggaagtagcgttgtccctggccctggacggcctctctctccctcaatccggccttgcccggccacgtctcggtggtgtcagcgcacctcccacgaggatccctccgcccttctccgggaggcgggctacgcccctccctctgctgccctagcaaccacatccgggactccggcggtgtcgttgcccgggtaattttctggcagcgacctaatgcgcgcggggccagaggcaccggctagagctgggagcttgcggaagggcgcccctgcctggtcttgagaggtcgaaggtctccaggaggcctccgcctccctctttttcattcacacaccctagcctcacacgttaggaggacccccccaacagaccgtgagctggtgccgggagggtggaggtagatgtacctcac

SEQ ID NO: 32882 - DNA, 2300 bp, Homo sapien
gacaagcaaaggaaaagctaggatttcaaacagaaaaaccaggtcttaggtaaagagggggaggtggtgggtgtgggaagagtactagttttgagggaaagatgagttgatttttggatatttttatttggacttgaaattttacaacgataatatggattcaagagtccctgacattgaagagaaacccggagatataccttgaagctcaaatttccaagcccctcattttccctgggcccttccaaggatacatgtctagtattatgtttgtaagtttttattgctttcctttaagaagttcccccaggagttatacaagcttcaggtcccacgacatctggatgggttcagtttgaaatcagaaggtatttctttgggatactgggagatcgagagttggaaaaaccttgttactgtcctcaaaggaagagaagggtcagcagagaagtccagagaagcatagagaaggccttagggtaggatgctgccaaggagatcaaagggatgaggggctgagaatgggtcaccagacttgacttctcaaaaagtaactgttttagagtgcatgctcaatacagttggggggaggcccactgtcacggggttgaggagggaggagtaggcaaggggtgtggactccccatttaacaaggtcgacagtaagagaaaagaagatgccactcaactcctcactttcgatctgctgtaatttaacttgagcctgaacagtcaatattcctttgggattcatattagctccctgagcatgacattgtctttctctttattacattttcttattccttaagattttaagattttcttaattggatccatttctcttcatgcaccatcaatggccaagaaatgggctattggcaggcacagttttggttttggggttgattggtttgtttacactaatagtttctctttctcgatccaaggcttgaccaaggaggtcaggaattctgtcctgggagttcagggactgaggaccaggatggaggaagcaaaaggcgtcaggcattaggctggaaacgtcttggtcggttatctaggatcaaagagtcaaaggtagcgatgacttcatccccgtagagggcgcctccctaccccgacagtggattttcggtcagccggtttgcccgggatgttttctttgactacttgcttctcactggcgccccaagtcactttgaagaaaaaaaaaatgtgattaaatcgattcccctgtttctttctgtgaggagtgtgcctttcccagacagcgtgcgttcattcgatgaggcctggcaaaatttttgaggggtctttttacgctttaatacaacctaaaggtttctgttaccatcatcattgagaattaaaaacaaaaacaaaataaaaaacggtaacaaatttacagcttggcaggccccagggaggagctgacctttgcgaagctctagcgcagccaggtttcagctgtaggggttgggacaggtcagttcgcccaagtgctgctagctctccagggagaagcaagtgttggggcagagggtggtctggcgcgtgcgtcggggggcgtgtgcgggtgtgtgtgtgtgtgtgcgcgcgtgtatataagagtgtgtgcgcgcccgtgtgcacaagagagggtgcctgggaggctgtcgcaaaggctcctttgtgaaaggcacttgcaggttcagaagccagcttggcgcctcctctcgcccgttccccgaggacacctggctcttctgggcagcccagctatctccgtctcctgccgcccctacttctctcggtggcccccggcctagccccgcaccagccttcgggtgcgggaagcagtgtgccccgaggcgtctcccccggggccccgcgcaggtgaaggtgagcgcgtggcggtgacggtggcgcgcgtagggtggaaggggaggcgagggaggggcggagcaggaaagggcgcgctgcccttcccggccggccaggagcagcgaggccgcagctttgttacctgaggctgccgctgcgccccgccccgccctgccccctcgcgctcagggttggctgggcctgcagtgaccgggaggaggcggctacgccgacacaacggcgggaggctgcagcggtctgcgcgccgggagcgggggcgcgctggccgcgggtgagtgcgggtcgggcggccgaggcgggggcgaccgcggcgcgggacacggggagctggagccccgccgctcgggagggtcagggttggggtgttgtccgggacccgaggctgaggcgccgagaagcgcggctgatgggtg

SEQ ID NO: 32883 - DNA, 2300 bp, Homo sapien
cctggtgctcagaatgagtggttctgcaccagtggtcctggtgctcagaatgagtggttctgcaccagcggtcctggtgctcagaatgagtggttctgcaccagtggttctggtgctcagaatgagggtcttggtgctcagctggtcactcactcctttggtcaacaataatcaaaaggaacatcaaggaaaacctgccagaaaacctttctccttgactcctggcatgtgccacagaagaggtgggggcaggaagggctggcccacatgcttctgatgacaaaccagggtagaacaagccgagtttggagagcagaggtagagaaacacacagccctattttattgtatttgggagagaagaaaaggatggggaaagtacggacaattctaaactatggaatttttactcccactccactaattcgggaaaaggctcctccaccaccacttatctttcaaaagctttcttgattattaaacacagaatgtcagtcggtacaattacgcagtcgggccagagccggaccgtccagctcttctgtgagttccgtctgcctgtgctccaggcagtagtgaaagaacccaggacaacgcgttcccagtaagcgccttcaatctgcagcacaatgtaaatattcataggcgcccgagaccaacacccgagagcagaggaaaaacgcctgtatttgaatgttcattttcagtttctctcactgtcccaaaaccaagaaaaaaaaaaaaaaaagcacatgcgtgccaaaggatgctctagagagagggaagggagcgccggctgctccttccaggaagacaactgtgggtcagttgaagggggtcacagacggccgaatcccggaggtcgtttctgtccacacggaagtttgaaaaccgaccattaagtccggaagaaattcggcctggggggtcctgggacaccacttctttcaagtttggatacgtagtagttcaccagctctctgcgttagacagctgtccgcagcctccttacatccccaacccggcaccccggtccccgcccgagccactcaccaacaagccaccggctcagccgccaccggctgggccgcgaatccccggggagccgcgctggggtcagcaaactgaacgcgagtgggcggcccacgggccgcgcggagccccagctgcgtccttatcagcgccgggcagaagggcgtcgcggcgcgagggtggggcgccggtgcgcgctgagatcgacgcccacacgcgccgcgccagctctgcggcggggagagaagccgcggcctgcggggcggggactgcggggcgggcgcccagcgcgggcgttgcacgaccctcggccttccgcagcgccgaccgctctcccgtccggcggctgcagctgctgggtcggccgccgcacccgctcgcccattcccggcccctccagttggagggggtctcggccccgcccccctccccgaggggcccacgctggaaagcccacgctccccacgccacgccccccagggcgccagcccctctgcgggggtttagcacgctgcgcccagaagttgggtgggagacggctaactaggggaggtgtccgtgtgaatgaaacgaaagggggggtcttccggctcgcagacaccgggtctgcggcggccgcgcgctcccaacccacccggagcctccgccgcgacatcttcccacgtcccccatccaggtcgcaggcgcgggggaaaagcctcacggccgcactgcggctctgccaaaagggagccgggtcgagccgctgagaaaaacagaggggagactcctggcgtttgaaaccggtcagaacccgctctccaagagctggggacaccccttgtttggaggctgatccccagcccacccgcttcctccccctccccacactcctgcaggcgcggggcgcaacttgcaatccgaacttcgcgcggccggagcaagtttgtcggggcgagaagcgcctggtcctcggtccgcaccaccgcactaggtccccgccaccgccccaccactgtgtcaggggccaggcgtggcccccggctggctagggaaccgagcgcggcgccgcggctgcgcattccgtgcgggacgccgctgtctcccaagggtcgggataaactagggggcggttgatctgaaagtcttagccacgactaatagtcaaccgcccaggtgcgacccgcagcagccttggcgatgcagctcgttctccagacgcgggtccacaccggcgcgtcctcgcctccagggaccgatcgctgttctccgtggccgggtaagggcggc

SEQ ID NO: 32884 - DNA, 2300 bp, Homo sapien
tttaagggtgccaactatgaaaacagcctagttatgcccctaatgataattatgaaaactctttctagaagccagttacatctcaagtgagctgtatgtcagcttggaaaaatattttctattttacttatttaaaaattatttggtggtgatggctgcacaacactgtgaatgtacttaatgccactaaattgcacacttaaaagtggtgaaaatgattttttaaagtatccaattaatagctggagatgccattttcctcccatatagaggcagttttcagaactctaatattcaaatgtttcactaaaatatttgcttttgtaatatggagacaatttaatagatgatcaccaagcattgagaaaggacagctctcacaaactttgatagcaaagaatggaaatattacaagtttgttcctagcagccaggggtaacttggcattttatctataaacccaatacatattttaaagcaaatgtaatgcctgtgaaaataaagggaaattatatgcacatatgataacagcttgttattgttataaataatagctaactatgtaccaggcatcttggtaaggaccatacatgtgttagctctttatttttatacaaaccaatggaacaagtatttcctcatattgtagatgaggatgctgaaatgtaggtgacgttaccaacctcagctcatgttgcacatcttgaaagtagcagaactttctgagaaaaagcagtctattcctagaatctccactcttattcccaaggcagccctgccttttggatgtagttctgtgtaaatcattttgtaatatttgaatttgtgagatcagattgtttacttctgtgtagtctaaaattatttcatcaacttgtgtttgtaagtatgggctttgacagtggtgctgtaaaaagaaaattacaccccgaagtgccgtgtaaaaagccattgtgtatggccctttgtgatctggaggaaatagtcccctttccacactcccatctagttggggtactcactcaatagcctgcatggcgtcctttctacaccccacttacctgttctcgtatctgaagaaatttagtagttttgacctctctttcacatcagatcggtaacagcccagcatgaaaaacaaacgtgaagttccataaaaatgcaacccactaaagtaagttggtgactgtgtataagggacatgtggcagatgtgacatgggcagcgtgtccttgggcgtatctcttctttgctaaaagtgtcagaagcagaagaggtaggtgatggtttccaaagagtggcttaactagaatctaagatgatagaggtcatttaatgtgttctcctaattttacaaatgagaaaactgaagtctggtgaggcaaagtgacttgtctaaaactataagcagtaaagcttgatttagggctggaatctcatttttcatatctgctgttcttttctctatttgggggaaagccacatcaccaagtagagcataaatatggtggccctgattccagggaaatgagctaggccattattatatcatctccaaatgccctgtcttatccgtccaaggtgcaagatgccttttttgacccactgattggtaggagacatgtccagactggaaaaaggtagggtcactcatgcctaatgctccagcagtttgggcagtttccctaggggttgggcaaccattgtccaaagagaacgaactagttagtaaacaagtagtttattcataaagtgagcaatacttactgagcctctagcaggctctcaatataaatgtgctttgttgattaatataaggtttccaattggatttgttgcaatttctctggcagaatttccaggtggtaaaatttgattcacatttagaaaagcgttgggtccttgtaatgcaacttgggatgtgttgcccctcattgattttcatatccaactcatatgggaggattgatactagcctctgaagggaaatgctgatgcgaaactgtttgtctgtaactgatttgatatttattttatcttgctaggtttggaagaggacagttgccctttattctggcggcagatagcagcaggtgaaaaagtgctacacaagtttgatgtttgtgtcttcttctccaaggccaagaaattatctccataggaggcaacagtactatgcatgttatgaattgtgtctccttggtcagtgataaagaaaatgggaatattgccacagcacctggattcatgattgggcagacacctcctccagcacctcctccacctcctcctccaccccc

SEQ ID NO: 32885 - DNA, 2300 bp, Homo sapien
tatgtacatatttcagtctcaacccagagattaatataatcatattaccataatgtgtatagtaaaatctcattaattcaaacatgccactgatctttaacttttaatagctcaaatacggaatacataattgatcataggataaaccagtacggggcatgtgtaattttttttatatacaatcttcttatgccttagatgcaagctcattaacttgtttcattttaccttttagcgcctatttgtggtgtgattagtatgatatgtctgtaaccaaaagtaacaagatagaggtcaggcagtggctcacacctgtaatagctgtacttgagaaggtcaaggtgggcggatcacttgaggccaggagctcaagaccagcctggccaacatggtgaaaccctatcgctactaaaaatacaaaaattagcctggcttggtggctcacgcctgtattcccagctattcgggaagctgagactcgagaatcacctgaacccaggaggcggaggttgcagtgagcaaagatggcaccactgcactccagcctgggcaatagagtgaagctgtgtctcaacaaacaaacaaacaacaacaaaaccaaaacaaaaggaaccaggtggcatgtgaacatttaaatgtttaataaatatgcatagtctcatctacacttcctcttttctccatagaaaccgactgaaatcatgagtgaaatttcataagcatcatggcctgatgatgcaagactgtatttgaaacaattcttgaatttctgtgcacgagatcatctatagccaaatattattcccatgaagtctcacctctgtttcatacatctttatgggcttctcctcactcctacctggagccagctagtgctctgtcagtgcaaaataactgtttaaatagtatcttaaggaaaataaatagagaaaaggaaataagccgaagggaatgatggaattcattctaaagccaggtattaactcactggtagggaagggcgagcgacgcagtccctcgcctgcgatagccactgaccccactcaggctcgcgcggcccctcttccattcccccaaatcactgccgtcttattcctgcccaaccaccctcgtcaatctctttgaatctgtgatttaaaacaggcattcatggacattcttcttagaaggcctagtgctaagtcgcagttgtcaagggaaccgcgtgtctggagggagaacaggctctccggagtttcccgggaaaccaccccccgcagaggcaggtgcggctggctgggcctcgcggggaagggctctctgggcggagtcggggcactcggggcctggggcgtggtcgccgggctgccgtgcgctcgggatcagtctttttatacatatatatatgtgtgtatatatatatatatatatatacacacatatatatatgttataaaattctaacttcggtggagtactttactttgatattccacttgcaaaacagaaccactgattccttcctgcttgacaagattgagtcgctatcaaggagctgcccgtgctttggaaatggtccaaatcgacgaggaactgccaaggagccccctcagacagtaaggttctgttggccagggtcctggggacagacacgagtgttggtgcgcgcgactgaaacgggagcagagcagttgaatgagcttcttacgctttgcatggtgcgcagaatatcccaccgatacccagaaatccagtagaaatagggacgagtgttgctgcgaaagagccttttgcatttgaaatgcatgttaggttaactggaaaggcgcctgcctcttgttttgtttcagaaatactgttgggaaaaggatccgatttctgctcggagtgaaggaagtggtctctggagaattcctaggtcaaggctggcatttgcaccttttcatggtctttccctgcacagtcacttcagcggcggcgtcgctggggctgaggccgggtgactgcggctaggcatgcggatttagttccccgcctgtcatctttgtggctccttgtgggggaggggcgggcggtctgacacagttattaaacctggcagctgcgctggcggcactgaggagcattttgagtgagcttgcagaaaatgaggggctttcagctggtcgcctgcttgtcacctctcgctgcctgaaaggcagctctcagagccctttcctgtccttctaattacagcggcgggggcagtgcgcgcttcgggacgcaattggaaacgtgagtatctgtgtcccccgcgctgctggcaggcggctaggcgctta

SEQ ID NO: 32886 - DNA, 2300 bp, Homo sapien
tcttaactttatttttacttcagtgtattatttagaaatgatataaggaggccagccgcgttggctcgtgcctgtaatcccagcactttgggaggccaaggcgggcagatcacgaggtcaggagatccagccatcctggctgaaacccaactctactaaaaaataaataaataaataaataaaattagccgggcatggcggcatgcgcctgtagtcccagctactcgggagtctgaggcaggagaatggcctgaacccgagaggcggagcttgcagtgagccgagatcacgccactgcactccagcctgggtgacagagcgagactctgtctcaaaaaaaaaaaaaaaaagaaatcatataaggaaaaaaagccctacagtttactttctggttcttggttattatcaaagggcattggaaggttaagctgctgtaatagctttaaaaggggaatttaaggccgggcgcggtggctcacacctgtaatcccagcactttgggaggccgaggtgggcagatcacgaggtcaagagactgagaccagcctggccaacatgatgaaaccctgtctctactaaaaatacaaaaattagctggtcgtggtggtgcgcatctgtagtcccagctactcaggagcctgaggcacaagaatcacttgaacctgggaggtggaggttgcagtgagccaagattgtgccactgcactcaagcctggtgacagagcgagactccatctcaaaaaaaaaaaaaaaaaaaaaaaagtggaatttagttaagtttgggagacagaaagaagccacggctctcctgccttcttccaaatatactgaacttctgatatgtttgatcaaatgaaatgctcatggtctggcatgattataggtgcaagcctgtaatcccagctactagggaggctgaggcaggaggatgacctgagcccaggagtttgaggctacagtgcacaatgattgtgcctgtgaatagccactgcactccaccttgggtgatatagtgagacccacatctctacacacacacacacacacacacacacacacacacacacgaagaagaacataaacacatcaaatgtgagccattttgctgacttgggcatacaataaatccatatctctgggttctaaagatgtaccaatcttgcagtgagctgagatcacactactgcactccagcctggtcaacacagcaagactctgtctcaaaaaaaaaaaaaaaaatagtagaccaggcgcagtggcacactcctgtaatcccagcactttgggaggccaaggcgggcggatcacttgaagccaggagttcaagacccacctggccaacatggcgaaaccccgtctctactaaaaatacaaaaattcaccaggtgtggtggtgcattcctgtaattccagctactcaggaggctgaggcaggagaatcacttgaacccaggaggctacggttgcagtgagccaagattgtgccactgcactccggcctgggcaacagagcgagactccatctcaataaataaataaataaataaataaataaaataaagatgtgccaatcaaacaagtgtttgctctgtagatgaggtgagtgctcctgatcagatagtatattcaataaaataagcatgtcatcaaactaactttcttggcctttgttctttggttgaaaaactcccgttgacctcatgaataccacatttattaaccccggaagacaacagatagctaatgcaacataaatatctgtggctttaaaaatacatattattatgtgtgcagtctacaaacactttcctgaaattggtcttctgtgggcagtgatttaaacttttcaacttggacgcttttcctactgggggctgtaaagatgataactcagcccttactcttcagtgtttctcattcccgtctcccctacttcggaatgaaacacaatatcttaagcaaacagagcccaaagaggctgatcattggctctcattgtcccctgatactgtagccccgcccctttggcttgtgctgactagctgtttatattttagtaagggccaccctttaactcggcagcttgatgactataatgggcccagttgtctgcgggctgcggggagctaagtccccagattggaggaggctggctctggtcttcgatgcacaggagtggccgttatggaacgcaggtaaggacgcttctcaatgtgggataattctttttctgggccagctggttaatccggggctgggagaaacaagttgtgattgggttgctactttttcctggtttt

SEQ ID NO: 32887 - DNA, 2300 bp, Homo sapien
ctggtgacagagcgagactccatctcaaaaaaaaaaaaaaaaaaaaaaaagtggaatttagttaagtttgggagacagaaagaagccacggctctcctgccttcttccaaatatactgaacttctgatatgtttgatcaaatgaaatgctcatggtctggcatgattataggtgcaagcctgtaatcccagctactagggaggctgaggcaggaggatgacctgagcccaggagtttgaggctacagtgcacaatgattgtgcctgtgaatagccactgcactccaccttgggtgatatagtgagacccacatctctacacacacacacacacacacacacacacacacacacacgaagaagaacataaacacatcaaatgtgagccattttgctgacttgggcatacaataaatccatatctctgggttctaaagatgtaccaatcttgcagtgagctgagatcacactactgcactccagcctggtcaacacagcaagactctgtctcaaaaaaaaaaaaaaaaatagtagaccaggcgcagtggcacactcctgtaatcccagcactttgggaggccaaggcgggcggatcacttgaagccaggagttcaagacccacctggccaacatggcgaaaccccgtctctactaaaaatacaaaaattcaccaggtgtggtggtgcattcctgtaattccagctactcaggaggctgaggcaggagaatcacttgaacccaggaggctacggttgcagtgagccaagattgtgccactgcactccggcctgggcaacagagcgagactccatctcaataaataaataaataaataaataaataaaataaagatgtgccaatcaaacaagtgtttgctctgtagatgaggtgagtgctcctgatcagatagtatattcaataaaataagcatgtcatcaaactaactttcttggcctttgttctttggttgaaaaactcccgttgacctcatgaataccacatttattaaccccggaagacaacagatagctaatgcaacataaatatctgtggctttaaaaatacatattattatgtgtgcagtctacaaacactttcctgaaattggtcttctgtgggcagtgatttaaacttttcaacttggacgcttttcctactgggggctgtaaagatgataactcagcccttactcttcagtgtttctcattcccgtctcccctacttcggaatgaaacacaatatcttaagcaaacagagcccaaagaggctgatcattggctctcattgtcccctgatactgtagccccgcccctttggcttgtgctgactagctgtttatattttagtaagggccaccctttaactcggcagcttgatgactataatgggcccagttgtctgcgggctgcggggagctaagtccccagattggaggaggctggctctggtcttcgatgcacaggagtggccgttatggaacgcaggtaaggacgcttctcaatgtgggataattctttttctgggccagctggttaatccggggctgggagaaacaagttgtgattgggttgctactttttcctggttttaattttttccctgcagaagagggaaggaaaagactgggatttgctgacaaagctcacagtgagctctgttaatccaggcaggaagggagtaaggaagcaaaaaatcgagggagagacacagctggatttgacaccaaagcaacatgaatgtggcaaagcataaggccagttccagtgatgttgtgagactcaaatgctgttttatttcctaacataggtagtcacagtcaggagcttagctgggcctctccggggtttctgtaagccagctgctagccgatgtaactcagtcgaccccatttgaaaggacctaatatctgctagtattttcaaagggcaaactgtagtagtcttgcatgttataaataggtctattcagaaatgtgggaacagtttagagcagacaggagactgtaaagttttactgccccataaaagtgctcaaagggtactatgtccctctgccgtgcgactgtggaatgaagaaatagccccaggtgaatagagcgtttgtccttgactacccaagtgagaagtcagcagagcctggggacgccatgtgagtcgggggtgaagcctgatgtgggctcagccagccacacctcggggtgcttgctggtttccggggtgtgaatgggtgagggtggaaaaccactcaggcaccggtctttggtgcctgctttatctcttggctggcccattcggtgctcag

SEQ ID NO: 32888 - DNA, 2300 bp, Homo sapien
aagaccaaagatctctcccacttctccaccttcagaaaacagagacctggtctagttataggtctcaagaatctgggttgactggaagaagagaatgagagagatcaggacaaagaatgtgctggggggcggggtcagcatttgatgaatttggctttgggataggcttagtagcagaatgagaagaagaaaggactcctgttgtagtaagtcagacacctgtctgatggcctgtcttaggcttgtaaaactcagtgggggtagcctgcttccagttttagaagtgggtcctaattaaactgtaaacttctaaagcagaacatacgtccgcacaaaaccttgtgcacaaatgtttatagcagcactgttcataatggccaaaaagtggaaacaacccagtgtccatcgactgatgaacagatgaacaaaatgtgctaaattcacgcaatggaatatcgttcagccatacaaaggaacgaaatactgacacatgctaccacatggatgaacttggaaaacattctgccaagtgaaaagagcaagacacacaagaccacatattatatgattccattccagaatagggaaacctttagcgacagaaagtagattagtgattgcttaggactgtggggatgtgatgtgggagggaagagagagatagctaaagggtatgggttgggtgtttgtttgtttgtttgtctgagatgatgaaaatgttccaaaattggctgtggtaatagttgcccacatctatgaatatactaaaagccattaaattgtacactttaaatgggtgaattatatggtatgtgaattacaattcaatgaagctttaaaaaaatccacaaaacttctaaaatagggtgttaactgggattttgagaactgtgtatcacctaaaatggcacgccaaagttggcatgtatgtgcatttctggggtctgtcaattttgctgtattctctgtgatccccctcctcctactaccaccaaaggtaatcaccactgctctgcagagctgaggccccttcaagggctcactgtaatgcttgactgcgtggaaagaatgtgataaatattaatgtaatcaaatatgcagatgcccagttttttaaaataaacattattagcaatccctttgaaactaataactaaccaaggaataggatgcaatactgttccctgcgtttattgttgtagaaaaaggaacggttgtgaattctactctgatatgtaagattttttattctaaattattatttgtaatatggagacctaatcactatcatatggctacttgctgatcatttttacattatttataccttttacaactaagtttaatgacttggcaggaaattaagttatgttatttgtcaagtttctcaacttttaactgaaaacttcatgatcagaagaagaacaaggtctggttatccccgaatcaaaatatgtaccatatgatttttctctgaatcattagaaccacaaaaagcaaagaaatgtcattgcatgatttgactttgtggaaccgtactttatagaccctgccctggggtaaataccaagagaggaaaagtagtaggggcttgtggaactggactgtttgtttgtttgtttgttttttgcatttaaaaaaattatgatatgtgtttaaagctacttgagacatctaaggaaatcagtcgtctctctttctaacgagcaagtgtgtgctctcacactcacgcaaagctcttctctaaatgtgaacttttcatattgaggtaccatatgcccagtttcttcctagaatctattctcactgcgttcaccgtttgcgtcccagcactcccttcgtctgatttgtagcactccctgtacctgccccggctgcgttgcacggagactgcactggtcgcctctcccctggtgaatcctgcagtcactttctggtgatggagctcagcggcccagcacgagagcatggaaacagctgactgctgactcagagggaaagcaagccacccacgaatctcattgcagctcgctgctgcatccctatcccataatcccttgcctggtttgctgcagtcttttcaacagacgctcagtgagaaaaagatgtcctgtaagatcaagaccgattggtgtgaatactgaagggggtcttccacttgttaatgacccagaaacattcctgccgacttccagccttctctcatttcctccatttttctcttcctctgttctgtgcatgaactggcacatcactacttagagcagaagatatgctgggcttctgatgatggctgcact

SEQ ID NO: 32889 - DNA, 2300 bp, Homo sapien
ggataaatgttttatgtggctagggtaaaagatacagctatctagaatagtggttctcagccattcggcaatgcctggagacatttttggtatcacaactgtgtgttttggcagggggttggggagagggaggcagggcggggagagctattggtatctggtagaggacaggctgctgttaaacatcatacaatgcaccagacggcccctgcaacgaagaattaacctggccagaatggcttttcagagagcttcaagtctatacacttaattaattattaaaattggacaattgatggtagattgaaattgacaattttgattgtctctgaagagacaaaatctcttctctctaaggcagtaattatgtcatatcttattctgttctctggttattgtttttttaaagatgatgaaaggcatagaatttttttaaacaaaatgtagtgtttagatagattttggaatatttctgggttgaggttaaataacgacctttaacaactgtccaccaggctcccagaaatagattctgctcttcagttcatctctgaaatcattcatcagttaaccaaccaaaaggccagcatcgtggatgacattcattccacctttgatgagctccagaagactttaaatgtgcgcaagagtgtgctgcttatggaattggaggtcaactatggcctcaaacacaaagtaagaccagaatcattacagatgtcctggaagagacatgatatccaagggcactagcttattgtttcctaatagcaacaaggggtccttaagtgtcatcattgtatagtaaactatagttttcactgaatgtaatatccagctattttttcccctattttcagcaaaattcgatgactctgtgactttaagtactagtttataatttgacaagaggcaaggttgaatataatgtaatgcttttagcatttagagttaaactggattgttttcattcctcagttataacatgaaatagtttcttaattgctctctcacccacaccaacctgttagtcagcttcaaaatgaaccctgactgcagcctttgtttaactctgcatgtctgttcacaaaacagggatgagaaacctctgatgttcaggtgtggagagttttcatttgtttacttcctgttcctttaggtggtgatggacatggggacatggggaaagatactgaataatgaatatttcagatgtcaggcatagcaattaatttgctatgctcttggtagtgacctttctgttttcccctctccaaaacacatgagccaagaaatacatgtgtggaagagagggcgaggcggaagggaaacctcgaaaaggtactgggaatgcagtttaggactttgcgttagcactgggttccctgggttgacaaacaccgcttgctcagagccacctgcgtgggcaggtgtagagtctccttctcgccggtggagggcactgccccgggctaggccccgccctgtgggacgagctcaccaggcctccggttttcccgcaggtcctccagtcgcagctggatactctgctccaggggcaggagagcattaagagctgcagcaacttcacagcgcaggccctcaaccatggcacggagaccgaggtcctactggtgaagaagcagatgagcgagaagctgaacgagctggccgaccaggacttccccttgcacccgcgggagaacgaccagctggatttcatcgtggaaaccgaggggctgaagaagtccatccacaacctcgggacgatcttaaccaccaacgccgttgcctcagagacagtggccacgggcgaggggctgcggcagaccatcatcgggcagcccatgtccgtcaccatcaccaccaaggacaaagacggtgagctgtgcaaaaccggcaacgcctacctcaccgccgaactgagcacccccgacgggagcgtggcagacggggagatcctggacaacaagaacggcacctatgagtttttgtacactgtccagaaggaaggggactttaccctgtctctgagactctatgaccagcacatccgaggcagcccgtttaagctgaaagtgatccgatccgctgatgtgtctcccaccacagaaggcgtgaagaggcgcgttaagtccccggggagcggccacgtcaagcagaaagctgtgaaaagacccgcaagcatgtacagcactggaaaacgaaaagagaatcccatcgaagacgatttgatctttcgagtgggtaaggagagggcttctgtgcccgacgcctgagctggcactggttaaggggta

SEQ ID NO: 32890 - DNA, 2300 bp, Homo sapien
agatcgagaccagcctggccaacatggtaaaaccccatctctactaaaaatacaaagattagccgggggtggtggtgggcgcctataatcccagctactcaggaggctgaggcaagagaatcgcttgaacctaggggttggaggttgcagtgagccaaaatcatgccacttcactccaggctgggcaaaagagcgaaaccccaactctaaataaataaataagctgctcctataggtcatgcttttcagaatgtcaaggaaggggcatcagaaggttatctgaagtttaaggtatttgtactgaaaatgcaaaggaaccagaggcagtagaatgtgtcttctttcctaggtggcggtgattcccaggtctggttgatcaagactgcaatgcacaacaggaacctcagagaactgtcacagcagctctcagtgacacttaggatacagatgcagcttaagtgacccttttttatatccatttagcactcatttttcccaaaagaagacctgtttgggtcaatttgttactgtcccagggcaggcttttgcactgtgtcgctttagaggcaggggcggaggaaaacttgggactgtaacatcagtactgcacaaagccctcttccgtatacagcataagcactattctataaaatccccagcaagcctttgtttccttgcagtcagctccttttctgctgattctgcccattgctcccttgcaacgtattttcatgctttctctaatgattctgcctttctttacttacaactgccttggtaaatttttctgccacagcgccactggcctcagatagtcaccactcacctgcaacaagcctgagagccaattaagacaaggctttccccaagtagcacaaatgtatataccactactgtagttacttaatgtactcatttatcattttaaaattaccttatgtaccatcagttacatggtataactcttacaggaaaaaccaaattaatggaactctgcaattcaatgtaccccttcctctgcctccagcagaagcaacaggggacataaattccaactttagatgctactcttatagcatctacaagacttactacactgtgtgtgtgtgtgtgtgtgtgtgtgcgtgcgtgtgtgtgtgttacagagtctcactctgtcgcccaggctggagtgcagtggcggggtcttggctcactgcaacctctgcctcctgggtccaagcgattctcctgcctcagcctcccgagtagctgggattgtacaggcgtccgccaccacgcctggctaatttttgtatttttattagagatgggatttcaccatgttggccaggctggtctcaaactccctacctcaagtgatttgcccgcctcggcctcccaaattgctgggattacaggtgtgagccacagcgcccaaccgtacttcttacacctaaaaatggttcaaaacaccatagaataattttcaaaataattgaattctgagttaaaatttttcagcactttcaggggcctgagcttttgctatgaatctggatctattctcaagccatgaagtagcgtatttttgaccatgttgatttgaaattcattccgttgtttccttcttttttaaaacctaagggaaaaacaaacagacatacacaggatttgaaaagctggaaagcagtgggtagcggctcgggagaagatgaggggtcagattagaagacgagaaaggaatccagtccgccccagacaggacaagtccggaaggatggaggcagcgtttccttcctcaacagcctaaacgcctctattttttacatccaaacttaggccatatttctgcggcgccaagaaaacgcagtaaaagcaaaggcaagatgtccttaaaaaaaaaaaaggtcacattcacagaataccgaggagacggaggcagctctgcaacccgtccactgagacgcggacacgctccccacagccccggccccaggcccgcgccccttcccccgccggcggctcggatgggtcgctaggggtcgctgcgcgccgcgcgggcgaggaccggcctctttcccccacctccaccgtctcgctgctccgcccccgcggcgtagtcggcgccaaaatcaaacgcgtcctggcctgtcccgcccctctccccaagcgcgggcccggccagcggaagcccctgcgcccgcgccatggtaaggactgaggctacggtcccgcgtcttcttcctccctagtgtgtgggcttcgccgcccctcggctgcatgtggatcccggcctggcgttgaccgccattccgggc

SEQ ID NO: 32891 - DNA, 2300 bp, Homo sapien
atctaagaagacagctgtgtaatcccgtatccctctccaaccccatggcacagcagatacatgcttttggctctgtgaacaacagtcaaatagcattacccattttgtaaagtccacaagaccacaacttgaaaaatcaagctggccttacaaagtctagaaaaagctatagcagtatttacatatggtccatagcaatgttagtctatcttttaagtcatttccattgatgctgtgatactcgttaatgtgggaaagactttattagtaaaagagtaaagtaatttaaatgttagcaaaaaagttttgtatcacaactttgaatctgtttaacaaaaccggttaggctgttaatgtttgcttgctttcctttatacgtattatactcatatgaggacttaaaattacattctgtaaataaataggcccatgagagaactttcatttagaagcaaactttgaaggtgcagttactgcttaagtgggctgtgcaaatattcctgtcactggaggtccctttaactgcgtgggggaccttcagaatccaaggggcaaatagaaacttggagaagtgaagagaaaaaaagggcacattgagatggcactggagatccttgctaaataaaggaagatgttggcaaggaatacagaaaaaagtatgaaacagagactactggaggtattcaagttggaaaatgcaaagtgtccctttttttttttcacatcaacaacttacgtttatgctaatctacttaaatgttaagtctggccaagcaattagactatttaaccttgtttggagttaaatgcagacagtgtgtgagactgtgttcacagtactgtattacgtctttaggaaagaggatctagatttcattttgtccttctcaggattgtgtctgctatgcaagcactggttttctatagtctggcttgtaaggcacaaggagcaattaaacagaggattaaggtaaacaggtgtgtcccatcacttcccctcttcatactatattgttcatattctctgaatttcatacaagctacagtggaagcagtaagttaactttaaaaaatcataagattgcccatacttctaggttatgcaaattgatttctgaataagcccttgtttgcgacatcgctggtaaaggcaggatgttaacttaaagagatgccagattttggacttgttagttataggcatcaaaacctggaactaggaaatgtatttccacgtattacttccattatcctactaatgttagaaacaggcaactaaccacatcctcgaccccaaccatatttcaggagaggctggctgaattttgcaatatgattccaaaagggagtatttgcagggtctttgaagctataaatcccctaggaagagtcttccccacctgtcaggacctggacagtgtccacagagggtgccgggcgcactaccgccacgcggcgctgaggtctgcctctcgggttttgggagagctctttttattctaaattacagactttgcagccaccggatatcctcgctgcataactggcagtggccatgtggctgcactcgcgtttcctgacaaccactgcattatttccactaatatcctgtgtccaaggcctctcgcttggcgactcctcgttcccacctccaccgccacctcttccctcgagggtaatctctcgaccgtggcccaagcgcctcgacaaagcggcaaccacccaaaagttcatgaaaatgcacttggcaaaagtgggccgctagtccccgcggacagctctaagcgaccccgtcccagccgaggaaagcgcccgggccccgcagagtgcgcgctgcggggcgggcccgcggccatgtgctccgcgccggggcggggcacccgcgggttcgcattgtccactttcccccgcaccccgccgcgttccgtccctccctatctgcggcgcacacgcgctcagagcaagcggcgcgcccgggtctggagctgcagcagctgcggcagcggcgggggtggtgcggcgcggggcggggcggggcggggcggggcggggcggggcggcacgggggcgggcccggggcgaggcagctggggcgccagcgagctagcggcgagcgcggcgagcaacggagaggagcgcgagcagcagcatggcggggctccgacgcccgcagcccggctgctactgccgcaccgcggcggccgtgaacctcctgctgggcgtcttccaggtcctgctgccctgctgtcgcccgggaggggctcagggacaaggtcagccttgcgccgctgggctcgctc

SEQ ID NO: 32892 - DNA, 2300 bp, Homo sapien
tcattcatagagattttaatcattcttttgtagtgttaaattaacagagtatcttccagttgtcactagtgaaggaaatttatatcctcataacacttttaaaaatagaatctaaaaaatagaataaaaatagcagtggtgactaggcttcagctggcattctctgttaggtctggagagatttctggtggtgcagtcactggctctgtagcattgctgttttgcattcttattttctcatgtatttctctgatagacatttgtattcttagaaaccttgtatttcaattatgtacatgggatataaagctttgaggataagtattaataactttgatgattgatattatttacttgaaacccaaaacctcagaagtccttatttatttaattttaattgtgggaagaaaggcagatacaagcccactgctctgaggtaaggcttttctgaagtgaccctttatgtgtatggtagtgttgaacattttttaaaaaaatggtattacttaagaacactttgaaaaatcaggattttaatcacattgatgttggtattttatttgtaatgggatgtgaagaactacgttttgaaatacacattggatatattaaacctttcgttaagactagtgattaaaaggaagggtgaaagccaaaagaaaaattccaaggatttgatggtagtaatacagtattttggaaatctcattgtatataagagaagcaacatccatttcatgtttcctaaaggatacatttttaatatcaaagattttacctaattttacggaattcattcattatgctgatatttttccaattttattccaattatagatataattcattcagcttaaattagaatataattttatttctaggccatccgaatgacagctgtatatttggctctctctgccactgaggctattaaaactgaagaaatgactttagtgaaatttttgctggctccctgttcattgcaacataattgaacaagactgaatttggtcttgagcagtaggaatcagagttaagtgattagagggagcattgtaggtggctccaggtaggtgggcctgagcccagctcctttcctcttggcaattcctttatcagagccgagacattggaggtggagagtgctgctgaaaagaatgggtatcaaacccttcatgaattagtgtatttgccacggagcagggattcttactctgaggtttgtggaaggttttgaagctgtgtatgaaacttttcgtaagtgtatgtttgtggagggaagagccagagctttcatcagagtttttggaaaggctcataatttaaatggatgagaacctctgctgcaaagtgctgccggattttcagttttctcaaaagaatagcctttagccataattaagttttccttttctaagacctaataaaataacatctctttgtgagctgaaaatacatacctccccaaaaagtctcttttactcagaaaacataaccctaagaaaaattgggtttttctgtgagtacagtttcttacctaaacatattttcgtttgtttcaatattttcgaatgaatatttcagtgaattttcattcatactttcattgaattattcaacatattttcattgaattagagacccaggtccgagaagtgccagtgagtgcctacatgtgttttgttttgtttttttgcaagcattttaatggcctagatgggttaaatttttctaacactgaaaccaatggagtgctactgtgggttggcctaagccttataaaataaagttgttttttgttttatgacttttgactgttgtgaattgaatgctttattaccaacacgattggataatttaactttgtgatgaacagcaacagctttctgggtttaaaaatctgtgtgtatatatataataatacatatatatgtatggtaatatttataaccacacaatacattgatttttctctttgtttctcctcctaggttcctgggacatcctgtagcaaagattctccatgcttacaaccctagtagggacagcgaggttgtggtgaattcagtgtttgcagctgctggacatttccatgtaccgccagttccctgcagggtgggtgttgatggactcctggaaactatgccgtggcaggcagccaggttttcttgctttctttggcctgaagtttttactttctgctccctgtctcccgctttttctggtacccaaaccttttccttctgtgtgtttaccttagcatttacttttccagttgctcatttttataattttggtgg

SEQ ID NO: 32893 - DNA, 2300 bp, Homo sapien
gtgttgcggggtaggaagaagtggaagctgagaaagaggtcactggaggcttgacaagtaatccccaaggcctcagtctcctctcttctccaatagggagtgtgcgtgcatgtctccaggagaggtagtgctttccacacagcttctcgtctgtgctgtctcaaaaggcagaacacactcatgcagatctactcctctgtccttagcatagaaagatcgttaaaggactgctgtagatattttcagtctttagtatttgaacaaacttatatcactttcatctcttttttgctcctggaattctcagtagcccaaaggacaatagaaaaggtgtttcattgagcccattggctctttttattccttttcttcctttgaagtgagttactgctgactgatttaagcatgcttaatgtgtttattttttaattgttttcatctttaggtagtcttgagagtcttttaaaaatttacagtaaatacagatgtatcttgaagctctcctcatcagtgagaagtccaacacaaatttaatttttaataaatgacatttgagttattttttcaaaacttgtagtatcagatcacctggcaaaaaatttattattcagaattttctttaatatataagtttgttcttttgcaaatgaatgatactaaaaaaagttaaagttcttcagagtttattcattaagcattttaactaaaaatacttaatgccctgttgacttagtgtttctttttttgtttattaatttttttctttttttaattaatttttttttttgatttagtgtttcatttaaaccgactcttctttgaagaactaaggtcctaggaagtacagagacaaactttatttcatcccaggttgaactatctcaggcttgaaaagaaagtctaaattttttgtagaaattaatttactttcggtggtttctgtcctgtaaataacatcagtcatctattgccccagcacttaaaggtttttaaatggttaataaaggctttttaatcctttaaagatgtaaagctatttcagtgtattctatataattacaaaagtaaaatgaattatcttgctgcttctatagtatttacattatgaggagtggctttcactccaatatgcatcatttaaaaatcatttccaggccaggtgtagtggcttatgcctggaatctcagcactttgggaggctgaggtggacagatcacctgagcccaggagttcgagaccagcctgggcaatgtggtgaaacctcgtccctacaaaaatacaaagtattagctgggcatggtgatgcttgcctgttgtcccagctacttgggaggctgaggtaggaggattgcgtgagcctgggaggttgaggctgcagtgagccgtgatcatgccactgcaccccagcctgagtggcagagcaacatcctatctcctaggtaaataaataaaaatttaaaaaaaaataatttccacctttttgtcctggaatttcaactaatgaaaagacacatgctagtctgaattactatttgataaaaacctgactagatacatgttatttatggggtaatattttaaatcttcacttcaaaagaaacagtagaattttacgtctagtatcatccctaaggcagaatttcttacgattactatgaaaacaccttaattcaccctgtaaataagttttatcattttgtctaaatttgttagtgtttgtctgtgtcccccagtttatttcttcagtttttttttttcttgaatgtctgatcactaccctggtttctagttattagaaaaatatatgaggctacatgtgtgggctgtggttggaagggggtcatcattgtttacatgttcttgctgcagtcagctcactttggtacttggcagtggcagcttttcttgcctgtggctgcacccttattctgtgagatggaagaagataccacactatttaaattgattttcttttttaaaacttcaaaaaagtttaaaaatattcttgataactgggaatatttaaatttaagtacattgtaccttgtgactccatgtaatgcctttttatatctatttcctttcactacaggaataacttgactgttattgacatgattggcgtggaaggatttggagcaagagagttattaaaagtgggtggaagacttcctggtgcaggaggctcactccgatttaaggtgcccgagtccacgctgatggactgccgtagacgtgagttcatatgtgtggcactctgacaggggaggttggcattaaagctgagagtgaaaggattc

SEQ ID NO: 32894 - DNA, 2300 bp, Homo sapien
attaacatgttgcactggaaaattttaaaattatgcatgtatttaaacgaaatgcctttaaactacttatgttagtttcagcaacttcctcaggaactgaaacagaaataaacaatgtaaaatgcttttagtgaattcttattttcctattactatttttaattttataaaaacacagaaagcattttagtgtaactatgttttctacagagaaacctggctggtgaaaccattggataatttgcaggactattttaatggctgagcagatttttgtttgtttgttttagaaaactatactaaatgggcactgagtttgaaaagatttattagaggccaggcatggtggcttatgcctataatcccagcactttgggagcatgaggcagacggatcacttgtgaccagaagtttgaggccagcctggccaacgtggtgaagccctgtctctactaaaaatacaaaattagctgggcgtggtggcacatgcctgtaatcccagctacttgggaggctgaggcaagagaattgcttgaaactggaaggtagagtttgcagtgagctgagattgtatcactgcactccagcctgggtgacagaacaagactgtctcaaaaaaaaaaaaaaaagatttgttagtaattttacattccgaattcttctttacaatatttattattccatttattcattcagttatttagaattgactttgaatgatagaattaagaagtaatataaaaactatagaaccagacctgtcgccatagctcatgcctgtaatcccagcactttaggtttctgaggttggaggattgcttgagcccaggagttcaaggccagcctgggcaacatagtgagccccatctctacaaaaaattaattacctggctgtggtggagtgtgcctgtagtcctagctacttgggaggctaaggtcagaggattgttggagtccaggagttcaaggctgcagtgagctatgatctcaccactatactccagcctgggcaacagagtgagaccctgtgtctaaaacaaacaaacacctgtagaaccagataaaatattagtccttatgtgggatagattgtgtgttataaattcacaaggatatttaaaaattgtcataatctttcttttttcaaactcagtataaaatgtgttctcataatagtatagcacatgtttgaactgtgtttctagcagctgtgatggatttatacagaagcacttatacatcctcttaactggtgcctggttcaatgtgagtgagaattacagggcatggggcatatggtggcttatagtaagtaaatcaaactatttgacttttgagaagaaccaacttttaaccttaacctttaacaagtaaagggaccaaagaagagattttagttactttttgtatcttggtagagcatttcatgtaagaaaagtcttgcctacttaagtatctctgttatatcctagaacagaatctataattgttctagaaattaggtagaaatcattctttgagcttatgttggatttttttcgcattttagtaatgtagatcatggtttggtttattcaataaatatcgatccaataaattattttaaataaattttatagttcacatatactaaatatctttttttggttcccattagaactgaaagacagtaagcaaattttatctattacaaagaactttaaagttgagaatattggacctcttcctataactgtttcgtctctgaaaattaatgggtataactgccaaggttatggattcgaggtgctggattgtcatcagttttccctggacccaaacacatcccgcgatatcagcattgtgtaagcattgggctttaacttgatttcagttttgtggtgcgtttaacaatgtgaggaggaaaactttttctattgttaagacatcttatgttgttttaatgtaaatatttcttttgtaggagtatgatgtgttgtcattattttgccttgtggctaaaatcaaaacaattaaaagttcataaagatgactcttttattttcaggttcactccagactttacctcctcctgggtaattcgggacctaagtcttgtaaccgcagcggacctagaatttcgcttcactctcaatgtgactctccctcatcacctgttgcccttgtgtgcagacgtggttccaggacccagctgggaggagtcattttggaggctcacggtcttctttgtcaggtaaaccactactgtctcccttgttctctcactgagtagagaagtcatccaggcaagttgtgtgaaa

SEQ ID NO: 32895 - DNA, 2300 bp, Homo sapien
ccaacttttaaccttaacctttaacaagtaaagggaccaaagaagagattttagttactttttgtatcttggtagagcatttcatgtaagaaaagtcttgcctacttaagtatctctgttatatcctagaacagaatctataattgttctagaaattaggtagaaatcattctttgagcttatgttggatttttttcgcattttagtaatgtagatcatggtttggtttattcaataaatatcgatccaataaattattttaaataaattttatagttcacatatactaaatatctttttttggttcccattagaactgaaagacagtaagcaaattttatctattacaaagaactttaaagttgagaatattggacctcttcctataactgtttcgtctctgaaaattaatgggtataactgccaaggttatggattcgaggtgctggattgtcatcagttttccctggacccaaacacatcccgcgatatcagcattgtgtaagcattgggctttaacttgatttcagttttgtggtgcgtttaacaatgtgaggaggaaaactttttctattgttaagacatcttatgttgttttaatgtaaatatttcttttgtaggagtatgatgtgttgtcattattttgccttgtggctaaaatcaaaacaattaaaagttcataaagatgactcttttattttcaggttcactccagactttacctcctcctgggtaattcgggacctaagtcttgtaaccgcagcggacctagaatttcgcttcactctcaatgtgactctccctcatcacctgttgcccttgtgtgcagacgtggttccaggacccagctgggaggagtcattttggaggctcacggtcttctttgtcaggtaaaccactactgtctcccttgttctctcactgagtagagaagtcatccaggcaagttgtgtgaaaacgtgaactgcccgagtgtagtcaaagtatatgaattgagtggaattgttactgcttcaagaactgtgacatccatgaagtattcactggtacactttaaggttatagtaaactaatcgtaagagagtcataggacctagaagtatcatagacagttgtgctccatatatagtgtgttcataggcagtcatggtggatgatatgaatgttaattacttgtgttagctcatgcagtgatgatttgagattaggaggctggaatgaccctttttgagtgatttcataaaaatggaattgtaatgtcaaatttataaatatgcacaattttggaaacttttgtgtgtgtgtttaaggaacatcagaaattatgtgataaatcttagggaattttaatactgcatcttcagatgtttttcgtaaatcattccccactcttctgtaatgaaactagtcttttgaatgccagtcagaaccatgcaatactgaaccttgttgctttcttcctcagtttgtccctgttgggtgtgattttaatagccttccaacaagcacagtacattctcatggaattcatgaaaacaagacagaggcaaaatgctagctcctcttcacagcaaaacaatggtcctatggatgtaatcagcccccattcttacaagtaagaattcttatagtgtggttgggagcgggggcggtttctcacttttgatattactcatttctgatttaattttaagtaaacataaattttgattctacatttgctttcataaaattttaagtcattatgtgaacagctgccccattattattatgagatagtctccatgcaaggacttagttgatgggtattctcattggcagaaaactcttggagctttggaagaagggaaggtaaaacttacactcagtactgattgctacccttttctcatggatatggaagcagacaagtagagtttgatttgatttgcctctatgctaaatgtttttcttcttaaattcagaagcaattgcaagaactttctcgatacatatggcccctctgataaaggcagggggaagaactgccttccagtgaacactccccaaagcaggatccagaatgctgcaaagaggagcccagccacctatggtcattctcagaagaagcacaaatgctcagtgtattacagtaaacacaaaaccagcacagctgcggccagcagcaccagcacgactactgaggaaaaacagacttcacccctgggcagctcactgcctgctgctaaagaggacatttgcactgatgccatgcgtgagaactggatcagcctcagatatgcaagtggcataaatgtcaa

SEQ ID NO: 32896 - DNA, 2300 bp, Homo sapien
ctgtctcagaaaagaacaccttatttctgaatatagaaggaggaagcagtagttattataaagatgggaatcatttaccctttgctaggccttgaaataaaactgagcattgataattgaggaaattttgcaagaacctagtagatacatgtttccagttctgccctatgatgatttctgcagcactggacaaaataaacaagtacaatttattgagtgagagacgaggagcgtgggtaagaaggaggagagttcagtgtgagaaatgaacttggtttcttaggtacctccctcttggtaagaggacaaaggatgcagttaagagggtgagtttgtgaggaaggaaacttgactagtgcacaggaaagctcttcatgggtttattgggggtaggttgtcagcaaaggagtaagagttgctgctaactgctagcctaggcacactccccagtcagcctccttcccttgggccacgcatctcccttctgtacttttctgtcatctctgactagggaaggtgaactacctggaaatacagacaggtggctacctgtctgaaaatctacctgacgggtagatttaaaaccacaggttacctcatagttatgttagttaattttttttgttgttggttatgacaagactttgctagatttgggaatttaatattcctcaattcttttctggctgtgtaactttacatcctttatatctgtatgtttcttccccaagaaactcttccccaagacttcaattgagtgaaaactcaatcagacgtggttatacaatatcagtatttcctcgtgcagaaaaaatgagtcgttcctcctttgccctcttccccacaggaccgtgaatagtctcccacaatacgcagagccttcctgtcccagccttcctgccgggcccacaggtgttgaagaagataaaggtgagatgcattcgtcttgctgcagacatcagccaagggttctgtgctgtctgtattcctggctgatgagtttgagaagacagagcaggcggggtgggacagggccatttccccaccagccccttctgcaagccacacgttcatacatcaggaaggcacctactctgtggacgggcatcattggggccccagctgaccttgtgcatcaatagtgagccccctccctacagctgaggcacagatgccctatgtcctggaataatcccaggcccctcacagcagactcctgattcatttagttcaccttccctagtcagagatgacagaaaagtacagaaggtagatgcgtggcccaagggaaggaggctgattggggagtgtgcctaggctgagggtgcagcacctcacctgcttaccactttccctggcctgcttcccttcctccccaactcactttgtgttagaagcctactaattcagcctcagcagccttggggacccgccttgctcaggcatcagtgctgagaccttctgcctgcggggaaggcagttgcctaggtgcatggaagtaggaatgggtgggaaggaaacctctcctgcctgggggctctgatgggaggtgaattccagtcctccctcatttttcttctcttttcctcctcttctgcctctctttgtcttttgttttctgtttgattctagggcttctttcttgcctaacgtgggtcaggaattgtggcaggataaacctgatttttattctctgtgtctttaatacacatacttgcttttggtcatagaatttaacactggatttaaaagctgctctgcacattggagaattttaacccttgaaggtgaaatactttatgtcgttccttggatgaattttggacttgtccagttatcaacagaaatagcgaacctagtgactagtccagtaaaataagtgttttcaattaaaaaaatctaaaattaaataatccatagtttgcaaaggcaagatgtgggggcggtttagatggtactacctttttttctgtgagagaaaggtaggattttaatggtgtggaaaaataaaaactgtcagagcatctacccttcagcatgtgccgttctgctttgctatcagttggagatatacgtgcggtttggtgttctaacccaggtttgtgtgtgtacttcaagtgcctttaccttggccccactgacagagtacatcttgtctgcagtctgttgcctgcaaagctgtgggcccatcacctttgtactccctcacctccctcacagccgtgttttccttcttgcccagctgaaatggcctgatccattgttacagtcatttcctcgactcctctccctttattgca

SEQ ID NO: 32897 - DNA, 2300 bp, Homo sapien
gatacatgctatactatggatgaaccttgaaaacattatgtaagtgtaataagccagacacaaaaggacaaataatatgtgatcccacttctatgagggatctaaagtcaaattcagagacaaagaacagtggtgggcaggggctgggggaagagggaacagggagttaccgctcgatgagtgcggagtgtgtttgagataatacgaagttctgcggatgaatggtggtgatgtctcccattcctactagagagaatgagacattagatgttattctgcttcggtgctattgttctaatttatttttctacgttcatcgatcctcatttccctatcaggaaaatatgagaaagcaaaataagattttattgcactatatatacaaaggaaaacacaaatacccacttttattggaatattatctttagccctaagactaaatacggaaactggaagtttttttattgaaaaacatttactgggtacctcctaggagctgtccccgggaccttggatacagcagagagcaagacagacacggtcctgctgccaggtcacattccagaaggggaaggttagggaggaaaaggttcaaacaatatttcaggtactgatgtgtgctgtgagagcaacaaaatggtgatgtgacgaactgggggaggtggcagccggtccttctgagtggtcggggaaagtttgtgaagaggtacatttgaggtaaaacttgaataagaagaaagccagaggccaggcatggtggttcacgcctgtaatcccagcactttggggagggcaaggcgcacagatcacctgaggtcaggagtttgagaccagcctggccaacatggtgaaaccctttctctactaaaaattcagaaatcagctgggcgtggtggcaggcacctgtaatctcagctactcgggaggctgaggcaggagaattgcttgaacccaggaggcagatgttgcagtgagccgaaacagcaacactgcactccaccccgggcgacagagcaagactatctcaaaaaaaaaaaaaaaaaaaaaaggcagtgtgccaagatccctgggcaaatcttccctgcagagcaaacagcaagtgcaaaggtcctgaggcaggaggccacagtggaaggaggtgaggctgaacaggcaggcagaggccacctttataaagccttgtagccaccaaaaagaggataggttttactcaaagtgcaattaggagccattggagcattttctattttttgagacaggatctcacactgtcacccaggctggagtgcagtggcacaatcatggctcactgcatccttgagctcctgggctcaaacgatctttccacctcagaccctgagaatagctgggactacaggtgtgcaccaaccatgcccagctaagagactgggttttaccaagttgttcaggctggtcttgaactcctggcctcaagcgatcagcccgccttggcctcccaaagtgctgggattacaggtgtgagctattgagcccagcccattggagctttttaagtgagaaagaacgttatctgacttaaattttttgaaaatcagctggcggttgagtggagaaaggattctgggagttcaggagtaacgtaacaccaaatcaaggtcagctgcaactgtggagatgatggaggttgggcttgttatatgtgcacattcaggctggcggggtggggttgacggggagtaggaaggcaagaaattctggttgggccttgagacctgggtcccggactgagaggaagctcttatggttaggatctggtgggaggcaggggatggagaattgtggctggacatgttccgtgtgaaaggcccagcatatccatgtggataggcagtcaggcagtccacccacaaacctgaagctctgtgaagttccgggctggagacatcaatggggcgcctttggtctgttgacagtgtctaaagcgagggtgggagggagcctcttggggaggagcatttgggggcccagtgttgagaggcggggcaggagaggcagctgcgggaattaggaaggaaggctcgctgatgagggagcagaagccatgaaggggagggagaggtcacatgtgtcggtgccacagactgagtcacgtggacaaggagcgggtgtgcatgctggggtggtgtcggcggctggcgtccttgcagccagcccagctagagtaagtggaagagaggacagaaggtgagatggatgcagaggcggccaactgtaaaggggagctgaaaaggtcagtcgccggaggggatgtgaagctg

SEQ ID NO: 32898 - DNA, 2300 bp, Homo sapien
tggtagagagttataggaggtcttatatctagatacagaaggagacttggagtctaacctgggatttgccacatgttaactgtgagccatgcgactctgggcaagttccctaatcactttaaccaaaggaatagtaatatcagaattatttattgcatgtgttattgtaagattcagatgaaattctagatgtgaaggtgcttcaaaaatgtcaagaactaggccgggtgctgtggctcacacctgtaatcccagcactttgggaggcctaggctggtggatcacttggtgccaggagttcaagaccagcctggtcaacatagcaaaaccctgtctctaccaaaaatacaaaaattagccaggcgtggtggcacgcacctgtaatcccacctacttgggaggctgaggcagagaattgcttgaatctgggaggtggagactgcagtgagatgagattgcaccactgcactccagcctgggtgacaaaacgagactccatctcagaaaaaaaaaaaaaaaaaaagaaaatgtcaagaactgaacaagtataaggactgtgtctgaattggacgtgctaatagctttgtggacagtgtacaactaccttcaatatatgcagaggacactgatttgtggctaaataaatgatttctatctgactttgccagacaattctaattgactttgggattatagagcaatagcatcaaaatccaccttaggcagttcaactagggaagagaaatagagaaaaaacaagtttttagtttcaggagaaataatttgaaggaagttttcttttgtcagaaatcacaaggtagagagctggagatttggaattaataagaaagcattttcagccagctggacaacctgatggtcaggataaagaaaaatagtaagatagtgacctgtatacaaaaacctctcaatttcatatttaggtctattgattaagtttccctgatgttccaaccatcagagaggattagggatgtggaacagggtaggagaaacagccctggatttaaggtaaaattctggtttcaaatctcagttctgtcatatgttatacaattcacatgacattttcttgtgtaagggaggaacaaggatgcttgctctgcttcatatctcactttgtgaaaatcaaatgtaattatgaacataaaaggtagattattaacattaaggcagttgaattttaaaagcttgttttcttcccttatacatattcctaaccgtggagacagctaggttctgtggcaatgaagaaaattgatcaatgactgtttttggtattactttgggaagtagggatggaataggggcaagggaagggcttagcttcaaactgtagacagaagtgggaagcccaaatctttgcatggtgagaagtgggatggaatgtaggtgctagagatggtgcaccagtagggactgtcactggattggggaaaaaaatccggggctgtccttatctgctcccttaggcaaaatcgttctgtgttagtctggagggtgaacctattttaatgcaggagggcatagacttttgggtggaagcggaccctggagatgtactggcaggtgaatagagtgtggaaaagtggggaaaggagaagcacgattcatgagcctgagttcgggcttccatggatggaaaagcatcaggagtggaatttaaagacggtgtgtttcaggtgatgtgaggtcctggatgcccgaagcttcaagaaaatactggttgggcacttagctttccctgtggttgccaatcccacgcaggccgcctctagcgtctcgattcgcttttctctgacctggaacctccgccaagcccccagctctcttcttcgacccagccttgcacggggcagctgtcggggcaggacccgcctctggcctgtcgcagcctagctcacggtcaagggcgggagcctgctgggaagcacggccgcgggggctcgctcggggccacctgcctggaactcagcgcgaggtccagagttccctccggctgcgcagcggcgcacgtgccccgtggaaggggcggttcccgcaccccagaaggagggggcgcccggccgcgcggactttcccttttgcttacttcctagtcccgggcaggccggctcggaggcagcgagaaagcgcagccaggcggctgctcggcgttctctcaggtgactgctcggagttctcccaggtacgtcgtgcgctccccactcgtgtggtctctctgcaccccttcctggggtcgggtcgggcaggggcggaggggagccgcagcccggtca

SEQ ID NO: 32899 - DNA, 2300 bp, Homo sapien
aaagggaacatctatctccatatggactattttcattttattattttgctgccttgggagaatctagatgaatgtgaggatatcctgggctggagagaaaaaatggctcttgccacatgaaggcaggccacaagataggtagagaagtaacatgtccaaatgaacccactatttttgtgtccccaaatctgctgctctttcaatgttcccattctcagcaatggcagcactgtctgcccaaatgctagactgcccaagccacatgcctgggcaccatccttggagatgagtcaagtacagtagattctattacctagatctcccatccccaaacacatctctccatctcccctccactctgtccccgcacacactctcaccaccaaggccactgtcatccttagagctgaaactacagcaatagctttctggctggtctctctgtcttgagtcatagtcatagccctcttccccactcttgaagccaaaaggcaagtctggtaatgtcattttcttgcttaaaactcggtaatggcttctcattctcctgaggctacagtccaaactgtttaatatgatttatgtggatctggcccttgctgaccttcgcagctacttccttgagagattaagaacccagaccatgaagtcagttttgtctgggttcaaattcccactgccccacctattagcttcaaaacttgaacaaacttctggacctctctgtgcttcagtgttctcccgtgtaaaacacggacggtcacaatgcccacctcacaggattgtcaggaagactgaatgagctaacacaggtagagtgctcaggacggcacctggcacacggtaagcattctatcaatgttaaccatgatttttatttctccaattcattatgccttctccagcattccggcccttgcatccactgttctctccatctcagacactctttccaacacactctgatcatgctacaaggtagtcttcagatgtaggtaacagccccagcggcacctgaaaacttgttcaaaagacaaatgctcaggctccaccctagacctactatattaaaaactctagggctcaactccagcaatctgaagatttttgttttgttttttgatagagtctcgctctgttgtccaggcagaagtgcagtggttccatcacggcttactgcagcctgaacctcccgggctccggcgatcctccagcctcaacctcctgagtagctggggctacaggtgtaccacgcccagctcacttttgtatattttatagagatggggcttcaccatgttgcctaggctggtctcaaactcctaggttcaagcaatccgcccgccctgtcctcccaaagtgctgggattaaaggcatcagccactgtgcttggccagcactctgagttttaacaaactcagcattcctccataggattctgatgcccagttaaggctggaaaaccaaggcaccatccgtgataaattgtacttagatgcttatttttctctatcccctgttaggctctacgttccacaatggcagagaaatgtccatcttggtctgttcacctcctttgtaggtgttgacaaatacgagccatcacaaactggaaaggggtaagctgtatttcgtaggacacatcatctaattctgtgctcctcttttctgtttccccaaatcaacacccaggtatttctaaaggcttgcctaaacgttccagcttgttctcaaccttgaagccaggcttaggcctaagttgtaaaggcgggaggggagaccctggaggtagaggggcaaaggcaagatgcttgcgtcgcaggggccctgcatggcctggagcagcataggggccaagatggtctgcgctctccctagattggagtttctctccttcatcatctttggaggaagcacagataactgaggaaagtctgtatctgcacagccacccgaactcctgcctcctaataaacacctctgagggagaggaaactctctctctctcttctcttcctccccagcacccctcgcccccccaccgccatttctcactcctctactcccctctctctccctacccacctctgacccctcctccagtcctgccgcccggtaacaaaaccggggttcccgccacacgcacccggtagggctcaagacgctttatcggcgacaatggctggctgaatgggaggcctgaggttctgaaggaaccggggtgctggcgaccgggacctcgaggccgctgctggggaggacgctggccagcgtgcagggggcggaggcggggcgtgcc

SEQ ID NO: 32900 - DNA, 2300 bp, Homo sapien
gcgcgactcccagcacctcctggcggcaagccgggcagcgagggctcccaaaacaatgcagccggcgcgcggagcgcgggggccgccagccacttccgggcgtgcggcagcgcggggctcaaaccagccagaccagcttcgggctccttgaactcccaacaaggggctctgcggggaggaggcgaccccagcggagggcgttggggatttaggggttggccggggccggcggggggttgggggggcgtgaaagcgagagggcccttatcccactcccaggcccaagtcgtagcatctctcagagctcacgctctttattagctctttcttttggtgtgcttctgtttcctttgtggtttcattgcaaagtagtttatgttgggaagggggcttttaggcctcttggtgctttcgttagagacgaaaaggccctgaaccaatttggggaaagagaggccttttgcagctaccccgggcccttccccagcagagcacccggaagctgggctcttagggacgcagattcttggagttcagaatgtgcattctctccagatgacgattttcctggcgtgtttacggtcagcagataacactgagtgggcttttgccacccattcattcattacccggctcctctaagcagctggaccgcaaagtgtgcctgataacttgggcctgggagccgccaaggccaacgcatcttccggaaggagggaaattaggaagccggggtctgagcctgtgaatgactcttaagtggtcgggaagtaataacaatgcgcccaccttacatatgaaagaacttcgccctccggggattatctctttggatcttcacagccacccggagacagcggctgaggagagcgaaggcctcctgtccccatagggagactagggacaattaggcaaaaggagcccaccccccaacccagaacttactgtttgcagtcagagacactagatcccaggctccacgagagcagaggccggcctgtttgttcatttctgcacatccagcgcccagcatggtgccccctggtacgtaggggatgaatgagctaattctagccctcgtggatctctaggcaggactccttcctctacctcgctccctcccagcctgcccatcttttgtgcccgtcttttgtgccggccaccagtctttacaaacagtgccctgggggcccatactccagctttccagagcgcacagctgcaagggcggctgtgtgttagagcccgtgatgccttcgagtattgagtcatgccattcatttaagaaggaaaaatctctccaaaacggggaaatggtgggcagtcctgtgtgactggtgagactcttgtaggggcgtttctacaacgacgaaacccttcctaggcactcactccaacagaataacaagcccattttattagtatttcgttttccatgtaaagttctgctcatacgaatatatttataattctgatttttttacggcattggggagcacaccgacaggctgctgaacggtggctggagattcgagggaaaacgaagttcgccgaggcggcctcgggcgggcaggtcccgggctccatcacagggcacacgcggctaccagggacgcagccccccaacacacacacacacacacacacacacacacacacacacacacacaccctctcccactcatgcctggcaacccagcagaaacttcggactggggcaaaacaagcccgggccccggcggcacgcggggctaggcgcgttcccgccagtacctggtcgcgaggccgctcgcggggtgccctgcgtgccccccactcccgcagcccgcgccctgctcgctcactgtgggggcgcagcggccaggcttctctgtttgttgtttaaagaaatcctagggcgggcgagcggcggcatctaggggagggggcgcagccagaattcccttccagcaagcgcgtgaggggcattctcaacgcaaaaccagacccagaaagtagtgaccagccctcctcggattacccttcattggctcctcccttgctccccccaccctccagatttgcataaaaaaggccaagaaaactctggctgtgccccagcaacggctcattctgctcccccgggtcggagccccccggagctgcgcgcgggcttgcagcgcctcgcccgcgctgtcctcccggtgtcccgcttctccgcgccccagccgccggctgccagcttttcggggccccgagtcgcacccagcgaagagagcgggcccgggacaagctcgaactccggccgcctcgcccttccc

SEQ ID NO: 32901 - DNA, 2300 bp, Homo sapien
acattttaaatgatgccatttagaaaatccaagagaaaaataaaagtagctagtcagctcattttaaaattttcaactagatatttgatatttatgttgtttttctaattcctggatgatgaatcacattctttgattctttttccaaaccagcttgattgtccaagccacagataaagggatgcccaggctttctaatacgactgtaatcaaggtacaggtgactgatataaatgacaatgccccagcttttctcccctctgaagcagtggaaattacagaaggtaagtgtgacaatttggcatagtggttttgattaacttgtataatatcatttaccattttctttagccagacactgtattaacatgagtgctaatcctcaacaaccaagcaaactagatcatttttgtcttcattttgcagaacaaaaaaatggatgatcataagttaaatattaaatgtcaaaggagtaaaatgtcaaagcaagtccccatgctccaaccatcatcccttatagtatctgtttataatgcagacatttcctacaaattatatctactctatgaagaagcatattttgttgactgtgataaccattgtgaacctcctctaagaagaatcagcattcataactctgtcagtcttttcaggatacgaacaacaactaattagtgaagtgaattagatgtttattgcacaaagccatcatttttcccagaataaccttatcttcaacgtttgtaccacactaatggtagaggttgaaactagaaatttttaagtgagatgctggttaaccttcattatttgggtctgtgggttatacaatggtcctctagtctgtggacccaaagttgtccatggtcaatggctgcgttggggaaacataacctaagtctttatagttgaagatgaaaataatggtgaccctcgcttgcctctctacttcactcgtaatacgacattaattcctaaaatgtttctaacattttattatgttcactttctaaacaaattacaaccataacctctcacagagggaaatattccagacatgtctatgcatagagatatctacaaatattacaacctacaaataaaataaattctccagttttgccttttgcatatttgatatattttcatttgattttattgaaggatctatttttcagcacatgcaattagtgttaaaatatagcaatgggcctaatataaatatatcacaagaagaaactacataaatcaaaacatactgaatagggtacggtgtggttggtgcacattgagagtgttcaagcttgaaaatggaaaattatgggtttcatatacaatggaactattctgagcatcttggcatattctttctagctgtaccatatctgtaagattaaaaacaaagtccctttcacgggctgtttaggctacagaacatatgtggtgagtgaggcattgaacatttcatctattttgtaattttttggtgaataatatttgagatttgctttcctcactagtactatgtagactttgtttttctatagtcttaataattttgagagtcagatttaagaaaaggaagcagtgtgtgcaccactccaaaataaataattgtacaaaaataaatataaggaaataagtatctaattcggacattagtgcccaaatatttaaacctggcctgtttttgaaaatgccatgttttgtattaatgtcctgagtaatacctttcatcccattcatatcccccatgaagatatgattttgatacagaaagtgtatattataaataagtggcttagaatgtttcttggtactggaattgtgttgtaagcatataatgaaaataatgtaatataaaaattgaatataccctacctcctcaattccctactcagtggtaaattttcacttttattggtctcataaattcttcagagtttttgttcagtgcataatgagctttgtatgagaaatcaagccaagaaagagcaaatcatattggacttagaataaaaatacttggatggaactactaaagaaatgtatttcaaaggatgaattttaatggagactgacactggtcatgactatttcagattctttgcctggtgtaattgtgactcatgtgtcagttcatgatgtggatttgaattcagctttcatattcagttttgccaaagagagtaatcctggaaccaagtttgctattgatcagaacactggagtggtggtgttggtgaaaacattggattttgaagaaatgactgaatatgagctgctcatccaaatttctg

SEQ ID NO: 32902 - DNA, 2300 bp, Homo sapien
gacattgctgcctcgatactattcttaaaatagaaatttgattcatgacactttcctgtccaaaatccttcagggggctccctcatggatttcaggagaaactatagaatcttcagcagtatacagagagcccttcacaatttgaccccctgcttacctcccaaattcatgtctttcctctaccgctactgccagcccttttcctacttgccacatacaaacacccaggaaccctgtgtactagtcacacccaaacatttgcagcctgttaattcttatattcctagaacttcccacgggctctttcctctgcatagaacactctccccaaaacttgtagtatggctttctccactttaggagtgagatttgatgtcactttttccaataagcatttcttgaacttactaacataggactatgtgccctttctctgtacttctcagagaaatagcaccccttggctagcactatctatatgtactcatttagcactctgtacatatgattttcacatggtactttaatacccgagtattgaccagcctttccttttagactgtgaactcttggagctaggtcatgtcttactcccttcatatctgtgatcttgagcacaaacttggcacatagtagatgctcatcaaatgtttgctgaatgactgaatcactttatcagccacaaatactacagaaatgtgggtttgtccaatcatctctacttttggtgtaaattaactgttcctcatgaatacaaatgcagggccctctcctcctccctaaagctacctattgctgttgtttcctttgaatgccattccacttggtcctcatatgcctctgatatgcagactctagtaagttcccacactattgggcctgctcttcatccaagaatatggctggcaagcatatgaaccacatttttcttcactaattttcagggttatttaaaaatgtctttgaaagctttttgtccctgtgttcaattttaagttttattctacttgatacgatggaatataataaagggcagattttttttaaggaatagatgaatagaacaatgtccttatttatgttttggaagaaatagtcaagtgtccaactaactctaaccaaagtgttatgattcttgtacaaaatgctgtggacatgtagaagagaaggcttactgcaatagtataacaggcatgaatactgtagtgggtactatttgagaaaataactacaaatcaaatctgttcatttctgattgatatcttaaaaaaggacattatattctgttttttttatcctcatctattgttttgtgttaaataaaacatatatcttcatcctcttatgaggaaaaatatattaaaattaaaagttgtagatgcacacaaaaaatcatacggctgcaaattagtgaaagcaagtgttctaattattgactgattaaagataggcattgaatcatattattctgtttatcccctcaatagaagtttcatgagggcagagcctttatcatgcttactgttatatccccaatatttacaaaagtgctaggatacaatataatcgggaataaatatatttttaatgaatgtataaatgaataccatagatagtgctagcaaagagctgctactttttcaattcaaatgaatttgtaattgttttctttaatagatggaaatactgatgagtgctttactataaatgagatgtcaggagaactctcaaccactcgtgctttggaccgggagcaaatcagcaattttacccttgtcattctgtgctctgacctgggagatccacctaggagctctgtaatacacctgcaagttagagttttggatgccaatgaccacagtccttcttttcccacactttattaccagtcctctgtgagagaagatgctgaagtgggaacagtggttcttgtgctttcagctgtggacaaggatgaaggcctgaatgggcaaactgagtattttctgactgatgaggcttctggtgcattcaccattgatcctatgtcaggcacattgaaaaccagcaacaccctcgaccgtgaagccagatctcagcatacatttagtgctgtggccagagactgtagcatccagggttcacgaagcaccactgtaattataaaagtatatgtcactgatgttaatgacaatgatccagttttggaacagaacccttttgatgtgtttctttcccccgagtcgcctacaaaccagacaactgtcattgtgagagctgatgacctggacttggggcccaatggaactgtggtttttagt

SEQ ID NO: 32903 - DNA, 2300 bp, Homo sapien
tgaagcccattttttttcccccaaccaaaagctttcaagcccaatcattgacttggaacactgagagattagttgaagagccatgtgaatgggacttgaatcaacatgtagaagttctaacttgcaaggaatgggctttgcacataattcattttagtggcatgtttagagttatctgttggtctcttctgggctgaaaacatttcctaggtttaaattctttaatcaggtattaatcatatagctgtatgcttgtaacatccatttctgttggataccatttgttaagttaatgtattttattatccatctacttaaaaatataatatgagctactaacaaaactacaataactcagtaagatgaagataaaattaaacaaatcaggaaaaaagtcaagtggaatagtgagatgaaatcaggaagccttagtacatggaagtggattatgcaagattatgcacatgtattaaagctgcatcaatgaagtgataagactcaaacagtccccaagttagaaacattcctaactgatcaagagaagcagcattgactttccctgacactaagccctgaggaaatgtttttcctgtaagtctttataaaggggactctaaaatgtaataagaagtcccctaaatagtatgtttacaataaatatacagttctgtaaaagtgattatattgggagctggtatacaaaacggtgcatcccacacttccatagttagatctatgtgcatggttttctcttttcctccatgaagcaaagctgctaaattgagaataggtttccaaaccttaatatttgcccattgtgactatgacccttttgcaggtgtgaaaactgaagcagttagctatagtgcagtcagtcacagtccatattggaaatcacagcccttaaggttatattgtgaacttactcactttgcctccctactctttgtctttttcattatatatttttttaaaacgatgggtttcccttgagtttagagtgcacctgttcatgtttatatctgggaatgcatccttccactgggaagacctctgtgcataaattctgggtatctctttgttttacaaaacatatatgggaaggtacagctaaaagataaaagtcaaatgattctgaattatgatactcattcccaaaaaagagggagatgcttaaatgtgaattgcttggaaaaaaatcaacaaccagctctcctctctggacttcatgggcatttcaatgtatctttgtgggtggagtgggaagaggctggcccttaacaatcataccacgtggaagcttttggtgtatataaagtaaatcaggctcagtgtaaaacattgtttacaaaacggtgtcattttataagttaacttttcccatgattgtaccccaagagagaacacctgttagtatatagtatatagtatatagaataacataacctggggtatgttattcagatttttattttctctgggaatactaacatttatgtaactctgcacaatggtcttctatcttgagttagaatattggtcaaaaggaattgagctttagctttcagcaggtcagggccatcacgtggcccatcgccttcatctcctgctgttcacattgatggagtacaggtgattgcagggagaaaaatatcttgttttcttcctctgctgggaacacacagaacccccaaaacattgaaagtcaccttttactttggattcttgcaatacaatccaacccataaggtgtcgagagggtgttgagatgtcagatgaggttggctggcccagttgcccatcgccttgtctttttgcctggacttttgttgccatttgcatatggtccctctcctagagaagcactcctttgcctcagtctttttaactcttcctcttctccttcagcactttgcctcctcctgcaaactcagcatcagtgactctctgatctgcctatttttagttttgaacgctttctttatgctgcaagtggaaagtcatggaggtatttccatatgtgaacctgtagcacaaggaaagggttcatgccagagacatgaagttgaagctaccctcatataggagatatttaaaatcatgagactggatgagataacgaaatcagagaatgaagacggagaaaagaagatgtttactcagcagtttgaaagtactgatgcctgtgtatatgaggtgtatgtgaaaataaattccattgtgaaatctcagaggtaagaacaaaaattaaaaataagtatcagcttttataagtctgttccttctgctaaattacatat

SEQ ID NO: 32904 - DNA, 2300 bp, Homo sapien
ggtggtatgaggcaaggtcagaaagatggataggatcctgtactactaaaaggagcttgattgaaggagtctgaattataatctaagtataatggaatcatttcaggttctaagcaggaggtaatatgatttgagacagctttaaaaacattaatccagatgcttgttcaagaattacttataggctggttgcggtggctcaagcctgtaatcccagcactttgggaggcctaggcaggaagactggccccaggagttcgagacgagcctgggcaatatagtgagacctcatctctacaaaagtaaaaaaaataaacaaataaattaataaaataatataaaatttgccaggtatagtggtgggcacccatagtcccagctactctggaagctgaggtgatggaatcacttgagtccatgaggttgcagtgcgccatgattgcaccaccgcactccagcctgggtgacagagtgagatcctgactcagaaaacaaaacagcaacaacaacaacaatagcaaaaacagaaaagaattacttataaaggggcaagagtgggaggggagggactagttagggtgcaaatgcagagactgaagataaaaagactctaaagactcataacaaatctctttaatggttaaagagagttcattgggggaaagaaagctgaatttattttaataatgtccccattttcggtaacatatatgctacaaagtcaattattttattgttatttggtcacaggtagagataacggtgtggctgtggattagcaattacatacacctccgttgcacatttaaaaaggcattttgttgttgctgcaagaaaccactatgcagggcttttggtcctccctaaaggagagaaacggtatctaggaaattaattcttctctcaggcccaaatgcaaaattgcagaaaccacttgctaaatatggtcagccatttttaagagtccagagagtcttttctcaggcgtactttattagaggccattgatcagtttctaccgattattatagttaattgaagggaaatctgcgactatggctatttattggcatttgcgttcggctcagacagaagctagttttgaaagtggtatccgtagagttatcccgcttgcacacttccttgcctaggggtggtgggggagcgctgagggcttgcggggtgtcagccaccagggctttctgctcatcagtcagcatcgtcagacatcctggaagtgttatgatggcgctgaatgtagaaaaagggttctcagggcggatatattgtcgtcattcctggtggcagaggggagtgacaagaggctcacacgtcgctgggtagtagcacgcataataaagtgtggtttgcaccatgtgtgccacagatttctcgggttttctggaaggcttttccaagttccgccttctcccctttaaagccatcctggccccagctatgcatcggcctttgactccatctgtccttccgctgcggacgggagtccctctcgccaaatggagaacacaagtttggcaccccaaagtgatgataacctctaccctcttggctcagcgcgagccaagagtcaggcctgcagagggacggtcaagcggatggagggggaggccgcggagaggccgctcctctcacctccccgcacccatcatcacttggcacttggccaagcccaggcagacgccccgcctgcgcgtcccccacccgccccgcggtgcacgtctcccagtgcttttgcatttgctcctcttccgccctgctgcagagcgcggctcgcaggttggagtttgccctcgtgtgcgccgcatcacacggcagggaggggaaggcaggcggcggaggctgggtcggagcaggagtcgcgcggtccctggcgcccggagacacagtggggaaccaccgccccgcccccggagcagcggacagggccgcagacctcccttcccccctccctctctccctcctccccagcgccctgactccctgcctccacgcccttactccaccccctactccggccagatccccatcctctccttgtgtgtgcgcgcttcatataatctcctcctttttggcaaaagaaataatgcacctgactttaccaggggggaacaaccagccgagtagaacaaggaacagatgtaaagggaataaaaggagagagaaaaagagatgagattcgtttaaagaaatccaggggcagaagaggtggctgccgcggcagaggcagctagagcttacttccctgtctgcgtgagctgcaggcagaggacgctttcacc

SEQ ID NO: 32905 - DNA, 2300 bp, Homo sapien
aaagctgtaccctggcattgttgaagccacaataatcagcaggcaactaggaaatggacaagagctatgcagttttgagaaattaaaaaaaaaaatctattagcagaaaataaatatggggttttgttataactacatgtcaaaattttccaaattaaaacagctattcctcaacgttcacttaacaagtgtttactggactgtttaagcgaaattgttttcaggtgttaagcctacaagtgtccaagtgcttctcgccaggattagaaccaggagacacaaagcacgcaggcgacctccaaagagatcaaggtagtggaaatgccttagatagagcccacgggagtttgctctccagacgcttaggttctctgaataaaaagcgttaagcttccggggaatacagcacgaacaaccaggaccccaactaaggcagaaaacataattctaagatttcttcagagggacgagtgaaaccctccacccaggcccttccaggagtctccggctttcagcctcgagactccgccctagaggcggtcccgaggagggagacccgcctcctgatcctagatggccgagggagactagcgcgcgtgcgcagagcttgcatcacatccgccgcctgggcgcccaattccggaaggtgctgcacagctgtggcggcgggtactgcgttagtgattagagtttcttccctgccggaggtgggatacacggtagcatcatggtcgaggtaaagtgacactggggctctcaagagtcgtttgtctctggactgttttttttggcagtgcgcgtgggggattgagagtacttggagtccagagagaaaagaggctacgaggggagctatttggccaaggccgagtggtctcttcttcgggttttcggggaaggggtagaagccggatgagaacccgagtcggaggttcagcctgggcgcgaagcctgagataattcgtccagtcctcgtttgactcttgggagctggaaagtgtcctcggaggcggggcctctgttggtgatcgaccactggtacttgccgccctcggggcagtgtcagtgagtctgtgccctaaaagattggtagtcttctctatcttgcgttcaggtcgtctcttatttcacctctacccccagaaaaacttgccgttctttacatctttccctggcatgaacagccaacgctgttagctggtcttgtccatcttaccccacatgtttattgattccattcactcttctccatatccgctgcagtccaccttaattgagaccaacatcatctttcacctggactggtgcattagctccccgttggttggtttccttgcttccattttgttctataagttgttctgtttaaaacgtaagttgttcatacctttcttgtttaaaaccctttactgaccctatgttgctagaacaaaatataggctgttgtaatagtctaaaagaccttacctaatctggaccttgtctacccttgcagctacaaagcaccatctcatcctccatacacagctgtactgcgctccttgtattatttcagttaactgaacttttttttacatgacatttccatcagcctggttcgttcttacctctgttttgtgcaaggctaactccctttctgcttaaatatcaccttagtgaaatctttcacaattatacttagtccttcattccctgactcagcgccttgcttgttgccttcatagcacttatcaaaatgtggaattattttactttttatttgtctgtttcctcttgagcacagggaccatgaccacctttttatcattctattgtgagattctagcacaatacctgccagacacacagtaggagctcagtaaatatttattgagtaagttaaactccggcatcactcagttgctaaacctgaggttctagccaaagaggagcttcctcctcttctctgaacttgactcctgtagcttgcaacaagtagctatggtgagtggtataaagctttttacatatttaaacacgtgaagtgtataatcaatctgactttaggttatgatttgtgtaatttgtagataggtgtgtaattacattctttttttttaggaggtacagaaacattctgtacacacccttgtgttcaggtcgttgaagaggacccatgacatgtttgtagctgataatggaaaacctgtgcctttagatgaagagaggttggtgtagtttttttttttcaattgctaaaatacttaacattctaatactaggggaagagagcagggagagggagtcctttaaagataagc

SEQ ID NO: 32906 - DNA, 2300 bp, Homo sapien
tcactgttcaagagcaaaggacaatatttgaaggagaataaaaagagtttctgtattggtgagtttaaaaaatcttgcctaaagaaggagggctttccttaaaacttgtattcttggttttacacagacataatactaataatttatattaataagttacttgccgtgtctgctttaaggacagccctgagggcccgtacaaagagcagtggtgacacctgctgttcaaataaggcagcttcgggtgtcagccaggccatgtgtgtatgacggagcctttcaggaatccaattaaacttgtggatcctttctccagaaaataaaacatattcccatataaatacaaaattttcctacaatatacataattcatgaatccctgaactaaataatagggtcacttgagttctatatttatctaaaatattgtaaactttcaaggggatgacatcattctataaattcacgacagtgttttaaaaggagcaaattcgaggcaatttacctcaatcattaccatgttgttattgagaaattaaattaatgtctccaggatgattaaatatgtaaaaagttaatagatccaactagacaattaatatattgccatatatattagtcttgcttaggtttctatggttttattgtcatttcaaatcatgttattttctatagttattattaataggtgagtatattatttagttcatcaagtatatattttacaattatggtattttcttgcaaggaaataccatcacctgccacctttacagaaaagcaattcttaggccaaactcacagttaaattcagagatgctgtatcttcaagtaaaaacatgaccttaaggcagggctcagtggctcatgcctgtaatcctagcactttgggaggccgaggcgggcggatcacctgaggtcaggagttcaagaccagcctggccaacatggtgaaacgctgtctctactaaaaatacaaaaattagccgggcatggtggcgggcgcctgtaatcccagctactccagaggctgaggcaggagaatagcttgaacctgggatgctgaggttgcagtgagccaagatcgcgccatggcactccagcctgggcgacaagagcgaaactctgtctcaaacaaaaacccatgaccttaatgtttttaatgaatttccaagtaaggttgatttatattgctattcttttgctagattttttccccctctcaaagtgtaagcagtatgctctcaggacaggattagtgaaactgaaacagggccagtaaaatgtttgtctatttaagtttgtaaatgcctaagtccatccatttttttttttacatagaaaaataattgggtagggttgatcacaaaccacagattttaccagggtagaaagcaaaaataccaatacttggcacaaggatatgtataaataaaaatggctaaagtctccaattgtgtcttctaccagctttgaaaagctgtaccctggcattgttgaagccacaataatcagcaggcaactaggaaatggacaagagctatgcagttttgagaaattaaaaaaaaaaatctattagcagaaaataaatatggggttttgttataactacatgtcaaaattttccaaattaaaacagctattcctcaacgttcacttaacaagtgtttactggactgtttaagcgaaattgttttcaggtgttaagcctacaagtgtccaagtgcttctcgccaggattagaaccaggagacacaaagcacgcaggcgacctccaaagagatcaaggtagtggaaatgccttagatagagcccacgggagtttgctctccagacgcttaggttctctgaataaaaagcgttaagcttccggggaatacagcacgaacaaccaggaccccaactaaggcagaaaacataattctaagatttcttcagagggacgagtgaaaccctccacccaggcccttccaggagtctccggctttcagcctcgagactccgccctagaggcggtcccgaggagggagacccgcctcctgatcctagatggccgagggagactagcgcgcgtgcgcagagcttgcatcacatccgccgcctgggcgcccaattccggaaggtgctgcacagctgtggcggcgggtactgcgttagtgattagagtttcttccctgccggaggtgggatacacggtagcatcatggtcgaggtaaagtgacactggggctctcaagagtcgtttgtctctggactgttttttttggcagtgcgcgtgggggattgagagtacttggagt

SEQ ID NO: 32907 - DNA, 2300 bp, Homo sapien
ctatacactctggggtagtttacttaacctctctgaacctgtttcaccatctgtagaacatagtggtttcaagaattaaatacgataaatgactaccataatttggcatctgaggcatgtaccaatgacagccagttcactcattcatcccgtaattatgtattgaacgcctactatgtctgtcttgctcaccaatgcattcccagcccctatcacactacccgtcactgaggagactctcaagaactatttgtaagatgaatgttaagtctgtgctgttatggtgcatgcatgctggattgaatccatcctccttctgaccatgggaagaatgccaatcagagtagaacaaagtaggaaagtaaaggaaccttcactttagtgttgaacaagagtctattatatactagaaaaaactttacaaatttacagacttctgaaagttaaatgatgattctattgttagttgatcaaacatcagtcattgaaaatgtagtaatacgttacctcaaaagaaaaaaaaaaggttagagttttcttaacagataattctttttaaatctgtaagaatctgtacgtcactaaaataaaatcctgtctagattattaaaataaactttgttatcagttatattttcatggaaaatattcctgtatatattttaattaatagccacatagatatttgctttttctgtcagatcatgtatccctttaaaaaccattaaagctaaagaaaaaaatcttaaaatataatatttactcattgctaataaagggaacacaaatttggaaagactcaagtgaatattttttcttaatttaaactgagtactttgtctctattaagctaagttaaaagaatttgggaggacaacctatgctaccaagagaataatttgtttctaggaatctgagttaaaagaatttgggaatgcaatctctgctacctggagaagaaagaaatgtcgtgggtcccacaccattctcaagactctgtttcaaagcattgtttcaatacgctgatccaaaccctgataacctgccatctttttaataaaataatttataaatttaatgagaatgtttcactttccatacaaaaaacagaaaaatgctttgaatcaatgcacttactgggatttggattactgactggtgttcctattgattcttgtaggagttattaatcctgattgcaacacacaagtgaacagacaagagagataaattttgtggcttgtgggaaatgaaggaaaatgggcctcatttagtctgtgagcatactaattgaaatagatgtatgaagacttcaccagtgttaaaataacattgtttttataaatcatatgatataaactatataacaataaaatagaatgttaaacatgtatttaatcatcatcataattttgattcagaaatctataatttattagttatcttaataatgtttagaatttgttgaacattttaccttatgtgaattaaggacaaaatattaaagctattcagcacaaaaaaagggtctttctgatgtgtatttttcatagaatagggtatgaatttgttattttgttattttgattaatgtctaaaacaaaagataaacacattatgatataacattactattgattttaatggccccttttgaaatagaattatgtcattgtcagaaaacataagcatttatggtatatcattaatgagtcacgattttagtggttgccttgtgagtaggtcaaatttactaagcttagatttgttttctcacatattctttcggagcttgtgtagtttccacattaatttaccagaaacaagatacacatctctctttgaggagtgccctaacttcccatcattttgtccaattaaatgaattgaagaaatttaatgtttctaaactagaccaacaaagaataatagttgtatgacaagtaaataagctttgctgggaagatgttgcttaaatgataaaatggttcagccaacaagtgaaccaaaaattaaatattaactaaggaaaggtaaccatttctgaagtcattcctagcagaggactcagatatatataggattgaagatctctcagttaagtctacatgaaaaggatggtttcttggagcttccacaaacttaaaaccatgaaacatctattattgctactattgtgtgtttttctagttaagtcccaaggtgtcaacgacaatgaggaggtgaattttttaaagcattattatattattagtagtattattaatataagatgtaacataatcatattatgtgcttat

SEQ ID NO: 32908 - DNA, 2300 bp, Homo sapien
aatgataaatgccattagtggtgcacagtctaaggaagtatgaaagaacatgagattccttttaattggacattgaatcaggtaccctgcaaaatgtctagcaaagaacccaagacttagtaaacattcaatacacattagctattactctattaggattggcttcatgtaggaagcagaatttgaggcaaggtaggattgccagataaagtacaggatgtccagtaaagtttgaatttcagatgaacaacaaaaaaattttaagtgtgtctcaaatatcacatgagacatacttatactcaaatagatttgttgtttatctgaaattcaaatttaactgggacactcttatttttatttgctatttccgccaacctaatacatctggtaaatgtaagctgaagatgttttttacctttattgaagtataattgacaaataaaaattgcataatttaggttgtacagctggatgtttgtttttttattttcctttaaaggggaacttctctctgattggtgttttgatacacataaacattgtgaaatgattaccactattaatctaattagcacttaaaacacctcatatagttatctttttgtgtggtgagaagacttaagatctacctttttagcaaatttcaaatatacagcataatattatcaactatagtcaccatgctgcacattggactccagaacttatttatattgcatagctcaaactttgtgccctctaaccaacatctcccccatttctcctatgcctcaggccctggccaccaccattctacacttttcttccgtgagtttgactattttagatttcacatgtaagaaagatcatacagtatttgtctttcttttccgtttttttttttttttttgagaaggagtctcactctgtggcccaggctggagtgcaatgatgcaatctcggctcactgcaacctcctccacctcccgcgttcaagtgattctccctgcctcagcctcctgagtagctgggattacaggtgcctgtcaccacgaccagctaagcagtatttgtctgtctatatctgctcatttcacttaggataatgccctctaggttcatcaatgttactgcaaatgacagaatttccttctttttcaaggctgagtaatactccattgtgtatatatatatatacacattttctttatctactcatccatcagtggaaacaggttgttttcatatctcggctattgtcaatatagctacaatgaacatgggaatgcaggtgtctcttcaagatcctgatttcatttcctttggaaatacactcagaaatgagattgctagcacagaaacaggaaataaatggtatttttcatggcactttatgatctcccataattcactgagtatttcctatgtgacagtcactgttctgagagatttacaagaattaactcatttattcttcataaaagcatggggtagcttatcagcatccttattttataaatgaggaaactgaagtataaagaggtaaagtaacttgtccaagaacatagagcagggaagtggtgcagcttggattatgaacccaagatgttttgttcctggggctgctgtcatcttaatattttaaatagagaaaagtaatatgttctaaataaacttatagaaagccttcagggccagcttatccccaaagttattttttttataagccagatcacccaaccctaatttctgcataaagtgaaatattgtttgctaaatcactactactgggggctacagctagcttacctaagcaccttctatattctttcacgtttagaaatatggatataccctcctatgctcctcttttcattctcaaagccaccctgttcctggaatgtgagatctcctaattgttgactggagaatcaaatgctacctttgcaacagcttatcggaagcaaacaagctgaggggaattgagcaagaatttctgggataccaacagcataggaggaacaaaggacgtagagggagggttgactgtctacacaggacaaagccaatgattaaccaaacctcttgcagatttaaataggatgggaactaggagtggcagcaatcctttctttcagctggagtgctcctcaggagccagccccacccttagaaaagatgttttccatgaggatcgtctgcctggtcctaagtgtggtgggcacagcatgggtatggcccttttcattttttcttcttgctttctctctggtgtttattccacaaagagcctggaggtcagagtctacctgctctatgtc

SEQ ID NO: 32909 - DNA, 2300 bp, Homo sapien
tggcctcccaagtgctgagattacaagtgtgagccatcatgtccagccatgttttagaattttcatgtaattatatattgtggattggttgacaggagaacgagtatgtacaaataaggatatatgtcaagattatattttgttcatgaagtatatgtatatacaactttacataatttttattttagaattattcttacatcttaaaatttcacttattttgtaaatatttccatattcataaaaagctattgtgcttatataatccttatattctattttatttactaataagctatcttgcttgtccattcttccactgttaaatattttcttaatttcctactaatatgaaatttacatctatatttttatttctgtatataactattttcttttttaaaaatgattttcttgggataaatcactagagtgatattgcatgaaaactcatgaatattgtatatctctttgtagctatgaccagattgctcacacaaaggattttataggttcacaaagggtaaactgtatgcattctggctttagaagtggtttggaggaggatgagatggtagcaggagaggctggatgtaagaaagggaacaggaagtgggtgattgcccttatcctggcaagagatgtatctcaactacaaaggtgacaatcggtatacaggaaaaaagtgaatatgataaatatataggaggtgaattcagcaggcttgatgagtaattggatatagggaggtagaaattggatatggggaggaagattggaggatgagtcactgttttttttgcatttgaggactggatggagtagaacaggtttgggagagtggagaacactaagcataccatgtactatatccccaaatccaacacaatggctaccacaaggaaggcattcaataaatgttaattgaataagtgcttcatgcatacatgtatatatgaaggctgcaaacaatgaatcaatgtttctattttccaaagcctcccacgtcttcggttgtatatctagaagctgacttactgtttttatctcttcaataggatatcttaaattcagcactcctgataacaagaaagtgaaaagattaagaaggaaattgtgggcctggcatggtagctcatgcctgtaatcccagcacttttggaggccgaggcaggaggatcccttgaggccaggcatttgagaccagcctgggcaacacagtgagactctttctctacaaaaataaaaattaaagaaaaattaggcaggtgtgatggtgcactcctgtagtcacagctactcgggaggctgaggaaggaggatcacttgagcccaggagttcaaggctggctgcagtgagctactgttgtgccactgcattacagactgggtgacagagtgagaccctatatccaaaaaaaaaaaggaaaggcaagaagaaagaaagaagtgtgaaaagaaagagagtgcaaagccaaagctcaggacttcggaacaaccagacccacctcataaaattagccaattacttcccacagtcagccttttgctaagttatgtagatttagctattccttagaaagttggcgaatgaacctgaactcaggctgctaaaaagtcaatatccctgaatcagaaggaagagatggttccattcagctcacctcatgactagtgagagatagggcaaatagctccctaaagctctctgctctgagttgcagtcctttcagagtgaccaggtcccaccacaggtgtttggagctaaaaggttctgctgggagactccccaagcagctttcctgtctccagctgcactttggatactatgcatcttggttgtgtggctgtgactcctgcttagtgattatgttcttgtatagagtattgtcagtttgggttgctgtattttcctgtatttgtcctgtatctcctagagggcaaaagccataattgctatttcctttgtaactcccaaagagttaggcataacatttagcataaaatgaggactcaattactactgatggttgcccaattgtaattggtaaattggcaaaaagtggtggtttttaatggtcaataaaggtaccatgtatctagtcttaggaaacaaaaggtttattgaaatgcatgtagataaattatcatcagcataaaactgttatggagttttcaacatggggtcttttgctcttaaaatgaagtgaagctttgcaagtccattgtccaataggaaaaatattatatctctctgttcagataaagtcctttaaaaaagtaaatctcttttgaaacgg

SEQ ID NO: 32910 - DNA, 2300 bp, Homo sapien
agaatttctgtagctagaacaacaaagcttgttccctgtgaaccaaatctaccaataatagctctattaaaagagtttcctatttacatagattttataccaaatatatttggtaattcataaaccttacaaacatttacttaacacttaccatgaattgggtaatgtgctcaacacattatcccactaaatcttagtaatagccctattaagtaaataccatatcataagtattatctctcttttactgacatggataatggaactcaaggagattgagtaacttgtactgaatcacacagccagtaaattgtaaagatgggactcaaacctagggagatggactccagagccttaacaactatttatttatacattctccaattgagctacacacttcttgaaggcaaaggcaatgcctgagtcacctttcatgttcaaatcatattaaaaagttagcaagatgtaattatcagtgtactatgtaaatctttgtgaatgatcaataattacatattttcattatatatattttagtagataatatttatatacattcaacattctaaatatagaaagtttacagagaaaaataaagcctttttttccaatcctgtcctccacctctgcatcccattcttcttcacagaggcaactgattcaagtcattacatagttattgagtgttaactacaactatgttaagtacagctatatatgttagatgccgtagccacagaaatcagtttacaatctaatgcagtggatacagcatgtatacatataatataaggttgctacaaatgctatctgaggtagagctgtttgaaagaatactaatacttaaatgtttaattcaactgacttgattgacaactgattagctgagtggaaaagatggatgagaaagattgtgagacttaattggctggtggtatggtgatatgattgacaataactgctaagtcagagagggatatattaaggaggagaagaaaagcaacaaatctggttttgatgtgttcactttgttataattattgattatttactgaatatgaatatttatctttgtttttgagtcaataaatatacctttgtaaagacagaattaaagtattagtatttctttcaaactggaggcatttctcccactaacatatttcatcaaaacttataataagcttggttccagaggaagaaatgagggataaccaaaaatagagacattaataatagtgtaacgcccagtgataaatctcaataggcagtgatgacagacatgttttcccaaacacaaggatgctgtaagggccaaacagaaatgatggcccctccccagcacctcattttgccccttccttcagctatgcctctactctccttagatacaagggaggtggatttttctcttctctgagatagcttgatggaaccacaggaacaatgaagtgggctcctggctcttttctctgtggcagatggggtgccatgcccaccttcagacaaagggaagattgagctcaaaagctccctgagaagtgagagcctatgaacatggttgacacagagggacaggaatgtatttccagggtcattcattcctgggaatagtgaactgggacatgggggaagtcagtctcctcctgccacagccacagattaaaaataataatgttaactgatccctaggctaaaataatagtgttaactgatccctaagctaagaaagttcttttggtaattcaggtgatggcagcaggacccatcttaaggatagactaggtttgcttagttcgaggtcatatctgtttgctctcagccatgtactggaagaagttgcatcacacagcctccaggactgccctcctcctcacagcaatggataatgcttcactagcctttgcagataattttggatcagagaaaaaaccttgagctgggccaaaaaggaggagcttcaacctgtgtgcaaaatctgggaacctgacagtataggttgggggccaggatgaggaaaaaggaacgggaaagacctgcccacccttctggtaaggaggccccgtgatcagctccagccatttgcagtcctggctatcccaggagcttacataaagggacaattggagcctgagaggtgacagtgctgacactacaaggctcggagctccgggcactcagacatcatgagttggtccttgcacccccggaatttaattctctacttctatgctcttttatttctctcttcaacatgtgtagcagtaagtgtgctcttcacaaaacgttgtttaaaatgg

SEQ ID NO: 32911 - DNA, 2300 bp, Homo sapien
ccacctacattgagggtgggtctgccttgcccagtccactgactcaaatgttaatctcctttggcaacaccctcgcagacacacccaggatcaatgctttgcatccttcaatctaatcaaggggctggatttgtttaaccatcacacaaggggctgtttttgtttttgttattgtttaagagatgagctctccctctgccgcccaggctgctgtgctgtggcacaattaaagctcactgcagcttaaaactcctgttctcaagcaatcctcccacctcagcctcccatgtagctgggactacaggcatgcatcaccacgcccagctaattttttaaattttttagttttgtagagatagggtctcacaatgttgtcctgttagttgcctagattggtttcaaattcctggcctcaagcaatccttggactccccaaatgctgagattataggcaaaagccaccaagcccagctgggctcactaattgaaggttatgaaagcatcacaccctttttaggcaatcccttctccctctgtatggctgaatgtaggaaaaaagtatctccctcccatggttagttaaggatcagactcacttgttctaatcttgcctgtacaagttagtagctctgtgttcctggactattagttagcctctctgtgcctgtttccttttatcagactgacttccttgctcctcagcttgcagatggcctattgtgggactcaccttgtgattatgagagtcaattctccttaataaactccctttcatatatacatcatatatacatctatcctattagtcctgtccctctagagtaccctgaatgatccaccaggctgtcggggcttaaattccagctttataacttacttctagctgtgtgaccttaggaaatgttcctgcttctttgtctcaatttcctcaattgtaaaaagggaataatattattacccatcttatagggttgttttgtctaatgtgttaataaatgtaaacatttaaaacattacataagagctgattttactattattataaaaaagctcttaaaacagtttctggtcagcattaagaactcaataattgttaatggttaatattagtcatgtaactacccagataatccataaactgtattagtcatcctgttaagaagcaaggcctggtttgtcttcttccttttattatacaattttactgcttctaatttaaactcttgcctccctaagttcaatccaggaagagagtcaggattaaaggactagaaggaaagacaagagtgctgatggaaacaaaactactcaaatataggtgttaaagagagagaaagagacagagagggagacagagagagagagagagagagagagagagactttgtcagctaaaaattaactagactgtcagctcctgcgtcttctgcatccctctcagaacctggaaaaaaatatttgcagtggtcctgatgtccgcagcaggccttgctccgatggttttgcagagtagcaagtgaagatttccaaaaggcggaagagcgggataagagaagaaaaagagatagataagctagcacaggaacaaggctcagagcaggaaagttaccaggacagaacagggagggactgactgtcacagggcagggagcaggaggaaagaagccacttttcagtgaaaggtatttgtaattacaagaaagccaggttcttcagggccctggagaaacagaaatacaattccctggcttctggggagagcacttaggggctcctatatcctcatccctttggattttcccttctcaaacgccagaatttggaaaagggtggggagggtctttaaattatttggcacaaactccgaaaaagtggagaggctgtgagccagccaccctccgactaggttttgtggtgatggttgctgaaatcacttgcgcacaggatgacaggagctgggaacctcaaggtaggtgagcctgccaagacgcgggtccgggactcggctggggcgcagatggagcccgcccggtagggggtgtgcggagccctgttttctgggctccggcccccagcccagcccagccgccgcaggagcgctcggccagtaggtgtctctgctcctcgggcggccttgagcagtgcctaacgttgagcgtgaggctcgtgctccgggtctcgcgggcggccgcctcgggcgtcgagtcccggagattggacagacaccagagcctggggaccgcggagtgaccgggtggggctggagggcggcgccgcgccttctggggagacgcggaggt

SEQ ID NO: 32912 - DNA, 2300 bp, Homo sapien
ttggatgactgtgctgtcaaacgagaaatggaaaagcccctctgccttactttgtttctctgaataatacaaatattgcagatgatgcatcacattatgaattttcatagaatactgcaatgtatttgattctgtttaattctcaaaatagccctctggatattatttccattttagaaagacggaattgaggctcagaggtggcaagtgacttgtctgagattattttgttgtaaatggcacttccaggcccttaactcaggatttctgcctttctgcctcctacctctgcatcacagctgcctcaacctgttgttaattttatattaagctgtattaattggggctaggagtcttcataatgctaaatgtaaattctttgttttgttcaatgttcttattttatggttggcaaacaaaaacaacaaaacagcattgacaacaacaacagaaacaaccaactgaagctgcagcttttaatctttctaaagacaataggctaaagtgaggtcctcataataagatgctagtcaccaggaaggaagccagggaaaatctcctcccagggggtaattgatccctattggcctaacactgcatgtagcactgagttaggaggctccatggagaagtgtctgcttcttttcctctgctgtcagaacaaagttcacaaacaactttgttttccccacacctttggagttagctagttagggcccctatttatgtccaggggaccagacctggacatttgtaaaagaactgaatatagatggatagctaagaaaaaaacaaatgttaagattatcattatttatagcccaatgatttagtaatctaaaaaaatccaagaacaacaaaataatccctaagaaggacaagaattttaaaacatgcagtttagaaaaccaaatttctcaggcctagagctcaagtaaaagaaaatctgagataatgaagtctggaacactgggcctgcattctgctcctgactctgtgcccttgggtaagacattgaacttccccaccccagattcatcctacaccctaaggagggtgtaggattttgtagccttcctagtgatggcatactattaatcagaaccttaaccagctctattctcactatcccagtaaaatgatgttaaaaattagacctcgtgacatgagagaagaggggaaattaattacagattacaaagaaattgtgggatctaagtttagggtgaggtgttttattgaacctctagggttggtcatagcacctgccatatagcaggtattcaataaatgatgtgtaatgggtggttagactgatggaaaggcaggccttcccagtgacggtaaaggacctggggcaaaagagacctgtggttgagtcctgatccccacacattagcacactgactagacgaagttataagcttcaatttcttcctgtgtaaaatggagataatacctcatagggttatgaggattaaataagaaaatgcttagttcagtgcctaatacacaggaagcacaccgtaaatattagttattattattactaatactgtgatcatatcttccatccaaagacttctctgaggagcagggggcatccagagataaaaagcctgcaggtgggaaatctgttagccttctagggcgttaggtttctgtggaactctgcacctcttccctgtcctagttcttaagaacagaaactctccagggacctctggtgaggtagccgtgggaagatgaggtgcagaagtaagctgggacctgtgagcctcaatttcggcctcttctgcgctgagacccaagcggatcttgcttggcctgtatgcgttactgggggaaatggacgtgggcctgagcgcggcaggtgcgagggcgctgccccggggccgaccaccctgcggggacactgtagctgtcattccttcttctgcaggcgggtaggggaagcggtggccaaagtgggagtcgaccgctcagcacagtctgtctgagtgttgaccaggaaagtccaggctctttctaaatctcgccgccagacctggtgacgcattcgcatgtatttaaggcgtttgcacgcagaacgttatcacagaatgtagccacctttcttaacggtccgggaaaccagaggtctctccagctactcagggtagaggaatttctcctatctccatgtgacatcttctgatttagaagaactaatgttagatttctcttgggcctttccacctacagctatagtcttccctttgtttagctaaaattgaggcaggtaggaaaatattattggg

SEQ ID NO: 32913 - DNA, 2300 bp, Homo sapien
taagcattataagccgccttagtgaccaccagggacggaaaccgttaattatcacgtttcctttcatctccaggggccctttggcccgtgacacaagaggcttcggtattggcgctttcccagaactggcccagaggagccagttcagagtgtgaggtcgggtctgcattgaacgtacacaccgaggtctatcagactcccccgattttagcgaagggtgctgactgctgtgctgctagaggctagcaagctccctgtgcgcagctgatgagtttcagcaactcgccacctgggcgcttttctttaaattttgggagtaaactgggaaaataaaaaaatctccacgtccactggctctctccccttctccaacttcctctttcgactcgtttgtgggagttttctcctctttgctgggactataatgtgatgcgcaatcgtttgtgaatgaacaaaagtcaccggcaagcagggagacggggacagatcgctgacggcagattgagggtggcagcaaaggcccggcctccaaggataatggggagccgttttccctcacgcctggtctctatggcccccttcgtcttccaggtaaaatgaatgttccttcatccatcatccgcagagtaccctcaggcgtgcgtagaatctgctgatgaaacctattagcgccgactgggcagctttgtggagccacccgaggctctccattgtggcctttgtctgcagaatttaagcatttacataatgcattagcacggaactcagcacccggtggggacatcgcgtgccaagcctggcgcggccaacgcttcagcggctccctcacccggcagctccctaggaccaccctcgaggaggcattggagtcgggctgcaggcgcacgggcaaagaacttagcatctcatccaagtacttcgccttccttggccgtctccgggaggttatgcttaaaaacataaaaataaaaataaaaataaaaataaagggaggcggacaaagtttcggtgggtgaactgaagctgggtccatgtgaccctgaagccggagaaataaacttaacatgaatcttgctttcctggcgggcgttgggaccccgccgtttttcatgccaaccgttggaagcttcgtactcaacggccacaggtgcctaggagcgcagagaggcctcgggttcaaatcaccggcgcgcagggactggactcgcgggtagcgacccccccaacccccccccccccgccctacacacacaccctcgcgccggctgaaagcatggaggattcagggcatttgaaaaaagaggggctgggcgcggtggctcacgcctgtaatcccagcggtttgggaggtccagaagggcggatcacttgaggtcaggagttcgagaccagcctggccaacaccagcctggccaacatggtgagaccccgtgtctactaaaaatacaaaaattagccaggcgtggtgcctgtaatatcagctacttgggaggctgaggcacgagaatcgcttgaacctgggaggcggaggttgcagtgagcccagatcgcgccaccgccctcctgctctgggtgatagagcaaggcactgtctcaaaacaaaacaaaacaaaacgaaagattcggtcaggaaagaatctgcaggcattcgaggcgctcgcactttgcaaagtaaatgcaatctctttattaagccgaagtccctcatatctatccttttagaggaaggtggtccaactcagaaatctctcccaagaggactttccaccgaagactaccgcgaagtgccaggaactcgccccagtcccgacaggtgcaggacctttcgtgccgccacaccttgggactctacctccctaaataggccacttaaaagccagtagtgcaaccgggatcccgcggcgataaagaatcactgtgcagaaccctggagctgggagtcggcccgcccccctcccaaagaaaccgggatcccgcgtcctccccgccgctagcgcagcgcgccagcggcgcccaatcagtgagctttccgggtctgtgacggccttcggctccgccccctcgacggccataaaaagtcgcagcgaagcctgcacctccgagcaccgcgcgcggccctgcccccggcacggcccccaggtgcgctccttctccggctgcttgtagcactggtctcactgtccccgccgtcagccaccggttccttatccgtctcattccccattgtggcttggctgagccggtcgccaggcctcgctgtcctcctttgccttcctctctcctcagcggccgtactttgc

SEQ ID NO: 32914 - DNA, 2300 bp, Homo sapien
acatgcagacaatagtttttatagcatttgaaaagtatacctattaataaactttaggataataaaaacttagacaaaatctaaccaaaatgacatacaatgttaagtatgggaagggtctttaaacaacactgtctcatctatggcaaggttctatggtctgactgtaatgcctattgagaagcccttgtctatttggttttctttatacttggggagaaaaaagacaaaaagggaaacaagaaaaccagcaatgttcaacaaccttccaggctatttccaagaacaatctttgtacctcacaacatctccacctagtgactccttaaggatcttacagccattcctagaaattacttgttttaaattgccactaatatgcctaacctcatttcagataatttaaccttaaacacatgtatttagaattaattactaggaattgagaaggtaccgacatgaaaatgaagaatgaggagaatctttttctggagaaataaaagagcagcaaaaaatagtaatcaatataacaatcacagttcccgaggtacagaattggtgacatgtcaaacaaagccaactagatctatcagtctaggttttctagttgctttattttgaatgcatacatcttatataaaatgacacttgtattcattgactaaagggcagacggcttacaaaaaatatttgttgagcttccagtgtgcatcaagtactatgccaagttttctacttgtttctggacgtattttgagacagtatagtatagcaattatgtctgtaggtttcaaactggagccacttacttgctatatgactttgcccaaactacttaaggtttctgcatctgtttccccgtctgcaaagtagggctagtaactttaccaaagttactgtgagaattaaatgaaaatatgaaaagtccttaggattgtttctggcatctggctcaatatttggtaatatcatatattattttattctcacaatccccactttaaacagggtctgtctggctccaaagtccctgctaattcctcactgttgtagtatatttaaaaattaaaaatatactttaacaaaatttaaattggtagacattcattagttccttgaatatatggagaaaatacattaggagttaatgtggaagaaatcaccttgaggttgggaataaggagatctgtgttactcggtgaatattctgggcatgaagttccttgttaattagagaatcaacatgagctaggttctttattgtctaatattccatgaatctaatattatctatacataaatagttggttcctaaaggtggttttttctttccttgtctgcatttaatttcgagctgtcttcaaaggaagcaaaactgaagttatgcataccgaatgccaaacaaccctatctgtgaaagttggttttacaagagcatagaacccagttcggcagttcgcctctgccaaatgtccctgcaagctgattagtggtagcgtcaagcctatcgctagttctcctcatctaacccattttcttagtcattgtcatttaaaccacttatactttatacttctagtcctatttgcaaatccatcttttagctttataacccacctccccctagcccttaatttcaaaggtccaccggatatatgtggttgttttgcgccaaactagcagtttacaagaaaactacatcaaacaagaaaaagaaccattacgatgcatctatgttttcccttaagtgcggaatttcacactgcagccctcgtcttcaaacacctaaacaatgcacctaggaccttcatttattattccgtgcccacccacaccctaaaaatcgctctcttcaccccaattgctcgaaatgcctgtcactccaagcactttgactagcccaagagcctcatttaaactttagccccactctctcctcctcgccccgccccgaagctaatccctgattggatgaggcaccactcctcgtggggctgcttaggccaccgcgcgcgctgcgcgctgggaaacgagtggagacacgaggaccagcgcgagcggtcccggtgggctaccctccccctgcgacgaccccccctcgctctgaccgactggtcccctaaacggtggcggcggtttttggtcgttgggccccgggatttaggaccaacatttgaagacccgaaggggtgaggaggggaaaggggaaacggggtcactaccagaccactgctaacggctggatagtgcccggctcactctcacgccgaatacacagtgggggctggcggcggtggctg

SEQ ID NO: 32915 - DNA, 2300 bp, Homo sapien
ggtctgactgtaatgcctattgagaagcccttgtctatttggttttctttatacttggggagaaaaaagacaaaaagggaaacaagaaaaccagcaatgttcaacaaccttccaggctatttccaagaacaatctttgtacctcacaacatctccacctagtgactccttaaggatcttacagccattcctagaaattacttgttttaaattgccactaatatgcctaacctcatttcagataatttaaccttaaacacatgtatttagaattaattactaggaattgagaaggtaccgacatgaaaatgaagaatgaggagaatctttttctggagaaataaaagagcagcaaaaaatagtaatcaatataacaatcacagttcccgaggtacagaattggtgacatgtcaaacaaagccaactagatctatcagtctaggttttctagttgctttattttgaatgcatacatcttatataaaatgacacttgtattcattgactaaagggcagacggcttacaaaaaatatttgttgagcttccagtgtgcatcaagtactatgccaagttttctacttgtttctggacgtattttgagacagtatagtatagcaattatgtctgtaggtttcaaactggagccacttacttgctatatgactttgcccaaactacttaaggtttctgcatctgtttccccgtctgcaaagtagggctagtaactttaccaaagttactgtgagaattaaatgaaaatatgaaaagtccttaggattgtttctggcatctggctcaatatttggtaatatcatatattattttattctcacaatccccactttaaacagggtctgtctggctccaaagtccctgctaattcctcactgttgtagtatatttaaaaattaaaaatatactttaacaaaatttaaattggtagacattcattagttccttgaatatatggagaaaatacattaggagttaatgtggaagaaatcaccttgaggttgggaataaggagatctgtgttactcggtgaatattctgggcatgaagttccttgttaattagagaatcaacatgagctaggttctttattgtctaatattccatgaatctaatattatctatacataaatagttggttcctaaaggtggttttttctttccttgtctgcatttaatttcgagctgtcttcaaaggaagcaaaactgaagttatgcataccgaatgccaaacaaccctatctgtgaaagttggttttacaagagcatagaacccagttcggcagttcgcctctgccaaatgtccctgcaagctgattagtggtagcgtcaagcctatcgctagttctcctcatctaacccattttcttagtcattgtcatttaaaccacttatactttatacttctagtcctatttgcaaatccatcttttagctttataacccacctccccctagcccttaatttcaaaggtccaccggatatatgtggttgttttgcgccaaactagcagtttacaagaaaactacatcaaacaagaaaaagaaccattacgatgcatctatgttttcccttaagtgcggaatttcacactgcagccctcgtcttcaaacacctaaacaatgcacctaggaccttcatttattattccgtgcccacccacaccctaaaaatcgctctcttcaccccaattgctcgaaatgcctgtcactccaagcactttgactagcccaagagcctcatttaaactttagccccactctctcctcctcgccccgccccgaagctaatccctgattggatgaggcaccactcctcgtggggctgcttaggccaccgcgcgcgctgcgcgctgggaaacgagtggagacacgaggaccagcgcgagcggtcccggtgggctaccctccccctgcgacgaccccccctcgctctgaccgactggtcccctaaacggtggcggcggtttttggtcgttgggccccgggatttaggaccaacatttgaagacccgaaggggtgaggaggggaaaggggaaacggggtcactaccagaccactgctaacggctggatagtgcccggctcactctcacgccgaatacacagtgggggctggcggcggtggctgcggggttcaccctcgtccttccccagccccgtcgagcagtgggagggcaagtgtccgagacgctgcttcctgccccggcagcatccggccagaaggcgccctcgccgtcacccaggcgctgcatggtgagggcccagcggccagtctctttggggcg

SEQ ID NO: 32916 - DNA, 2300 bp, Homo sapien
ggtcccaggctccagacctgacccagtgtctgctcagcccccatggactcaggatttggacaatcccttgtggacccaggattcaggctcacctatacagaccagtgctccaggaccacccctgcaaatcagccataagtcccatcccaatggtcctcagtgccagaccaaccccctcaaactcaggatccaggaccgcacccatagaatcaggctccaaccccatacccatggactcagacaccaagtccacccactgaccaaggcaccaggctaatttgcctgaggatgttagtagcaaggcctgcacatggaccataccaaccagcccacacagactctggtcaagctgagtggtgaagggctttccctgctgaaggcagtctgtaaagattggaagaggtgcctacttcttcaaatttgcagataccaatgaaaggtcacgagaatcacaaataatgatggaaacatgatataccagatgaacaaaataaagcaccagtaaatgactctaaagaagtgaagctctacaaaatttctgacaaataattcaaaataattgtcttaaaggaactctatgagctacaagagaacaccgatagataagtaaacaaaattgggaaaataatacatgaaaaaaattagaagtttaacaaagaaaaagaaaccataaaagagaaacaaagttctgaagctaaataacacaactggacttaaaaatttagagagcttcaacagcagactcaaccaagcagaagaaaaaagcagtggttcagagagaggtcatttgaaataatccagtcagagaagtaaaaaaaaaaaaaaaaaagagagagaaagagtgaagaaagtttatgggacttcttgaacaccatccagtgcaccaatatatgcattataacattccaacagggatcagagaaaaagaaatggaaatataactcatttaaagaaataataatagaacagttcccaaatgtagagagggaagtgaaagtacagctctgtgaatcccaaagaaccccaaatagattaaacataaaaagatcttcaccaacataacattataatcaaattctcaaagtcaaagaaaaaattctgaaggcagtaagagaaaagcaaatcatcacataaaagtgaaattccatagactatcagcaggcttttcagcagaccaagatagagcaagatgatatattcaaactacaggaaaaataaataaatgaccaaccatgaatactatacccagtaagctatccttcagaaatgaatgtgatataaagcctcccagataaacaaaagctgagacggctcatcaccattaggcctgcctcaacaagaagtgctaaatttcaattcttcaagttgaaataaaaggatgctaccaacatgaaaacatatgtaagtataaaatttgtggtaaagataagaatatagtcaaatgcagtatactctatactgtaatagtgatgcatatatcacttttcactctagtataagattaaaagtaatcccagcactttgggaggccaaggcgggtggatcacaaggtcaggagatcgagaccatcctggctaacaccatgaaacccccatctctactaaaaatacaaaaaattagccaggcatggtgctgggtgcctgtagtcccagctactcgggaggctgagacaggagaatggcgtgaacccgggaggtggagcttgcagtgagccgagactgcgccactgcacaccagcctgggcgagagtgcgagactctgtctcaaaacaaacaaaaaaacaaagattaaaagatagtatggaagtataaaatgttatggtttctgctaaaaattattacagttataataatttgtgaagtgatacataatataaaagatgaaaattgtaatatcaataatatataatgaggaagaaaagttaaagtgtttttatgtatgccatcaaacttatcagttgaaaacagactattataagtagttttatgtaagtcccatgataaccacaaataaaaaaaaaagatgacaaatacaacaaaaaataaaaaggaatcaaagcaaacctgcccaaaatattatcaaatcacataggacgacagaaacaaaagagctacaaaatagtcagaaaacaattaacaaaatggcaatagtaattcattacctatcaataattactttaaatgtaaatatattgaattctccaattaagtctaagtggctttaagaagattaaaatcatatcaagtatcttttgtgccacaatgctatgaaattagaaatcaataagaggaacgaaacct

SEQ ID NO: 32917 - DNA, 2300 bp, Homo sapien
tttctcatccaattctgaactttattaaaggacattaatcatagagaccatttactcttttgaggttgctgactagatgtctgtggaactatatgaatctactaagacaaacacacgtctataagagagtgaggcaaatagttggttatggctgctaatacgcttctgaaaggcaattttaaagaagataaaatgtgttttgtgcaatcaatgtcagtgaaatcagttgaattttccaaagcaattgctctaaaagacaacactcatctgttttgctggatatttgatttgtttttgtggtcgttgtttaaatccatttctactcttttaaagttataacttattggtatatggttcattcttcaccaatgcagatatattgagaagaatggaacctgtcacatataacacatatttgggcaaagagtactttcttaaggaaaaaacaaacaaaacaaaacaaaacaaaaacaactactaaaagactttaagtggaactgtgtagaacatgttaaatatttccatttctgtttacctttgtttctaggtatttgaaaagcccaggctgctttgttttataaacaattcctatactcctgtgggcataattctatattaactgaagattaatttcaggttacactgtaaaaatgccttacaaatgcaatactattagggtgtggaaaaccctgaaggaactgaaaatccaatccatttgagggaagcctttaattaacatcttggagaatatgtattacctttttaaacagataaatattttttttcattttagagtagcggaatctaatcttaatctaatcttttaggagtatatttcagagaaattccaagcacaccagtatgaccatccttatttcagaaatgacaatgcatagaggaaaagtaatgtgtgcaaagcctccgaagaggatggttaagtaaagacttaggttaccagtatcaggctttcgtttttgtatgtaggtagctctactgcctcctcttaaaaccaacaaaggaaagagagactggctgcaaacttttagaaggaatggcttcgaatagggttcctgggaggaatcccgaggaaatagacgctgctgctctgctgattgtctccactatcctgttttgctcctacccactaatccagcctgggaggctctgggcattagcggaaggcttcaccacaaggagacaggagcgagtattccataggcatgcgctcctagtggcacgagtggcttgggtcaggatcaaagagtgaaggattcggaagtcagctatctggagagagagagagagagattgtgttttattcgtgtcccatagctttcctatcctatccctatcctagcttttaacctgagccagagctcactacacaggttcctggctatcgagtctgaatctgcactactcaacttataaactgtctgcagacacctgttagggaaattgctgatcatgggcagcaggatctgaactcgctttaccttctcgtttggagcacagggaccgcccagctagaggagcaccagcgcactgcgccccagccctgggcgagggtgcggaggatttgttctcggtgcaatcctgctggcgcttttccggggttctgcgcggatccagctccccatctctgctcctacacacacaaaagaaaacaactctcgattggaagttgtggaattttctcagcccctacgaggcgcggggattctccagccccggccctcctcccgccagcctgaggtctccttcgctcgcctgccttgctagggaccgcagtccctcagccgcagctgggtctgtccgccccgcctttgccctcgccttttcccggggcggatttggtgaagtcggcctcaagtccaggaggtctgtcttcgccgggccagctctcgcggaactggggggtagagagcaaagggagagattcgtggaagggaagggaggtaggggtggcgcaaacgcccagagtatcaaacttgggggtggcacagtaggtgacagcagcagctgcaggtggtggctggggacccgcgagggggcgcccctctgggtagggtctggctgagcgggcttgcaagcccgggaggcggctgagagaccctggacactgttcctgctccctcgccaccaaaacttctcctccagtcccctcccctgcaggaccatcgcccgcagcctctgcacctgttttcttgtgtttaagggtggggtttgcccccctccccacgctcccatctctgatcctcccaccttcacccgcccaccccgcgagtgagtgcggtgcc

SEQ ID NO: 32918 - DNA, 2300 bp, Homo sapien
ataccaatttctttcaaaataccagtttttaataaattataatctaaattgagccccttcttatttgttaccctccagctctaattataacctgcaattaatttgttccataatgtgtgtctcctctagttaaactgcgagctccatgaggaagggctcttgtctgtgatgctctgcattgagtatgaggcgtaaagtgggtacatggcataaagtgagcttgcaggaaatatttgttagatgaatgaaacctaagtttgaaagcagtcgttaatcaagcattgtttgtttaaagaattacttgtgaatatgatacctccatgtttggatggaaattgatttcagtatctcatttcaggatgagctaataagagcaattacagctcgctcagccagacaaaggagttctgaatactcagatgactttgacagtgatgagattggtatgtgacagtatggaaacgtgaaccacttttcttctttttgcttccttagttttgtatttagccagccccccaaccacccatcccctcaatcacgtatgttaaaataatacctaagcattcactaattttagattttcaactttttaattagtagaaagccactcttaattttcaggaagttgtatgattttctttttttattgttgttttgttttctgaatgtgtatacgaaaatataaattaattgatggcaggtttgcagtaaaaggatggctgccagtggtaaaccacattgaagaagacaggttcatctttaagatcaaccctaggaggtgctacagctagttagtaactagtcccacagaactaaacttcggtgcacattagaagtgcttttataaagcttgctataaatcagattttttttggctgtgataaggggtaaatttaaaaaccacagactcttcgtgtttcatatatcagtactattataatttggtttctcttagctatgtaaacatattaacattttagtttcaggtataagcatacagaattctaaacttggtgtttttgtttgtttgtttttgtttttgagatggagtctcgctcagttgctcaagctggagtgcagtggtgcaatctcggctcactgcaacctccacctcccaggttcaagtgattctcctccttcagcctcctgagtagctgggactacaggtgcccgccaccatgcccggctaatttttgtatttttagtagagatggggtttcaccacatcggccaggctggtctcgaactcctgaccttgtgatccgcccgcctcagcctcccaaagtgctgggattataggtgtgagccaccgcacccggcctggtgttttattctttaaaatttggtgaataattgtaattgatttctgtaaaaccagtaataaccacagttaaatcactgctgtatagttaacttagcatttcttatgattcttagtaaatctaatattctggtgtggatggaattgtagttccaaaatttttatggaaaaaatataattagtaattactaattaaattcttccatttacaaatgttcttgattttacatgaagaagtaatttgcaaataaaagttttacagtccataatctaatttaaatgctacatgactgattgttagggacctttggatggctttttccagagcaaacagtgtttggttgtttggtaccctacagacaacacaataaatacattttgaataaattaatgaaattggaatttttatttcataaatgttaatgagacgtgcctgagttagctgtgtttttagagctgcaagtctatttataaaatacatttgtgcctattcattgttagaattttgtttgtagcttttaaggtaaactttgattaagttaacgtaaccttgacaatttttaaaaatactgttgaaaacatttttcttttccatttttcagtttctttaggtgatttttctgacacttcagcagatgaaaattcagttaataaaaaaatgaatgactttcatatatcagatgatgaagaaaagaatccttcaaaactattgtttttgaaaaccaataaatcaaacggtaacataaccaaagatgagccagtgtgtgccatcaaaaatgaagaggaaatggcacctgatgggtgtgaagacattgttgtaaaatctttctctgaatctcaaaataaggatgaggaatttgaaaaagacaaaataaaaatgaaacctaaacccagaattctttcaattaaaagcacatcttcaggtaatttgttaggattactgtaattgcatttcttggaagtttattttaagataatc

SEQ ID NO: 32919 - DNA, 2300 bp, Homo sapien
aaaagtgagatcctgtctctaaaaataaaataaaattgtaagctgggattgatgcactattactctgaaatacgttgggtcaaagaatttggatgatcaatggacaagttttgtgtcccagaggaatgatgaagtgagaaagttgaaagtgctgaagaaagaactccataagctacattgtgggacttgggctagctaggaaagggaagcaggaagcaaagagagcaactgataaattgggggaagatgtgaaaagctcaagagtctggacatcttagatgagatacatgcattaaaaaaaaaagaaagaaagaaaaagtaaaaaaaaaaaaaaagagtctagatgtcttgatgagttcctaaatagaaataacaagagaagaataactaaaaaaggaagccatgggccttttggagtggagtattacagtttaagacttccagtacggagccccacaattaggggtatggacaagtgaaagtcttggagtattgagcaaagaattctattgaatggaacatggccacaccataccttggtgtgatctcaggtattggataggttggctgtagatattcagtgaatgtgggagaagggcctatatatctattgatgacagaaactgagaaatagaacatagaatattggcttgtgaggaggaagggtttggagtaataggagagcagtcactgagtatgtgaggacctaggagaacttagaaatcttccttctacagcagtccctatttgaaaagccctcagggagatagtttattcagaaaatagttttgcttagctaagataagaatgcgattatagaggaaaaagtgagagaatgttttacagtggaaaggaggttccaggagcatgaggtgaacctggaagggttcaacagtagtgccatgagttaatagaaaatagggagcattttctattctgggtatgtgtgtgtagaggtggtgtacattttcagcttcataaatggatacagatgagtggacatatatatataatatattatataatatatattatatatataatatattatataatatatataatataatatatatatactattagttctgtccatctagagaaccctgattaatacagcattgtattttactaaatttcttatttcttgttatgcacatttagtttttcaatacattgatttattaaatttctatctcaatgtgatttgtttatacaaaattgaattagtgaaatattaacatattttagagatgtggaaaaaataccaggtatgagtttaattactagtcaatgaattcattcagataattcaactaggattaagctttttaaaaattaaaaatagtaaaaattcatattattttaaagactttcaataaacgtttttggtttttatttgctttaagaatttcctatgcgaattaaatgatgttgattttgtttactttagtagcacatgctcttttagcctagtggatcattttgtttggtttgattggaataagattactcactaagtatacaaagagggggagttttacattcaagtaagatgtcaaatgggctttcagttgtgtccacaagagctgaggtctctccaggccctttgcggcttagttgcatgaagagcatatctaatatcgaatacaattccaggcactcttccaagtgttccacttgtattatttcattcaattttacagcaacctttcaggtgtctattattagtacacttttgttttcccccagaagaagaaactgagtcataaagaccttaacttgggacaatcacgtgtgtaggaaaggggtaccaggattcaaacctgcagtcggaaacagggttctgcaaactcactaccgtactattctgtcccatccactgacaccgtacttcgattcagagaacttcacgtcctaactgtggcaaaacgacgaatgtgctttatttgcaacacgtgcagataaggacccttactctattggcaagagtaaggctatctgggtgggagttgggcgggtcctgtctcctaggcaacagcacatgcacacaagcgaccaataatgagcccctctccaaagacccaggaaggtgatgtcacttccttcgtctgggtggttgccccagcgacacgttgggccgaagagcggtgttgggtacccgagagacccggcggtggggaagtcacttcctcccgaagacgctgtttcctagcaaccgccctccgcctctgttattagcccctcctcctcgctcggtccaggaccggctctgcgggcgccgccaggcccagaccaag

SEQ ID NO: 32920 - DNA, 2300 bp, Homo sapien
cttctgtatttccaacaagattgtaggttatgggatactgctaatatagaaaccatactctgagtagcaaggatttagatactatctctagttgccattgtcctttcatttgcaagtgtgaaagtaatgtacatttaaatgctttcatgctgttgtcaattgtgggttgtaggtacaagaaaaacaaagcatcttgagaggaaataaaaatttcttgagcttttctgccagcatcaacatggctaaggagattgctttacactgagtaattttccttgttaacatttttattaagttgtcatgacaactttcttattctccataaagtggaggaaagtaggttttaacccataagtcaactataagaaagaagattggacctggaagatgatgaaatattcaggtattcatttatccactcagcaggcattttagtgaatcccgttatgaaccattttcattactaggaaattaggctgtgaagattagtatttccctaacaacaaggaactcttgttacttttttagagcatatcaaacatccagattacagaatgtcttttgcagtcaccttttggtggttctagccacccttatgtttagattggttgcttcctcttcttacccattgtctgacagtcagaaaggatagaggaggaagaagacaagacactatccagttgagagtctactcttagtaaaactcggtagctcctggcagaatgtactggggtcaaatgcaatactaatcaaggagtttggtgtgccataaaacttgagaatggtaaaagtagaaattaatgggttaaacaagtcattttccagaatgaaaggaatattggtaatggtatcaacagacgaggacaacagcaacaacaaagtctttatacaagcctgcaacacgtgacaactgcggatcaggcatctgaacccggcctatctttccaccgtatcttcctacacttttctttatgtactttttatttctaccagatggtattactccttgtttcttgaataacagtgtcatgcctttccaacctctgtatgtttgctcacaagtttccctctgtcagagaaaagcaaaaacaacaaaaaagtcctctattttatctttttccaaacataaccaatccttcaagtcctatctctagtactgttcctttatgaaccctgtcagacaatatctcattttcttctgaatgttcatagcatttacttaaaaatagtatgacttccctcttctttttactaatgaattactgtgtattttttaagtttccttctacatctgaagttctaaatattcttagtacaaatgtcctactgatctaagagagtatcatgggttaaatgtagaggaagagaagtttctgagatggcaggaaggcaaaagtttctgtgactacctgtgcttatattgctgactttcttaactgttcctgacttatttaaatgtatttttttcctgattctgattaatgttcactatgaggcaagcacagtaggcaagactgggagaaagtttgcaaatgtgatgagcttacaaatgggaccagattagatggtgtacttgggggagatataaaagaggaagataaccatgaattgaactgaattgaaaatggatcacataaagatcatgattaattgttaattcacaatggaacagcatgatgggatttttttaagtcagaaaggtgactaaaagcataatatcacaacacacacaacggtaacaaatataactaaatgcactgaaccaggcagaagccagaccttactgaaaagatgtaaaatctctgtaaccataaaactgcatctgcaaatgagtagattggcttcaaatctgaaaaccaggacaagagagtcatcagcgcagatgtcaacttccccagcagaaatgttggagtttttaactgtggaaaactacagtttttccacaccagtgcatagtggagaagacatgtttttgtttttctttttaagtgtgccaaattttcctggagtcccctccaatttttttctttctctctctctctctctttttttttttttgtcccctgcccctaggtctctgtctccacacagtgatttctgttatggcgattgggcggctgcagagaccaggactcagttcccctgccctagtctgagcctagtgggtgggactcagctcagagtcagttttccagaagcaggtttcagtgcagagttttcctacacttttcctgcgctagagcagcgagcagcctggaacagacccaggcggaggacacctgtgggggagggagcgcctg

SEQ ID NO: 32921 - DNA, 2300 bp, Homo sapien
ttcctcttcttacccattgtctgacagtcagaaaggatagaggaggaagaagacaagacactatccagttgagagtctactcttagtaaaactcggtagctcctggcagaatgtactggggtcaaatgcaatactaatcaaggagtttggtgtgccataaaacttgagaatggtaaaagtagaaattaatgggttaaacaagtcattttccagaatgaaaggaatattggtaatggtatcaacagacgaggacaacagcaacaacaaagtctttatacaagcctgcaacacgtgacaactgcggatcaggcatctgaacccggcctatctttccaccgtatcttcctacacttttctttatgtactttttatttctaccagatggtattactccttgtttcttgaataacagtgtcatgcctttccaacctctgtatgtttgctcacaagtttccctctgtcagagaaaagcaaaaacaacaaaaaagtcctctattttatctttttccaaacataaccaatccttcaagtcctatctctagtactgttcctttatgaaccctgtcagacaatatctcattttcttctgaatgttcatagcatttacttaaaaatagtatgacttccctcttctttttactaatgaattactgtgtattttttaagtttccttctacatctgaagttctaaatattcttagtacaaatgtcctactgatctaagagagtatcatgggttaaatgtagaggaagagaagtttctgagatggcaggaaggcaaaagtttctgtgactacctgtgcttatattgctgactttcttaactgttcctgacttatttaaatgtatttttttcctgattctgattaatgttcactatgaggcaagcacagtaggcaagactgggagaaagtttgcaaatgtgatgagcttacaaatgggaccagattagatggtgtacttgggggagatataaaagaggaagataaccatgaattgaactgaattgaaaatggatcacataaagatcatgattaattgttaattcacaatggaacagcatgatgggatttttttaagtcagaaaggtgactaaaagcataatatcacaacacacacaacggtaacaaatataactaaatgcactgaaccaggcagaagccagaccttactgaaaagatgtaaaatctctgtaaccataaaactgcatctgcaaatgagtagattggcttcaaatctgaaaaccaggacaagagagtcatcagcgcagatgtcaacttccccagcagaaatgttggagtttttaactgtggaaaactacagtttttccacaccagtgcatagtggagaagacatgtttttgtttttctttttaagtgtgccaaattttcctggagtcccctccaatttttttctttctctctctctctctctttttttttttttgtcccctgcccctaggtctctgtctccacacagtgatttctgttatggcgattgggcggctgcagagaccaggactcagttcccctgccctagtctgagcctagtgggtgggactcagctcagagtcagttttccagaagcaggtttcagtgcagagttttcctacacttttcctgcgctagagcagcgagcagcctggaacagacccaggcggaggacacctgtgggggagggagcgcctggaggagcttagagaccccagccgggcgtgatctcaccatggtgcgttttggctgctactttctttttcagtctttcggtgcggagaaggggaggaggcgggcagaggtctgaaaaaatcgaatgccttatggaaaggaactgcaagggttcctttggggtgatcaaagagggagacacagacacagagagacaaaggcaaggaggactgtctgggagccacgcgggcgatacagtttccgaggcacgccgcgtcccgcctagcctgttgaacaggtagacatgagcgacccaagcgtaagtgccgctgccgcgagtgcccagggtgcactcgcgcggggaccgacaggtgccactgcagggtcccctctcccgctcactgcctgccacccctgacgcctgctctctttctccattcgcagtgcggatttgcgaggcgcgccctggagctgctagagatccggaagcacagccccgaggtgtgcgaagccaccaagtaagtggtcgctgcatccccacgcgggtcggggttcttcagacaggcggtccctcttccgggacccccgcttgggctgggtctccttcctctcctgagaaaccttcggtacgctccc

SEQ ID NO: 32922 - DNA, 2300 bp, Homo sapien
ctttccaccgtatcttcctacacttttctttatgtactttttatttctaccagatggtattactccttgtttcttgaataacagtgtcatgcctttccaacctctgtatgtttgctcacaagtttccctctgtcagagaaaagcaaaaacaacaaaaaagtcctctattttatctttttccaaacataaccaatccttcaagtcctatctctagtactgttcctttatgaaccctgtcagacaatatctcattttcttctgaatgttcatagcatttacttaaaaatagtatgacttccctcttctttttactaatgaattactgtgtattttttaagtttccttctacatctgaagttctaaatattcttagtacaaatgtcctactgatctaagagagtatcatgggttaaatgtagaggaagagaagtttctgagatggcaggaaggcaaaagtttctgtgactacctgtgcttatattgctgactttcttaactgttcctgacttatttaaatgtatttttttcctgattctgattaatgttcactatgaggcaagcacagtaggcaagactgggagaaagtttgcaaatgtgatgagcttacaaatgggaccagattagatggtgtacttgggggagatataaaagaggaagataaccatgaattgaactgaattgaaaatggatcacataaagatcatgattaattgttaattcacaatggaacagcatgatgggatttttttaagtcagaaaggtgactaaaagcataatatcacaacacacacaacggtaacaaatataactaaatgcactgaaccaggcagaagccagaccttactgaaaagatgtaaaatctctgtaaccataaaactgcatctgcaaatgagtagattggcttcaaatctgaaaaccaggacaagagagtcatcagcgcagatgtcaacttccccagcagaaatgttggagtttttaactgtggaaaactacagtttttccacaccagtgcatagtggagaagacatgtttttgtttttctttttaagtgtgccaaattttcctggagtcccctccaatttttttctttctctctctctctctctttttttttttttgtcccctgcccctaggtctctgtctccacacagtgatttctgttatggcgattgggcggctgcagagaccaggactcagttcccctgccctagtctgagcctagtgggtgggactcagctcagagtcagttttccagaagcaggtttcagtgcagagttttcctacacttttcctgcgctagagcagcgagcagcctggaacagacccaggcggaggacacctgtgggggagggagcgcctggaggagcttagagaccccagccgggcgtgatctcaccatggtgcgttttggctgctactttctttttcagtctttcggtgcggagaaggggaggaggcgggcagaggtctgaaaaaatcgaatgccttatggaaaggaactgcaagggttcctttggggtgatcaaagagggagacacagacacagagagacaaaggcaaggaggactgtctgggagccacgcgggcgatacagtttccgaggcacgccgcgtcccgcctagcctgttgaacaggtagacatgagcgacccaagcgtaagtgccgctgccgcgagtgcccagggtgcactcgcgcggggaccgacaggtgccactgcagggtcccctctcccgctcactgcctgccacccctgacgcctgctctctttctccattcgcagtgcggatttgcgaggcgcgccctggagctgctagagatccggaagcacagccccgaggtgtgcgaagccaccaagtaagtggtcgctgcatccccacgcgggtcggggttcttcagacaggcggtccctcttccgggacccccgcttgggctgggtctccttcctctcctgagaaaccttcggtacgctcccagttgcccagccctgggaagccagcatcgggttcccacgctggggaggagcgagaggaaaggagaggacgcccgaggggccggcccagggcccgggggacccgcggcgcccgagggaggagcacagacgggggtgggcgccgagcagcgccgcgccggctgctgagctcgcggggccgggccgtgagaacgcgcggggcgcgccggggccgctggtctcccacggccagggcgcctgggccccagagcccatcagccgcgtgcagcgctgcggcctccggcgcgccggcaggcaagcgagcgggcgcagctgggggatgcctggaccc

SEQ ID NO: 32923 - DNA, 2300 bp, Homo sapien
tattttcacagtgaagttaaatcatctgtgataggttccccagaccagcctacaaaggcccattaaatacagaataatttgtggatcttcaaagaggatgaacatacatttccatgacagagtccatacgaaattcacaatttagatgctaaaaaatttaaggaatatctttttttctctatcttatctgctttgaagcatagcgattagcgagaaacttttcagatccagaccactgatggtagccagagtagagaccctggagcatagattcttaaaataaataaggggcccaagtcagagctttgaggtattgaagatggaaaaatagtggacaaacagcctgtaatcaggttggggattacgggtactgagttatgttgccatttaactattctaaaaaataagactgggtctcaagactgcttccctaacagactgtttctcctgaaaatgcaggagctattctttctgttctggttatatagtttccattcatggcttcttgtcctgttgttttttgtgtcgagtacactatataaattatctccttatacatatttctcaggcaagcacagagttatactgaacttttctaaagatgctttgcatcaagaagcaaagggaaatacagaattaaaatgtttctttccattttgctttgtttttctatatcgatctagactttgtaggaaaatgcaaagcgtatatttaagaaaacctaaataagaatagattcatttactcattttcatttattcattcatgaagaatttattgaatgcctactatgtgccaggaatattgctatatttttgaaatttaaggataaaatatggcccaatctatcaagaaaggaaagtgaaagacaaatgtaagacataattacaacattctgtgggagcacaaagtaggggactcagttcttagagaagtcttttggtcttagagttcatcaagcagagaaggggaaggacatggtccaggaaaataaatcagcacacaaagagatggggtcttgagggtgcatagtacattctggacagccagttacctgggatgagttgggagggaggagaataaggacaaaagaccatctgggcaaaaatcacgaaggggtatgtgtgtcatgtaaaggtgtgccatgatagttattcatattgctattgtaatattaatatatagtaattaactacacatgacacagctttacatgaccttaagtagttatcaacattaccataatagtaatattaataactacaataagagccattattattcacttgaggcacttgttcaaaatagattttacaaaagaaaaaaaaaaaagaagcaacatgagtaaaattagatccattggctactgactccctctccaacagttttaaagctactagataagagaagcatcaagtcttaaaggaagagaatggtatgatcagatgtgtgttttccaaagactattagaaacagcatggttaaggatagggtggatatttacttgcacaggtgactgaatgaacatctgtttatacatcaagggaaaatgattcattttatatcctggatattttaccataagtatgagcataaagctgggatgtctggcattggaattttatgtcactctcaaggctaattagtctttcagatcctttggtagggaggaaagaagagttgcttcagcattttgactaacatttcttccaaatttcttctccctgatatttccagccacgccaaggcaaagacttcccagctctgtctcaggttaggttaaaagaaggcataggatggaagagggtggtctgtggtaggcctagcaaatgaaagagatgaataaacaagagtgtctagtctaactagtgcctgaggaatagacatcagtcctctgagattacccagctggaaaactgcccagatggagctttacatgcaaagctccagtgaagtctagtgctgtataatgctttaaatccacaatcaagcccttgttgatgcaaatgttagtcgcccaaagcagaatgggttaacgaattactgcagtggttttaggtgcatgggtttgacccatgtaaatcattttaataagtaaaattgaatctttgatacatatttgttgaggagcttgtcagatcactacctttcactgaacagtaaaacatggatcatttatttcacctcattttgcacttcaatgcaatttcactctttaggtggttgtacttggacagttaaatgaagactgtctttaagggtgcagggatggagaacacagcatatatgagaggtgggag

SEQ ID NO: 32924 - DNA, 2300 bp, Homo sapien
aagacatggactcaatctagatgtccatcagtggtagactggatagagaatgtggtacatatataccatggaatactatgcagacatcaaaaagaatgagatcatgtcctttgcatcaacatggacggagctggagactattatcctatgtaaattaacagaaacagaaaaccaaataccacatgttctcacttgcaagtgggagctaaacacggagtacacatgaacacaaagaaggggacaatgaccactggggcctacttgaggatggaaggtgggaagagggtgaggatcaaaaaactatttgttgggtaccatgcttagtgcttgggtgacaaagtaatctgtacaccaaacccccaagacatgtaattggcctatataacaaacctgcatatgtgcccctgaaactaaaataaaagttaaaaaaaattcagttatgtaacagtaaagaaaattcatctgtgtagaaaaataatcaaaagatacagaaagttataaaaagtaagagtcatggccattccagccactggttctaattacagacgatagccatatcaacacttcctgtgtttcctcccaaaccattattcttacagcaacatgtatgtgcctgtgttattacccacatagcaccttactgtatactaactctaaaaaatggaaaatgattacattcttgtggtgttttgtaaacctgacaatacttttctgcatcatcattttctagtcaccctcctgctttttcatggttgtttaatgtgccattttaatggttcaaaattagtggttaattgttgttaaataatgattaatgttttaatagttgtttaaaacaaggtgttagattgtatgaaaggctgtaatctatttactcattccaccaataatggaaatttttaaagtaatttgttgttttgtttgtttgctacatgccactatttctgtatcagtttccttcatcatagctctctcggtgctgatgtcagcacaatcttattgttttgacatttttctctaaccatattgagactgttctcacaacaaaatatgcacatcttaaaataccatctggcttctcaggtccacttgagactggtgacctcacttttgaccttgccctaaaagtcaactggagtccatatacctcaggtacaaacagctttaataagctgccacttcctgttcctctcatcttctctctatggcaggactcagagcattaactaacctaagggcctggtagaatgtaagctggaggtagagtagttaaagtctgtgcattttgtactggtcattttccagttcgtctgttgctaagaaacagcaacagaggcccgctctagagggttacaaactccctggaattatggctcccggacatggtgtagggaaaggtgtcccacagggatcaagcctagaatatcgctggatcttgtacagtttagtaaagggcaggactggatttaacataacgtccaccaaactacattactgaaaatttttggtgcttcactcaactagtctcattgactagaagtgaaaatatgtttttctcaatattaccagctttaaatttgccataaactgttgtgggaccaagccacagaggaaatgtttttccgctagacaaagataagcatgaggatgccagcaacagaggatattccttttaaggtctgtccattgcaaagtacacacgtacacgctcacacaacaaacacgccctgttcccttttgcttgtgttaaccactgagggcagatctctgaataataatacatttagtgggtccacaagagctgcatttcctctgctccagaattcatgcaaggagcacggctggggcttctccactgtcattgttatggcctcaaatgaaggccttgtcaccaggcgggggcgggaaggcactggagcgcagcagcattgagagcatccgaattccctcctctgtccctgattggttgaagaactggggagcaccgaccagccccctgcggctcgactcgccattggctgggaagaggtggcaatcagggcgggccaaggcggctgttctcgctccagctcgatgctgcctccccggcccggttgcgctgtagccgctgccgcctctgcctgggtcccttcggccgtacctctgcgtgggggctgcctccccggctcccggtgcagacaccatggtaagtgctctcagccgggtgcggcccgaacctcacccctcctcggccggcctggcagcgagggaactggccgcgcagccggagcttggctcgggggccctgggcgctcactgcc

SEQ ID NO: 32925 - DNA, 2300 bp, Homo sapien
cccaaagccttggcagcttccatgtgatgttgagcatgtaggtgcacagaagtcaagaatttagatttgggaaccttcacctagatttcagatgatatatggaaacacctggatgttcaggcagaagagtgctacaggggcagggccctcatggagaacctctgctagggcagtgcaggagggaaatgtggggttggagcccccacaaagagtgagaagagggctgtgagaagagggccactgttctccagaccccagaatgttagctccatcaatagcttgcaccatgcacctggaaaagctccagacactcaatgccaacccatgaaagcatccaggaggggggctataccctgcaaagccacagggtttggagctgcccaaggccatgggagcccacctcttgcatcagcatgacctggatgtgagacatggagtcaaaggagatcattttggaactttaaagcttaatgactgccctattggattttagacttgcatgggccccatagcccttttatttgtgccaatttctctcatttggaaatgagtgtatttacctaatacctgtactccgttgtatctaggaagtaactaacttgcttttgattttacacactcatagacagaagggacttgccttgtctcaggtaagtctttggactacaaaattttgagttaatgctgaaatgggttaagacttggggcacttttgggaagacatgattggctttgaacaatgtgaagacatgagatttggcaggggctaggggcagaatgaaatgatttgactgtgtccccacccaaatctcatctttaattatagcttccataattcccatgttctgtgggagggaccctgtgagagttaattgaatcatggaggcgggtctttcccatgctgttctcatgagagtgaaacagtctcaagagatctgatagttttatgaagggaagttcccctacacaaactctcttgcctgcctccatgttagatgtaactttgctcctctttcaccttccaccatgattgcgtggtcttcccagctatgtgaaactgtgagtcaattaaacctctttctaaattacccagtcttgaatatgtctttatcagcagtgtgagaacagaataatacataatttaaccctaaagaagagctctttaatggagaaattcatatatcatgaaatttatcctattcctgaaatctttactgtgataactgaggacctctagccagattccttacttacatcacttggaattagtttgcctccgtataagactagtttgaacttatagtgctgagtttacaagtttccaaatatatgcaaaatatacgtaatcatactgatgattaatggtgagatgcttataaaatggtgagtctaacaagctctattaggtacagatacatgcaatcactgaattctgtcaagagatgatgccctttatgcacaataatgcacattcttccatttattattcaatataataaattctaacaattttccaaaagtgttcatataaaaaataatcagactttatgttttagtaagttgtttgttttcagtaatcatttattcttgagcagatattttttggtgttttattttgtcatgtttattggctattatttctgttagaaacagcttctgttactaagaaagaaacaccgacaagggaagacacctttcccataaaaaaaaatttattccagctgcgttttgatttgaagttgaataaagacaaaggtaaaaagaaaagctaagaagacgttcccgggtgagtcattggagtgtcaactagcctggtcaggggctgctgcttaactacacatatttgataggaagtgtccctttaactgtgagaaaatggtttcctaatgatactttttgcttttcactcatgaaatcactctgggttagcttctcatcagtccataaatgcccatacctggttctgtcaacatttttggttttcagattatgtgctttatgaggcaaaacatagcaacacaaacatttaaattgcttccatgttttacaacctcaactgctgtattttatataaagggcacaaaatgaatactgttattgatgaaaattgggttaccctgaggactcttgcttaactgaaatcacaaatggagcagacagaaaaatcaaaagtatatgctgagaacggtgagtaaagagtgaactcctcagagcagtaatatttttcatttctagaggccagaagtaagaaaagagagattttttttcttcatttgggaaatttgatttccaatgttact

SEQ ID NO: 32926 - DNA, 2300 bp, Homo sapien
ataaaaataagaaataaattctaaatgtgattataaataaaagtttcctaattagattatcatcagatggacaaattgggttcgaagtggcaaaatttaagtattggcaaatgatgaccagaatataactagtaatacatttgataatgctattgcaaaaaataatgaggatgtgtgtgtatgggggccttccactgtagttactctcctggatgaagaaaataagttatttttagattagcttgcagtttctctgatgccccaaagtcaagtctttcaatgatcagttcttgtgatgtaaaagcaaatattgaattgatactactacttaagagtgaaatgtcatttctttaaaaaattttttgtttctaaaatatctattttttccaattcataggaaaatttgtttccttatttgttttactagtatgttgaccaataagtgaaggaaacttctcagctcaaaaggcttaaagagagtggaataaattatttagcattattctctgtaaacacgtacccagttgaacaactatgtagagaaagaggggctgttaactgttctctgcttccaaacactctaagccaggacaccaggaaaagcaacagtgactccaccgctctctcaggtaaggtccctatccagtgtgtaggcaatttccaggatcattcataaaaactcaagggaaatgtgacaggtatagcatatagttttgatgattttcaagttcaattataacatggcatttgcatgttgtttatctttctgtactagatatataatttattattcagtaataaaatcaagattttaacctgggtcaggatcttgaagattataatcagcttaaacactttctattttggtgaggaaattgatatgtacagaaattcagtcagtttttctcatattacaaggtagtcgtagagccaagactagaaatcaggtttctgacttccaatgactttggctaattagacaaaattccatcatggtagatgattaaataaaggctaagtgctgtttctgcctatagttcttagtgagtagcagtggcatgctaaggataaggccatgaagcttctatcctggcttaattgttcttggggcaattgtttagagcttagattaataaatgatgtttcaaggaagaatatttttatcactgacactgtatagaattatgggcacatggctattattggttcttgttgttgttgttgttgttgttttgtttttgttttgagacaaagtctcactctgttgcccaagctggagtgccatggcacaatcttggctcactgcaacctccacctcctgggttcaagcgagtctcctgcctcagcctccctagtagctgggactacaggcacgcaccaccttgcctggctaatttttttgtagttttagtagagatagagtttcgctacgttggccaggctggtcttgaactactgttttaaaattctatataggcaatgtatgctaatgtggatgactgctagctaccctgtcattggtatgccacagatgaatagtaaactgataatgttcatttaaattccaatacaatgtgttgagagcttaactgctgctgattattacatgatatttaggtcagaagaactctgatgattgaatggaagtgggctttgagcatgtacccagactttattatacagttaatttccctagaggtgttaaatttcagtttttggtctagaagctgtaagaatattcaaatttgagagaatacatatttgttttttacaagctcatcatcttatgtatcctaatactatgccaaatgttttcttgggattgaataaatgtaatttttttaacttggcctctgttgattcattggatgtttgttactttgaatataaaagcagaacttggcaagtcatacaactcaatttggcagatcactcactcttagcaaatgaactgtgcccaacataaatccactctaaagtttacagaggttcagttctgtaccaatggaaatgagaagttagctaagagtacaagaagcatgctgattggctgatgcagggtaagcaggctacataaaaggcagctgtagaacatctgggaaggtcaatgatagcatctgcctagagtcaaacctccgtgcttctcagacagtgccttttcaccatgagtgggtgcccatttttaggaaacaactttgggtgagtatttacctttattctaagtgggttttggcttttagaagtatcaggtgtgagcattttaatttctgaatttaaggagcattgaaaactgtcacctt

SEQ ID NO: 32927 - DNA, 2300 bp, Homo sapien
agtaccacccctcacactgatgatgctccttatctggatttattgtcctttaacacatgtacaagttgagcatctctaatccaaacacccaaaatactccaaaatctaaaacttattgagtactgacatcatgccacacctagaaaatttcacacctgacttcatgtggtgggtcatagtcaaaatgcattcaaagccttgttttatgcataaaattacctaaaatagtcagtaagattaccttcagtcagtagcataagtgaaacacaaatgaattttgtgtttagacttgggtctcatccccaagagatctcattatgtatatgcaaatattccaaaatctggggggaaaaaatctgaaatctgaaacacttccagacccaggcattgtggataagggatcctcaacctgtagtaattttattgcgtctctccccctcactgaaataccagcttcaacagggtggggcttttcatctcttcagtcacttatgcacttccatccatgatgtgtcctgatgacctagaacaatgcctgacacttaggaagtactcaataaaatatttgttgatgtaaatcaattgaaatatcagtcccatagggatggggattttcatccctttagtcacttatccacttacttgatatatcctcattacctagaagaatgcctgacacttagcaggtactcaataaatacttgatgtgagctcctgaaatgagtttagttcaaggggcttttttacaataccaattatcctaaagtaaagatgactgcctatatttaaatttcctgactccgtaggttgtcaataaacagggactatgatctgaaagcaaagttcagtttaaaaagaaaagtatgtgcttgtatgagtcacaaaaaagggctaagtacaaaagaactgctgaggtaaacatgaacatcgttctgtgaacttatgatttaaataaaatctttatcaccacacttgccaagagcaatatatcttatcatgaacgtacataaaaaactcttgtgtctttcctcttaatactcggaacattatttttatttttattacgaagtttgcattggagaatattgtaactcactgcacctaggtaaaaactaaagacataaatctgatgttagttctaaaaatctacaagggtaatgatatgaatttcacagacatggaagccttgttcagaatagatgataatagaaaggctcggtagagccaggttcatgagtgtgtgacctgtgcagaagtgggtgcttagaaggcccatggcttgggttaatgctctgctgttgccgtcttgaaattcttcacaatttatgaacaagggaacttcattttcagtttacacggaaccctgcaaattatgtacttggctctatcttcctttgcaaacggagaaacaggcttcaagagttttgaaactgccataatagatccaaaaactgtgtatgcttttcacatctgtacaattttgttacgtatttataaacatctgctgaatggatgactctatgtattggcccacatcacttcagaactaggtcttgaacttagggattgtggcaagaaggaaaaaggcagcttccggtggctcacagggcaggccaggtggctcacacctgtgagcattttgggaggccaaggcgggtggatcactagagtccaggagttcgagaccggcctgggcaatatggcaagatcctatctctactaaaaatacaaaaatagcctggggtggtggcacgcgcctgtagtcccaggtactccggaggctgaggcaggaggcacttgaacctgaaggtcgaggctgcagtgagacctgatctcaacacacacaaaagaatgactctcaggcttctttttttctaatggatggaagtgaaacctcgaaagcacatggtcaagtgcctgactcttccaaaacaaaaacaaaaacaaaaaaactagcctcagcaaggaggtccgtagcctccagctgaccggattttcagtcacagaacaccggggacctaaaaaagggtcaatctcagcatcgtgcactcaacccagctccttccgcccctcgagcccaggctgggaggagccgaggaaccgaaagagaaaacaggccgcgcgggcggcagaggagccgggcgccgcaatggacgtgcgggcgctgccgtggctgccgtggctgctgtggctgctgtgccggggcggcggcgatgcggactcccgcgcccccttcaccccgacctggccgcggagccgcgagcgtgaagccgccgccttccgggtaccgagcgcgcgcc

SEQ ID NO: 32928 - DNA, 2300 bp, Homo sapien
tctattgaagcattgcagttagaaaagagttgcagttagaattgcagttagaaaagagccagtatttgaacctacacttagtaatatcttacctgttctccactgtcttccttctacactactatacctttctctttgtttttttgttttttctcacatggtgaatatcttctaatcaaatcacaatatggcctcaaacaatatatgactaaggtgttttgaggaacagattggatgtatggtctgattttatccatgcactattgcacgtaggaaattctaactgaagtcagtgctcaacctccactgtgaaaaagaagaaaaactgaaaatgacacaactctccatacagacataaatcacccagaacactatttctggatattaagccaaattctctctattctttctattcaaataaacaagactaagcatgagaaaaatgaagctggaaaaaaaaaaacacagaaagttctgtctttattcaaagaaagccaaatctattttcaacgttatttctgtctggcagaatagattgtgtgtgtgtattttcttaataatatgtgaagagtaaatctgagacccagactttgtgtggttaaatatgggagactgacaatgtgtttctctccactgattttgcagcccctctaaatgagagtgagcatgcacaaaatatgcataaaacattaagggcagatagaatagctgagacaatgaagtcagagaagttatttttagaaaccagaaaatagatggacaagtggtaacatatttaggaaactagaggaagttgtgttctaactctattttgatgtgtccccaaccttcatagtttttatgtcagtgcagcaaatatcttcattctttggccattgtgatccttttccattggctcctgtgtactttaaacaacaccccagtacctttgaaagcttctttattttctgatttatagagctcggtcaagtccattttatatgctttctgcctctaacctgaaagctgtttctccaaagagtcctggttactttgagtgtgaaagaaatattcagagatcataatctgggcacccagtgtgatcattttgactgagtctgttcacttcaccccaaagtaattctatcaatactgttggtttggtatgacccagtttcaggttcattcttctcaaagcagtcttgccatttgactcttcgctcattgtcatgtttttagaaactctaaatattcactgtcccgaagtgtgacacatgagacattatcaacagaatttaggaaataatttaatatgatgctgtcactgtctaacattcttgcttaagagtggggaaagattatttttagctgccatgatgttagtgttgatgacaggacaagagagtttgtggctatttgtattctcacaacaaactttatactacttcttaataaaaatttccattttcgtgtgtgtattgtgaagcctaattgtcaaccaagtacactttgacttctaatcatatttccaaaggtatgatgaaaaaatagacacttagaagacataacacatatagtaccttcttaaaggcagttttcaacctatttcaggagacaaacataatactaaagcaagatttaagaaaaaacacacagaatagacaaagctgtggaataatataatagatatatcaattatatataattttagaagagaaataaatttgagcaagaaatccatccattcatttatatattcattcagatatttacgtatctttttgtggggaaaagcaagagagatcagattgttactgtgtctgtgtagaaagaagtagacataggagactccattttgttatgtactaagaaaaattctgccttgagattctgtgaccttacccccaaccccgtgctctctgaaacatgtgctgtgtcaactcagagttgaatggattaagggcggtgcaagatgtgctttgttaaacagatgcttgaaggcagcatgctccttaagagtcatcaccactccctaatctcaagtacccagggacacaaaaactgcggaaggccgcagggacctctgcctaggaaagccaggtattgtccaaggtttctccccatgtgatagtctgaaatatggcctcgtgggaagggaaagacctgaccgtcccccagcccgacacccgtaaagggtctgtgctgaggaggattagtaaaagaggaaggaatgcctcttgcagttgagacaagaggaaggcatctgtctcctgcctgtccctgggcaatggaatgtctcggtataaaacccgattgtatgc

SEQ ID NO: 32929 - DNA, 2300 bp, Homo sapien
tacaacatttctgccataaactctatgaaaaataaatgtaagtagggcaaagggaaaaaatgaagagtttccatactccaatcaaatatagggctttcaccttaggtcaaataccatttactgaaaatagctgactttataaaagaaggcttataattgccttatttcccttgaaaaatatacagcattttgccaagcaggtacatttgtgttgccattagtgtggccagttcatttggtggtgctgttgaatgtcatgtgcaccacttaggagtgatcacgtttttaagatggcagaaaagtaattgcaacagatcggtttgctgaccctgactgctataaatggctacataaaatgagaataggtagatcaacacagctcaagttctgaagtgaaattttatctcatttctggcaccgcaaatactaacctgattcttatctgtctaagaaaaaacattcctccgtaacaggctggcaataactctttacgatttccacatacctcttaaaaattatgaaagacccattgtattaaaacctgggataaacaggatatttaaagcctgttagtgtgatcaagttcatctgtaaatttcactttgttttagagatctctgaagaaaaaaaaaattattcaatactctttacatttttcaaatttcccactccccttgggaagacaaaaccatgaaataagaaaaagaaaatgaagagaatattattaaagcacacacagtctattgttgtaaattaatgagtcctagaccaggagtcttgagattttgttttcagtcctttttgtgccacaagtgaaccatgtgtccttggctatttgtccttggggaagatacatggcttctcttgtgcttccattgaccaaatgacctctgagtcccattttagtcctaaacccccttggaaatatgtttaaaattttctttgatttttagttatcttaattttagaaatcctaaatatttatatgtctacattcattctaatttcagaagaaaaataggcactgtatatagtagatatattgtgatctttgagttataacactctgccattcgatgataatccctgaaccagttacttatcttctcaaagcatgttcctcagttgaaaaatagctacgatattccattgcctctatattgaggcaatatttatagaatttcaagagataaactaagaacctattttataatttacataaggagtaataataataaaacagacacttttgaaccaaccatcaacttcagaaattgaacatttccaaagcctgtaaatttttttgggcccttcaataattacagatcttttccccctgtaaaatggtaaccatgactatgaatttttttgttgataagtttttgcattttgttattttcttgctaaatatatgtacctataaactatatataaatatatatatatatatatatattttttttttttttttttttttttgaggcctcgctctgttggccaggctggagtgcagtggcacaatctcggttcactgcaagctccacctcccgggttcatgccattctcctgcctcagcctcccgagtagctgggactacaggtgcccgtcaccatgcctggctaattttttgtatttttagtagacacatggtttcaccatgttagccaggatagtctcgatctcctgacattgtgatctgcctgccttggactcccaaagtgttggtattacaggtgttagccactgcacccggcctaaacaatatatttttaaaagttttggatatatggggaatttatatattattaatttatatattatattatattattatattataatactggtattataccaaatatatccctctgcagcttgttttaatcaccctacattgtctttgagatttacttttgctgatgtaacactataataatagtagtaataataataataataataattctatctcttgtgtatagatattcaagttttgctcagtttggggcctttataaactgtgttaaagaattttgtatatgcttccaggtccacacctataagagtttctctatggatatacctaggagtggaactgctgggccattgagaatgctcatttttggctttgcaagatacaagttagtttttcaaagtaggcacataagaaaacattcccaacagactctggtggaaaaaaaatatatatatacacatatatttgcttaaaaaatgaattatttgtattcaaaaggagaagaaactttcttctggcatttttggaggtaatccttgattaa

SEQ ID NO: 32930 - DNA, 2300 bp, Homo sapien
catacttgataaaaaaccttctgtccactaaactgtaaatgccttaaagtcaaagatcaggccttatttgcctttagtgtatatttagtactctgtagatagaagtggtaaagggataagaatgaatgaatgagacaggcgggtgaaattttcaagaatgagacagatgggtgaagttttcaaaggtttctaaaagggaaaaacaagaagactaggatattccaagcagaaaggtctggttggttggccccagttggtgttcgcatataagaagagggcttggcattttcctcaccactgaagaaggatcagcccctggtttggtccagtaagaatatgttcttgcccaaatgccactccttagtttcagggacattgctattttggttttctgttccagcccaagtgttcttgatggtcgaattgtttgcattgactttttttccacaagaagttgggtgatattgctgatttgcctgccatggcacttccttgttttcattttgattattactcaaaaatagcttcattttaaaattcaacttttctgactctctgcttgtgcctttaacacattgacaatgattttctgcttctccacaaagaaagcacgttggatcctgtcacagacatatttagcagacatggaaccaccataagccctgcttggcatgtgtgtttcatttcagactacctcatgagaactttaggtcttaaagcatcggcctctctctccaagtcagcctgaacacaagccacaagagatttcagttctttctcgacctttttggtgtaaatgtaaacaattctatcaccaggggttcagggcagcctagttttgttagaggctgtattgtaggaaagtccaaggttgcaggatcattctgagtcccttagacaccattctcagaagagcttgctattagcttaatgctgcccaactactacgtatgcttcacgagggcagggacttttgtctgttttcactgctacggctccaacctctaaacagtgcccgacatagtaggcattcagtaaatatagtacttgttaaatggatgttattttggctgcctttacttttgctttatttgtcctgctttacggagctggaaattggaggaaagcctttgaattcatttcccttcttccttctgttctgaaactctggccaagggtcctagcaaagaccttagggagtggggagccctcctggaaactaatgacaagtcaggcgacagggggcgggagaaggagagctgcaggaagttctttcccacttacttctgcagcacccttcaccacccatcgtgctctgtatttggggttagaggtgttccgtggaagggaaagcaggggccgccttggccgcgttcctctcctgggccaccggggtcttgcccacagcgagtcccgcagcaccccctgtctgcgcagcacctgttgacagccagtgggcggccaagcccgctcgcgcggacgcgtcccagggctgcccctcccagaggcgctgacccccgcccgccccatcggccgcctgcgggagagccgctgagccgcccccgctcgccaggcgcgcgctccgcccgggctcggcccacggcccccacctcctgtctgccgcccggcggggggaaggtagagaaggggaggggacaagccggatcctcccggccgccccggccttccctcttcaccccgtgcggagacgccgcgcgtagccccgaggttagcgcggagcccgaggcgtggggggaggggacggggaacaaccggagccccgcggtgaccccgagcggccgaattgccccaggctttgaggagcgggggacgagcccgaacaaggtgaactttggtcgcggaaaactcaagccaggtgccggaatccgtgctgcggcgctccgaacccggggccaactgcgctccgggctgaggagcgggagccccgcggcctctctccgcctgcgcccgggccgccgtcggcccggagccccccggccccgctccggcgccccggcccgtgggacccgccgcggcgccctcgccttgtttcttccccctcccccttcgggggtggggggtggggcgggggagaggggcgcccggagagccgcatctattggcagctttgttattgatcagaaactgctcgccgccgacttggcttccagtctggctgcgggcaacccttgagttttcgcctctgtcctgtcccccgaactgacaggtgctcccagcaacttgctggggacttctcgccgctcccccgcgtccccaccccctcattcctccctcgcctt

SEQ ID NO: 32931 - DNA, 2300 bp, Homo sapien
acagaattggggaaaataggttatttcatgacattatttagaagcatcccttttcacactatgatataaaagttatagaaatataggtaagcagatcactttcatagaaaaaaattttcagaattctgaacttgaccattttacaggctagaagaagtgcttttagggcatcaactatatttcttaacctttgggccaaaaccctacaaacccatccaacctgctggacttgcttttcttctgaataacctaattctccaatataacatccatggatggcacagaaacaatactagggaaggtgagcaagtctgttgtaggtattttcagcatagttcttccaaatgtggacattagagtttgtaaataaaagatgttcattttattacaggaatcggaattcctattattctaaactcttaataatttcttgattaattgaaaactaagtgtaaggttttcgccaacttctaaactcccctggctgcatgaaaactaattcctttatcattcttcatatgacctattcaccaaaagttatatcttatgaaacgtatattatcaatatagttctctctaataaagcattaaaatccaaagttatatcctgatccactttggcgggggggtcttcaaacagtacagctctttgaataatgatcattttgtaatgtaaataaggtaatgatcacttattaatgatcactactcttaggcagcagaatatctcatgaagcttatggaacacggttatatgcaggaaatattccttccctccatatgctgcgggtggaaaaatttattagtggatacatctgtgggtccacaatacaatgctaagtgatgctcacttgagacaatgcttttttaataaaaaaaatccatcaggacctggtgcagtggggtggggtggctcaagcctgtaagccccccagcttgggaggctaaggcaggcggatggcttcaggccagagttggagaccatcctggacaacaaagccagagatgctgtctcttaaaaaataataataataattagtggagcgcaatggcctgtctgttgttccagctactctactagggagaccgagacaagaggatctcttgattgcccagaagttcaagactgcggtgagcgatgactgtgcctctgcactccagcctgggcaacaaagtgagctcctgttgcttaaaaaataacaattaaaaaaaatcaatcaggcatacattcaagaggtaataggatagccttatctgttatctaagggctgcatatccaagtaagggctacttcttcacaaggatgaggacaacagtattttgctcttataaggcagagaccctgtctggttcagatatgcaaaaatcactaattttgaatctctggtaaatttctttcaagatctgtaactctaagtaaatctcttaatataactgagtttcagattcttcatctacagaaggggatgacaaaacttgcccaggaatgtggtgagggccacatgagataaggcgagtgaaaggtgttttgcaactgtcaagttctgtacacatgttaattatgtaacagatgttaaacatagtattacctgtatgactatattgtcagtaattttgaccaatttaagcttgctcagaaagttcaggcttttagaaattggaagacccggagattaagctggatgtctgggttccaggcaaatggtgaaatgacagaaaatgtgttttgttcgctttgacccaagaaggtcatttgttgctctgttgtttgttgctagtggtcaaaagctgaccccaagcaatcccagctccttgaaaggttttttctttttgtaccgacactatcattcccgcccttcgtccccaactcctttagtcccctaaggagtgaggggggtacacatttctgctcggtaacccctccaatgcctgaaggggacgatgccgtgacgttgctctgtcgggacacctcttccctcccccgcccgcggtcgccaggttcccccgcggcccgcgctgtccccgctgcggccccgaccgcggcgcgccacggcgcaggctccgcggcccgagcaggcgcgtcagccgagctcggcggtggcgcgggcggctgggacgcagctgcccccgctcggcgcccgctgcacccttagcagccactgccacctgggcccggagcctccacgatctcgcccggcgattgtgggcaggggcgcctccgggtaagtgccaggagctccacttaggaggaggggacgcgggttggggcggcgacggtggtctgaggacgggaatagacg

SEQ ID NO: 32932 - DNA, 2300 bp, Homo sapien
attctccaatataacatccatggatggcacagaaacaatactagggaaggtgagcaagtctgttgtaggtattttcagcatagttcttccaaatgtggacattagagtttgtaaataaaagatgttcattttattacaggaatcggaattcctattattctaaactcttaataatttcttgattaattgaaaactaagtgtaaggttttcgccaacttctaaactcccctggctgcatgaaaactaattcctttatcattcttcatatgacctattcaccaaaagttatatcttatgaaacgtatattatcaatatagttctctctaataaagcattaaaatccaaagttatatcctgatccactttggcgggggggtcttcaaacagtacagctctttgaataatgatcattttgtaatgtaaataaggtaatgatcacttattaatgatcactactcttaggcagcagaatatctcatgaagcttatggaacacggttatatgcaggaaatattccttccctccatatgctgcgggtggaaaaatttattagtggatacatctgtgggtccacaatacaatgctaagtgatgctcacttgagacaatgcttttttaataaaaaaaatccatcaggacctggtgcagtggggtggggtggctcaagcctgtaagccccccagcttgggaggctaaggcaggcggatggcttcaggccagagttggagaccatcctggacaacaaagccagagatgctgtctcttaaaaaataataataataattagtggagcgcaatggcctgtctgttgttccagctactctactagggagaccgagacaagaggatctcttgattgcccagaagttcaagactgcggtgagcgatgactgtgcctctgcactccagcctgggcaacaaagtgagctcctgttgcttaaaaaataacaattaaaaaaaatcaatcaggcatacattcaagaggtaataggatagccttatctgttatctaagggctgcatatccaagtaagggctacttcttcacaaggatgaggacaacagtattttgctcttataaggcagagaccctgtctggttcagatatgcaaaaatcactaattttgaatctctggtaaatttctttcaagatctgtaactctaagtaaatctcttaatataactgagtttcagattcttcatctacagaaggggatgacaaaacttgcccaggaatgtggtgagggccacatgagataaggcgagtgaaaggtgttttgcaactgtcaagttctgtacacatgttaattatgtaacagatgttaaacatagtattacctgtatgactatattgtcagtaattttgaccaatttaagcttgctcagaaagttcaggcttttagaaattggaagacccggagattaagctggatgtctgggttccaggcaaatggtgaaatgacagaaaatgtgttttgttcgctttgacccaagaaggtcatttgttgctctgttgtttgttgctagtggtcaaaagctgaccccaagcaatcccagctccttgaaaggttttttctttttgtaccgacactatcattcccgcccttcgtccccaactcctttagtcccctaaggagtgaggggggtacacatttctgctcggtaacccctccaatgcctgaaggggacgatgccgtgacgttgctctgtcgggacacctcttccctcccccgcccgcggtcgccaggttcccccgcggcccgcgctgtccccgctgcggccccgaccgcggcgcgccacggcgcaggctccgcggcccgagcaggcgcgtcagccgagctcggcggtggcgcgggcggctgggacgcagctgcccccgctcggcgcccgctgcacccttagcagccactgccacctgggcccggagcctccacgatctcgcccggcgattgtgggcaggggcgcctccgggtaagtgccaggagctccacttaggaggaggggacgcgggttggggcggcgacggtggtctgaggacgggaatagacgcctttgcggaaacagcgggtcaagcccggggcggcggagcgcgaggagcactgcggcgtgcccgggaggacgcgcgctgccctgcgcgggagaggggcgcggggcgcctggcagcggcagccgggtccccgctgcggtggcgcccgcggagacgctccgggtggagagatgcagagggccggggtaattaggaaacgcaaggttggccaggagggctccttgcgttgttttgtttatgaggatcctccagtc

SEQ ID NO: 32933 - DNA, 2300 bp, Homo sapien
acattttaaacatcaaatttttttcatattgaagcttcctctctctctgtcctcgctctctttaattctaagttactttctatgaaattaaagttttcctgtggaaacaagtgaatcgagaaaaaaataactacagaggtattttaaattttgctctgttcttagtgcttttacattaaaaattttaaataggtaataatttccaatcattttgtataccttacatcacaaataatgattaaatatgtatgatttatttattctttatgttgcaattttgaatatatgtaagttatatctcattttttattttttatcgatttattgtaattttaattaattttatatattatttttattattcaattttttaaaggttaaatacatttttatttagaagacctgctttatatacagtgtggagtacttataacatactaataaaattctaaggcataaaattaagagatattttagtctatagtttataagcttaataatagattacagctattctcacttcatggtttaggactacatcaaaaagagggaaaggttataatttgaaatgacagcaatataggatccaagagccatagaagccactttgctcatcatcatttttaaaatggggaaattgaggccaatgtgattaagaagcaagcataagataatccagtcagcaatgaagctgcaagcacaagaaggcagcctgatagactcatggcattttggaatactagcagttctctttttagtactgtaagctccaatctccctcttcctggaaacagttccttgttctcaatctttctttatttgtttaaaccagtaaagacatgcaacttggtggggcttttctgagtccgcagagggaattgtcagagcaggtttccaggaatgagcttggaaaaagcaccatgaagaacataaatttcacacgggaagtccagtcatccatctcgccatcaattctctcccttcaaacttttaatatctaacctcatctttctttccctgtggcccgcgtgttcagtagagcgtggtggcttactttctttaggcagtgatttttcgaaacccccggccaaaacgcgatggggaaacagatttctaagtaagtctctgggaaagaatctgcatctctgtggcattcctacactagcttcatcttctaatcactttcctctaatagcctttccttaaaccagagtctcttgctttcaatctgcataaagcaagggcttctaggaaaccaagtctacatgactctacaagggagggattgcagtgaaagctgcgagaaagacccgtgcgctctgtaactaggcgagtcagcatcacagcccaatggaatatactctaaagatgggattttcatgcaaaatatttaaaagattccatcttgatctcttgtgcggcttaagcatttaaagatataacttggggttctccctggatcctggctacatcccatgaagcccaagtgcacaattttggaatatttcctccacggtgctttgcttgcttgtttgctttcggctgggtcaggtgaggaggatgacagggcttctgtattgctaaatgggttttcacaggagatggaagataaaaatcaaaattatttgtaacgtaagacagcagggcctggtgagaggacgcttcgccgccaacaattagcaattcggcttctacacagcagccggagatcagctttgctgcatttggtccaggttggagcatctccgcagcagctgcaacagccgcacgaaggtagctccgggcggggagcgaggcgctgtcctcggtgctgaaaggccgaggcgcgcggtgggcgcgacagccccggagacccgaggtctcgcggagggacagcggctacgggccccgagctgtgctttctcagcgccgcgcacgcgacgcgtccacggtggtgcggggtgccgggcgccgtgcgggggagggggcgcgcgctcccgcctcctgccgcgagtcgcgcacgcgcgcccgggactgcctgcccctctctgtgacttgcctgtgtgtgtgcgtgtgtgtatgtgtgtgtgtgtgtgtgtgtgcgcgcgcgcgtgagtgagagaggagagagggagaagagagcgcgagagagggtgagtgtgtgtgagtgcatgggagggtgctgaatattccgagacactgggaccacagcggcagctccgctgaaaactgcattcagccagtcctccggacttctggagcggggacagggcgcagggcatcagcagccaccagcaggacctgggaaatagggattcttc

SEQ ID NO: 32934 - DNA, 2300 bp, Homo sapien
aaatatcaattcactataacttatagtaaaagagctctgtaattagaaacagatgagaaaggtgctaaactgttttaggactaattcttaggttcactgaactgaaaagaaaaataccatttcaaactaacaaatctctgcattttaaaaataaagctttgctttttgatatgaattatgtattgcctgaaggacttgatttggtatgttatgcatttgctccttccagacatttccataagaccttatccaaatgaaagatggtaggctttgcaaagaaaaaagtgaataagaaataatccactaaatatttcacaagagaaagagaagtcttcctcttgtatattaattatgggaaagcacatgttatattttgaactttgagcattttatcaactaagactgaaatgtttttatttaataatttgtataagtgtaactaggcatcagaaatatctataacattcattggactctagcgaaaaaaagaggactatctataacacacttaatgtaagaactcttttctgtcagcaacaaatgactgaaataaaaacaatgatgacagtaaatcagagttttttaattaatcacatagacagttgtgtttttaagtgttttagtattcaatttaattttatttattataatataaattatttggagtttctaataaatccaataactatacaggacaaaatcataaatgtgtatattttagataagttatagttatattttaaattcataatatatttaaaatttccctgaaagatcctttttcatatcctcttttttccccatcctgttccttctgcctgcagaaatcattaatgtatacattaggtggaagaaatatctttgattaagttaaagaaagtatatgtgtcttatgtcatctatcctaaatattcatgcatgtcttgttttctggtaatttttagaagtattgcttttttacaaaatttggaacattattagaactgactggctagacttcatagctgataaatgactatgtcatttagaagcatacagagaaataaatcaaatgatatattctgtttgtcaatagatttgaacatgatatacaggaaaagggctctggctctctacctttgcaatggacaagattctcccttcttacctatgtgctgcaggctccaattcaggaaaaaagatcctatttccatctctgaaaggttaactaccacctttcaatgagaaacgtgcctctgtcaagagagtgccaaggaatggcctgagtgctggtatccacagctgtagggggttatgcagaaccagaaaagactgaccggagggagactctgaatgtaaatggtcagattgtgtctagaaaattctatagttaggttgatttttttgttttggttatgtttagagagtgtccagtggtatttaccagtcagctacaattcagagtttaccgagatggcaatacccaaagctctgaaatgccaaatcactggaatagtgggaattttggaatatattgcctatacccatcaaacaataatgtcctctagtcaactgacccacctgtggtcaaaatattcataagtatgagatgatatttatctcatttattatctaagtagaatttcaccatataaaatgtcattggtgtggatgttgataatggaagagactatgcgtgtgtgagggcagctggtgcaggggaatctgtatctttgactcaatttcctctgaacataaactgctctgaaaatataaatgtattaaaaaagataatttccctctggtatcttcagttgttgtaataaatgaactcaaaagttatgattattcatattattcatctaaatccttgcaaaaatgctattctgtttattgtacgccctaagattcatatgcatgcatgtatatatgtgtatgcatgtgcatgttcatgcacgtgtctagaaaaacttcccatttcaaaaaaaatatttaagatcccaaagaaaaagccattgagaggtagcatgatgtaactgctacatttgaagtactggaaaaaatagaatttggttgaattccaggtctgccttttgctgataacataaccttgaggatatctcttagcctaagctgtacttcactgtaatgaaacctgagaataacatgtgcctcatggagctgtcgtaaggaatcagttgattaatgtatataaactgcttgtgttctgttgctgcttcttttaccatttcatctcccctaaagtttttttcatagttcttacatccttctcatttcttcaaagtgagaattctacgctc

SEQ ID NO: 32935 - DNA, 2300 bp, Homo sapien
tggtaagttcaaacctagtcagtccaactccacggcccaggctcttagccactactgcattctcccaatacagtagtctaagagcgtctaagggaagctcaaaggacatatcagagaactctgcctcaggatatacacaggagttcatcttctcctctctggggcctttatgacatgaaaatgaatgggatttcagcataacaagggggatcctgtgctctactctgctcagaacagtcagtgtgggcctgttgtcccaatgcccaccagcatctcctttcacgccacacggttccagtttggataataagttacatattcacctaagtccagtggctaagaagttatgttctgaagtttgctgggtctatagtcaaaacccagcttagccacctactagctgtgggagttgaggccaattactttgtctcaataagcctcaattttctcatctactaaatggaaataataatagtccccacttcatagcattgttatgaaaattctaggagccaacacatatgaatcaatttgtataatccttagcaaattgtgggcacccaataaaaattcatttttatcaacattagattaaatgtttgagaaggtttcttacattggcataactgtggtggactgctttataaacttgagacatcaaagcatacctgtgaatctggagcacttagacaagaaccaccatcagtagggaatgtccaatttttctaagtaaatcactggtacttccaggggtatccattttaaaatgaaattataatgctaaagccattggaaatgcagttgggtctcagccactcccagggattttaatccattccattctaggctccctgggaacctcactgaaatgctaaatttcatggtaacatggagaaagttaagtatcctttcagcttataatctctttggggtacattttagcctcttgggccaatctggattcaaagttgtaacttctggcatcattctgcattcaaacataagccactgactcactgtactttgtattcgagccctggaatagctttaatattcagagaatatcctttatatggcatgggcatgaccgcagaccagtccttttgctggcaactgcagtaactggctacatgtgttagaacctgccaaaatgtttgtcacccaagacgggagaatcttgaaagacagactcaatagatcatagtcaggggcttgataaaaccacacagctagttagtatacatactgaacaaatcaccaatttttgctcattctttttatttgttaaataaagaggttaaatccattgaaaaaaaaagggggggttaaacctaacatggtctggctctgcgcggcttaagaagattccatctgctcaagaacgataacccgcttcccccttacttttaaaaacttctacttcctcccatagtaacctatttaatagtatgcctgactgtcagcaagttctttgcctccagcctagcttcctctcctcatcatgcaaattgccgttggctttaattagatttaataagccactgggaagtgaagcgagggaaatggagagcaaagattatacagtatgggcttactcttgcatgtccaatacagcatttccctggaactctcatatcctcccaggctgggaaaataaagaatgccaagcgcatggaaagacacgctgctgctgctgctgtccaaatgtgaaccgtgggtggagaaaaatcatttagaaaaagagagtgagggaaaaaagaaaatgaaccagaatccccaacagctgcaaataacgaagcatgtgaatctgttaccttggatgaactctgctttcctgctcacagacggcagggtcctgttgagccccaggatcctgtctaggtggaaggcaaacacctcactcatgtccaagggctgcttgagaagcccacaggggctagggccacagcggagcacagcgccaggtgcgcccccctccagcaccagcaaacgggctccgctcctagaggacacaggccggagccctgccactgcgctgtccgccaagagtcgcattcttcggatgtcatctttgctcagccaggagggggcgctctcgctgtagatcctaatgttgctctccctggagctgggctgcaggaagtctgggcccccggctcgcactcccggaccccgcaccaacctccagggtcgctctccaatcttaaccaggtttgctccctgagcgtacccaggtgctacagcatcagcttcccttgccgcttcctgcggctgaagggatggtccgaccaaagcctcct

SEQ ID NO: 32936 - DNA, 2300 bp, Homo sapien
cataactgtggtggactgctttataaacttgagacatcaaagcatacctgtgaatctggagcacttagacaagaaccaccatcagtagggaatgtccaatttttctaagtaaatcactggtacttccaggggtatccattttaaaatgaaattataatgctaaagccattggaaatgcagttgggtctcagccactcccagggattttaatccattccattctaggctccctgggaacctcactgaaatgctaaatttcatggtaacatggagaaagttaagtatcctttcagcttataatctctttggggtacattttagcctcttgggccaatctggattcaaagttgtaacttctggcatcattctgcattcaaacataagccactgactcactgtactttgtattcgagccctggaatagctttaatattcagagaatatcctttatatggcatgggcatgaccgcagaccagtccttttgctggcaactgcagtaactggctacatgtgttagaacctgccaaaatgtttgtcacccaagacgggagaatcttgaaagacagactcaatagatcatagtcaggggcttgataaaaccacacagctagttagtatacatactgaacaaatcaccaatttttgctcattctttttatttgttaaataaagaggttaaatccattgaaaaaaaaagggggggttaaacctaacatggtctggctctgcgcggcttaagaagattccatctgctcaagaacgataacccgcttcccccttacttttaaaaacttctacttcctcccatagtaacctatttaatagtatgcctgactgtcagcaagttctttgcctccagcctagcttcctctcctcatcatgcaaattgccgttggctttaattagatttaataagccactgggaagtgaagcgagggaaatggagagcaaagattatacagtatgggcttactcttgcatgtccaatacagcatttccctggaactctcatatcctcccaggctgggaaaataaagaatgccaagcgcatggaaagacacgctgctgctgctgctgtccaaatgtgaaccgtgggtggagaaaaatcatttagaaaaagagagtgagggaaaaaagaaaatgaaccagaatccccaacagctgcaaataacgaagcatgtgaatctgttaccttggatgaactctgctttcctgctcacagacggcagggtcctgttgagccccaggatcctgtctaggtggaaggcaaacacctcactcatgtccaagggctgcttgagaagcccacaggggctagggccacagcggagcacagcgccaggtgcgcccccctccagcaccagcaaacgggctccgctcctagaggacacaggccggagccctgccactgcgctgtccgccaagagtcgcattcttcggatgtcatctttgctcagccaggagggggcgctctcgctgtagatcctaatgttgctctccctggagctgggctgcaggaagtctgggcccccggctcgcactcccggaccccgcaccaacctccagggtcgctctccaatcttaaccaggtttgctccctgagcgtacccaggtgctacagcatcagcttcccttgccgcttcctgcggctgaagggatggtccgaccaaagcctcctgccctggggcagccgatgccactgcatgctttttcctgcgcttgggcttcacggtgccacggatattggccggcttgctgcgcttggagcgtagggtaatgtacaccacattgggctgcagagtggacccattgccctgggactctggaggggccagggtaccatccaggggtatctcagggaaggatggctcggcggtgtcgcggctgcgatgtggccccttctcagccgcctgtccatgctggagagaggccctccccacctggctcaccaggaagcccaagtagatggcacacgcagtgcccagcagaaggtttctccgggtccttggacgccggctgctccagagcttacgcacccgcgggacgcacagggagcagatgaaccagtttatgagctgccccggcttgtctggacaggtcatttctctgccgcatccacatgttgaacggagtttaaagtctgcagttggctcctgctaatgtgatgcatggtttcctgacttcagctgccgcgtccgcttcgggatataagtggtctccagtgggcagaggtggaaggaaagggttggtgatgaagctgggaatgtttctgacacaacaaaccttttaaattatcagt

SEQ ID NO: 32937 - DNA, 2300 bp, Homo sapien
gacactcgaggggtgatggcattcctcattttacaagttacttgcttggctgcggctgctccaccaagatagcaaacattctcgatcttttgaacttcatgagactgacatttctgagtctgtttgcgaacaggacactagagggctcccaggggttaaaaataagtggaaatttatttgaatgaaaactgattctctacggcatttcttttttccgaatttaaaattaaagtttattttgttaactattgtttttaaaagctttgtatctcttaaaaccatgcagcagtcagtttccaagttttgctttgcaatcagtagttttcaagggagcttttaaagctgaactgaaatgtttgaaatgtggaacactcttgaccatgaaatatgttctacttacatgcctcagcctttaaaagttctttgcattagagtcaaggattacattcttcctggagccaagcatggggccagctgtgtaagtaaggttgcttacgagtttcttctttttctttttaatagtgaaaaaacagaactagagatgcttttattttctttcagctgacttcggtggaaagaaaagaaataaaaagcagtcagagttgtgttgtgttgtgtgtgtgtatgtgtgtgagagagagagaaagagagagagagagagaaacagaataaatgcaactgcttccaagatatatggacatttatggctttgtattatactaacaatgtaagctaatggaacatattattaatatgaagtacaatttgtacctttagactaagagaatatgtttctaaattttattgttaatacttgctgcttgtacttagttaattcaggactttaaaaaataaaaatggtataggtatagagtattaaaaaattatctattacttgtcttaagttctttctgaatttcaaaaaggaaaagcccaggtttgtcacattttaacgcttttgcttcagagtcaacttaaatgactctaggtacaagttataaaacactcttggatttttgtggcttgttttcactactttcaagtgactatcaaatctatacatctatctcgtttgcatgcttttaaattttatttttaaaaacatttagtggtgatatttatgaaaggaaatgattactttttttcttgactcttgtagaggaacttaaatggtttgaaattgtgactcagttaactctgtatccattcattcccagaaacaagccgcatttctccttggggagactgataatttaaaaggtttgttgtgtcagaaacattcccagcttcatcaccaaccctttccttccacctctgcccactggagaccacttatatcccgaagcggacgcggcagctgaagtcaggaaaccatgcatcacattagcaggagccaactgcagactttaaactccgttcaacatgtggatgcggcagagaaatgacctgtccagacaagccggggcagctcataaactggttcatctgctccctgtgcgtcccgcgggtgcgtaagctctggagcagccggcgtccaaggacccggagaaaccttctgctgggcactgcgtgtgccatctacttgggcttcctggtgagccaggtggggagggcctctctccagcatggacaggcggctgagaaggggccacatcgcagccgcgacaccgccgagccatccttccctgagatacccctggatggtaccctggcccctccagagtcccagggcaatgggtccactctgcagcccaatgtggtgtacattaccctacgctccaagcgcagcaagccggccaatatccgtggcaccgtgaagcccaagcgcaggaaaaagcatgcagtggcatcggctgccccagggcaggaggctttggtcggaccatcccttcagccgcaggaagcggcaagggaagctgatgctgtagcacctgggtacgctcagggagcaaacctggttaagattggagagcgaccctggaggttggtgcggggtccgggagtgcgagccgggggcccagacttcctgcagcccagctccagggagagcaacattaggatctacagcgagagcgccccctcctggctgagcaaagatgacatccgaagaatgcgactcttggcggacagcgcagtggcagggctccggcctgtgtcctctaggagcggagcccgtttgctggtgctggaggggggcgcacctggcgctgtgctccgctgtggccctagcccctgtgggcttctcaagcagcccttggacatgagtgaggtgtttgccttccacctagacaggatcctgg

SEQ ID NO: 32938 - DNA, 2300 bp, Homo sapien
gaaaagtcatggggactgcctgagtttccatttaagaaagttgaaaagagatatcaggccacagaacaggtttcaatgggcagtggggggaatcactaaaattgtgctctgattatatctgacaagccccatttatccactgtattggctatatcaatatgttggctacaaataattcagtgtgcttgtcctcaattctaccatgattgctttgctgtggtgcagtggtgactatctgtcaaggcctgggctgaggagagaggcctctgagcagtttaatgaggcatcatgggggataaaaacaaacacattgctgaatatttcaaatgatcattccaaggctgctatctcattcagtcatcagaagaaaccgatagggtaagtgctattatttttcttttcttacacatgggggaaactgaggcttagagaggtaagattacttgccacaggggaccacacgtaagaggtaaatgaggagaatttaaagccagtctgcctccctcttcagcccattctctgaatatcatagttcagagtagatagtgtagcctccacgaatccctattgtggctatagcaggggacagtgtattgttctttttctaggagacatttttggagtgggggtgggaaggtagtcaacgaaatttactaactcacacaactctccctatctcgtaggcatttctccatgaaaaaaatagctctaaaaacagctagaggagatgtctgcttattataactggcctctgccaaaggcttacttttaattgttatagagccaggtcagttattcctttgactgtggaaataataagatggttataaaatgcagctttggtatggtttccttgcaagaagttcacattttctatcaagaaaataattctgtgtgtatggaagtgtgtgcctaagagtttttgagtgcagataaaattgttttgatgcctgaattctcacaaagtttagccaaaatatccaggtacttccaggctactgtcaatattgggattgctccttctcattcctccatgtggcaggacttttaaagaggaaaaaaggactgagtttagagtgctgaaataacagcccgattataatttttgtcaatttaccacttggacgtttattctctccttccctatatattccaactccttgctctttttgcattgtaaaatatagtatttttaggattatacaccatatgctaatcttttacccactcttcagtatcacaactttctttctctgtggggaggaaaaatccctgtcccctttctgtcttcttgccttttgattctatttgccatagtctaattgacaccccaaggtcatcagcccctgcctttgtgctaggacacgcaaaccacccaggccaatccctaacctgttttttcaaaaaacctccaatcagagagaatccacgacttccttttgtgaactgttgcaccgtgcaattgcacactataaatgtctttccttatctgtgtgtactcttatctcactgttctattttttctcctcatttatattaactctttcttacctttttttctgaacttctaggccttctctttccagaactggtggaagacaaatgaaacggccaagatggtaaggtgagtagttcctgggaacgcttgtgctctaaccccaagttatgtgggatggacactcgaggggtgatggcattcctcattttacaagttacttgcttggctgcggctgctccaccaagatagcaaacattctcgatcttttgaacttcatgagactgacatttctgagtctgtttgcgaacaggacactagagggctcccaggggttaaaaataagtggaaatttatttgaatgaaaactgattctctacggcatttcttttttccgaatttaaaattaaagtttattttgttaactattgtttttaaaagctttgtatctcttaaaaccatgcagcagtcagtttccaagttttgctttgcaatcagtagttttcaagggagcttttaaagctgaactgaaatgtttgaaatgtggaacactcttgaccatgaaatatgttctacttacatgcctcagcctttaaaagttctttgcattagagtcaaggattacattcttcctggagccaagcatggggccagctgtgtaagtaaggttgcttacgagtttcttctttttctttttaatagtgaaaaaacagaactagagatgcttttattttctttcagctgacttcggtggaaagaaaagaaataaaaagcagtcagagttgtgttgtgttgtgtgtgtgta

SEQ ID NO: 32939 - DNA, 2300 bp, Homo sapien
tctgaggttgctggagcaaatgatggtgaccatgtccactggatcacttgtggggcagtacacagaggcccaagttagaaaaccagcctgcaggtcagcttaaatgctgcctaagagaacagcctggagagatgaggtgatctcaacagaacagggggctaccaagttccaagggactaaggggccatcaacagccagctagagagatgctttgatagtggtgtctttgaattaactatctcagagtcagctttacacacctgccaaacctggagagcttataagtcaatttgcagcagtatcaatggagtagcaaggccatttctgctattattgcttctctctctccactaccttggaacagccagagccaggctcaaagtggggtgagcggctgggtgagtggttaaggaataagagctctaggcaggaacaaaaaagaatgtaagatgggtctcctctgtcccttttcagtagattttggctatgctttttgagggactgctatcttctggagaaattctgggaatttaaaagaaatttttaaagaaattgactgtgatatagaatcaaacatattaattagtttatgtgtattatgtgtctgtatgtctatggctaacaactggagaacttttacaaaaatttaagtatgactggaaaagtcatggggactgcctgagtttccatttaagaaagttgaaaagagatatcaggccacagaacaggtttcaatgggcagtggggggaatcactaaaattgtgctctgattatatctgacaagccccatttatccactgtattggctatatcaatatgttggctacaaataattcagtgtgcttgtcctcaattctaccatgattgctttgctgtggtgcagtggtgactatctgtcaaggcctgggctgaggagagaggcctctgagcagtttaatgaggcatcatgggggataaaaacaaacacattgctgaatatttcaaatgatcattccaaggctgctatctcattcagtcatcagaagaaaccgatagggtaagtgctattatttttcttttcttacacatgggggaaactgaggcttagagaggtaagattacttgccacaggggaccacacgtaagaggtaaatgaggagaatttaaagccagtctgcctccctcttcagcccattctctgaatatcatagttcagagtagatagtgtagcctccacgaatccctattgtggctatagcaggggacagtgtattgttctttttctaggagacatttttggagtgggggtgggaaggtagtcaacgaaatttactaactcacacaactctccctatctcgtaggcatttctccatgaaaaaaatagctctaaaaacagctagaggagatgtctgcttattataactggcctctgccaaaggcttacttttaattgttatagagccaggtcagttattcctttgactgtggaaataataagatggttataaaatgcagctttggtatggtttccttgcaagaagttcacattttctatcaagaaaataattctgtgtgtatggaagtgtgtgcctaagagtttttgagtgcagataaaattgttttgatgcctgaattctcacaaagtttagccaaaatatccaggtacttccaggctactgtcaatattgggattgctccttctcattcctccatgtggcaggacttttaaagaggaaaaaaggactgagtttagagtgctgaaataacagcccgattataatttttgtcaatttaccacttggacgtttattctctccttccctatatattccaactccttgctctttttgcattgtaaaatatagtatttttaggattatacaccatatgctaatcttttacccactcttcagtatcacaactttctttctctgtggggaggaaaaatccctgtcccctttctgtcttcttgccttttgattctatttgccatagtctaattgacaccccaaggtcatcagcccctgcctttgtgctaggacacgcaaaccacccaggccaatccctaacctgttttttcaaaaaacctccaatcagagagaatccacgacttccttttgtgaactgttgcaccgtgcaattgcacactataaatgtctttccttatctgtgtgtactcttatctcactgttctattttttctcctcatttatattaactctttcttacctttttttctgaacttctaggccttctctttccagaactggtggaagacaaatgaaacggccaagatggtaaggtgagtagttcctggga

SEQ ID NO: 32940 - DNA, 2300 bp, Homo sapien
gtggcttttgctgtcctgataagctgtaattctccgtattcacctatttcttcagtttgcaaagaggtggcatgtcctatgacatcaattctctgcagatctaaaaagagtagttgatttttgatttgctcatttttttcttgttgtgatgatggaagtggagactttcacacctttcaaatgtcagagcagaaaccagaagtcctagtaataatgttatatatatatatatatatatatatatatatatatatatatatatatatatatctcttttgaccacataaaagggggaggtgcacaggtcttattattatcattttacatataagaaaactaaggtttaaagagattaaatgagtttccatgagaaatattgctaacagacgaagctaaagtcagaacctggatcttctagtgtctgccaggactctcccaatacagaccattctgtttaggcattcatgtatacgaaacaatttgaaagaaaaattttagtttaagaatagagtcatgcatgtttggatttgctctgtggcataatgtaaaaggcaatggcctagcatatccctaatgaatcttctcaggcctaattcagcccccaactcacttttagactttagaaattctcagcaaatgctgacacaagcttcagtttctccatgtgagtgaagcaagaataaaccacatgatcttgtgaccatgaagtgaaacaattctaggttggatttaggccctatatttttggaagcaagtttgtgtatgtgtgtgtgtcttaggtgtgcatgtgtggaaaggggaactgatttcttcaaaatctttctgaactgctaaattaatcctcttccttaagtgaaaaagctttgctgctttaattctttaaatgaaatgttattttgccttcccatctgctcatctgacatgatagtctatggatgtgattaatgtttaaggcagaacttccttctaggaaatgtcatattttaacagtccttgtgttttctccttcctgtgaatgctacacccattaccaaccactggatggtctcgggttaaatagcacttcctcagagaaggcttctttgaactcagactagcacagaacctacacttcccctttccaacttaaagtttgcatcctttggtgtatgcgaacccacatgaagagatgttttttttgttttgttttttttttgagaggactccctcactttgggagggcgaggcgggcggatcacctgaggtcaggagatcgagaccatcctggctaacacggtgaaaccccgtctctactaaaaatacaaaaaaattagccaggtgtggtggtgggtgcctgtagtcccagctactcaggaggctgaggcaggagaatcgcttgaacccaggaggcggaggttgcagggagccgagattgcaccactgcactccagcttggacgagagcgagactccgtcttaaaaaaaaaaaatacagataaatggcctgtacagataaatggcttaggtgcatctacaaagaattagtgattacaagtgaaatcttgtaatgtcacaagaaatgttaatgacgtcagtggtgcagatgaatttcttaataccaagtggaaaaattcacttgagataatcttttacaatggtgtgaaattcctcagacttttgttttatccataaactgcacaaataatacctccctctgtgacacttagagagggtgacatgctgagagtttcctgaataatcacctcttgaaatacacaaaactcttctagtttcctggttgaccgacccagggcttgacgactccttttgagccacctgacaattcagtccagcacagcaactgaaggaaggcgttccccaacctgctgtcctatgaaggcctctaggtcaccggtgctaaagccctcctttctccaccctccttaagtggaggtaaacgtcccagcaggaagtcaaggctggattggcgctcttcgcgagcaccctgggaacgggagtctgggtcacgggtgctagagccctcccctctcctcccggccggtgtatgggaaattgtccccgcagaaagtaaaggctggccaggccgcccccagcacgtagagggaatgagtcaggctccggctccacactggcacgtagtgggcggatcgcgccggcgctgagtaggaaggagcttcagccgccagcccggaacgcagtgagtacagccactcaaaggaaagccaagtcgctttgcaggggagcgtctcatgatttttcagaaacgtgctcatggttaaaaagaaaaatcaaggctcggaa

SEQ ID NO: 32941 - DNA, 2300 bp, Homo sapien
ccctatatttttggaagcaagtttgtgtatgtgtgtgtgtcttaggtgtgcatgtgtggaaaggggaactgatttcttcaaaatctttctgaactgctaaattaatcctcttccttaagtgaaaaagctttgctgctttaattctttaaatgaaatgttattttgccttcccatctgctcatctgacatgatagtctatggatgtgattaatgtttaaggcagaacttccttctaggaaatgtcatattttaacagtccttgtgttttctccttcctgtgaatgctacacccattaccaaccactggatggtctcgggttaaatagcacttcctcagagaaggcttctttgaactcagactagcacagaacctacacttcccctttccaacttaaagtttgcatcctttggtgtatgcgaacccacatgaagagatgttttttttgttttgttttttttttgagaggactccctcactttgggagggcgaggcgggcggatcacctgaggtcaggagatcgagaccatcctggctaacacggtgaaaccccgtctctactaaaaatacaaaaaaattagccaggtgtggtggtgggtgcctgtagtcccagctactcaggaggctgaggcaggagaatcgcttgaacccaggaggcggaggttgcagggagccgagattgcaccactgcactccagcttggacgagagcgagactccgtcttaaaaaaaaaaaatacagataaatggcctgtacagataaatggcttaggtgcatctacaaagaattagtgattacaagtgaaatcttgtaatgtcacaagaaatgttaatgacgtcagtggtgcagatgaatttcttaataccaagtggaaaaattcacttgagataatcttttacaatggtgtgaaattcctcagacttttgttttatccataaactgcacaaataatacctccctctgtgacacttagagagggtgacatgctgagagtttcctgaataatcacctcttgaaatacacaaaactcttctagtttcctggttgaccgacccagggcttgacgactccttttgagccacctgacaattcagtccagcacagcaactgaaggaaggcgttccccaacctgctgtcctatgaaggcctctaggtcaccggtgctaaagccctcctttctccaccctccttaagtggaggtaaacgtcccagcaggaagtcaaggctggattggcgctcttcgcgagcaccctgggaacgggagtctgggtcacgggtgctagagccctcccctctcctcccggccggtgtatgggaaattgtccccgcagaaagtaaaggctggccaggccgcccccagcacgtagagggaatgagtcaggctccggctccacactggcacgtagtgggcggatcgcgccggcgctgagtaggaaggagcttcagccgccagcccggaacgcagtgagtacagccactcaaaggaaagccaagtcgctttgcaggggagcgtctcatgatttttcagaaacgtgctcatggttaaaaagaaaaatcaaggctcggaataaatacattcaagcactgttaattttagcccaaagacaggcggtacttgcctggagatttgggaaaatcaacatgaaactaaaaatgaaattttagttggagtggagcaagcagtattgatcagaacataccaaatacgaattttttcaaagtctgcgtagaagtttaaattactaggaaaaatgtaaaggagaagtatttactaataaatgaaacaaaagtaataaaataaaaatgaattaatatagtttgacaaaatatcagcgaacgctgaaaagaaaacattaaaataatgtttgagactttttaggttttgtgcaggaagaattgggaaaaatgtgctggatggagtgatactgcttttcttttccacaaaaatttcattattttagagagcggtagagcctttttaaagacagtaagttattgccaattcacaatgaaataagatcacatgctctgaaatgtacaagagctgcatgcaataaacttcatttatctataggtaataactgattgatgtttattcagtagtcgaaatgcacctcatgcactctaattagcacgtcaaattagtctctccgtttcagaggtgtagggcctttgtggagccttctcaataaaataatttgccactcttgaaggttagacattctcttctatcaatgtacacataaaggttttgttttgctttgcttgttgtgaattaaaatggggagaaaatgatgtgtta

SEQ ID NO: 32942 - DNA, 2300 bp, Homo sapien
tttctgcttagatttgaagatttgacagccatgtagaaatgtaattacacaaagggtatgatctaatggtaatagactgaggggagaaacatagcaaaacccgcctgttcggattcttcttggtctctttgtatagtatttcttcttctttgatatacagcaggacccctctggaatgagggtcttatgatctagacaaggtaggtcagagaatttctttatagccagctcctacacagaacgtggagggttgggggttgttggagtaactgatctaggtttcatggctggttttgaggaagagggattctagtgtccataactcatctttgagaagaggaattctaatttctgtggcctgctttgtgggagaaaggtgagtggaagccatcaaggcatgaggaagtcaaagagagactttccttctgaggctgcttctgaggccttccaatctcctatagttcaaagtactcagcacgccgaagtgccgtaatttggggtatcattttctgaccccaacattggcttttattgaattagaaaatctttagagaaaaaaagattacattgtggcaaatggtctagattgtgtggtaactattcttagtgttgtggggattcaaagaggaagattcagtgaggactggcccaaggggaagtttttttttaaaccacattcaacacttcaactcttctttagtttggacaggacaaagagtatctagggtgtccagctagggaagaaagagaagcaagtgcaagtcgttgtgaaaaattggggaggggggttggtagacagcttggagcagggagtggtcaggcatagaagccaatacgaggatttatgttgagataggttggatggaacataatgcagagagccataaaaatcaaaaaggaaagttaaatctcatatggaaaggaatatgaaactattcatgttttaaagcaagtaagagattgaacaaagaaacctaactagagcattttaatttttacacaaaagacagcatatgatagacactcttctgtacctagctacctaccctatttcagtgtcatatatgctttgaaagcttcttattttgtttgaaatgttgaaccatgcaaatgtattttaaaagtatttcaaaagagatgttaaaagtatcccaacgttgttcattttctcaagttaatttaatcttttgacacattttaacaaatttgcatggcttaaaagccaagagtaagtgaggcatttgttgcaaagatacaggacatcaatagtgtattatgagagagatgttaaagggaaaaatgtcactagatttaaatgtatgtttttatctcttaaactatatcctggagatcttcccatatcagagcatagagatcatcattattccatttttacagctgcatagtattccattgcatgaccatgtaggccacctcacctgagtttgagtgtacctgtgtgagtgggcctccggcaggattggtaaggtcagaagtggacacaccggtggcctcagtagatcaccccagattctcctctgtgtgagttatacagttctgcacttctatcagcagtatctgagagtatctgtcccctagcgtttgtccaactgaggatgttcaacttttgaagttggtcgatataatagctaagaaatattatttcaatgtagttttcatttgtgtttcttttacaatgtgatttcaaagttaagggaaatatctgatgtagaaggaaagcttatgagtttagcctttagcctgttgtaattaaggaaaatgagaaacatctaagagaataggagttctggcaaaacggcaggaccactgaaggggcaatttgaaagtaatcattgtatcattaggatccgattatttaaggtgtgtgtttttttcttaaaaatcaagcagcttgatataaaccagtattatgataaatatcactaaaatttattttccttacagtgctttcatatttttgttcatcaaaagtgaaataccaaataacacgtgttccatggataccactccattaataacagagcatgtgagtatagtatgagagacaacttgatttgaaacataaaattaagataaatggataatacataaattttaaacacagatgaaaaagtggtgtttgctcatcactcctggctatgtaaaatatcttagcttatttattatgggtaggtctatgtagcaatcaatcaatatttccgcagttgagcttctcagcaagcacacgggtttatttattttgattaacagatctctactaggtgatatatatataaccc

SEQ ID NO: 32943 - DNA, 2300 bp, Homo sapien
tcttcaatacagaggctaaattatgctacattatcaagtaatcccagaatcacagcagtttactcaaaaagtccatgtgttccttaggttacatgtcctttgaggtttagttacaccttgttccacatcttcattctgggaccaatgttgagggagcaactttcatttgacacattctattcttaaggtagagggaaaagagagaaggcagaaccatgtgataatgcttgaaatgtctgttctaaagaggcaccattatttccactcatttttctttcacggatcaatgcaagtgtggttgtcaaccctgacatcagtggggtaaaacatatatttattctgcagggacaggtgagtagagaggtacctggtgggaaacagtccaataaagaggcacaacaactgttttgcctttaatacataattaaaaggacaaaaacagctgtcttttttagcagatgtgagctccctctagagactcctagaaaaagtgtgtcagtgaattttaaaagatcaggacgagcatttctctggaataccatccatcagagccaaagagatcctgtttatatgattggcctaggggaatgctgaatatactgagctaagtccatgtgaagactgtgtccatcttccctactttcataaaggatgacttattcttagggtgactatattctttatcacatggactgggatactcttgagaacaaaggggagtactcttgataattatattggaccaacaagtaagccttagctgatcaggacctatagtcactctacttatatgtcaataccatagattgtaataatttttttatattttaatgtattgattcccaggcatggggtaccttcatcggactcatcaaaattctagagagctgttacaagtacagcttccatggaccttatctatagaattaaaatctccaggaatatttgtggcagagtgcattaacatcaaagcattcaatgttcctccataccaatcacctccacttctggccactcctgcaggaattttgtccttcctaccccactatgaagtttagccatatgacttgctttgattgatggaacgtaaatagagtgaagtctagtcatagcataaactatacgagccattatgggttccccttgtctctgttttccctccaccaggaagatcagcaatgtttttgataagggctactcctttagccttggtccttggggctcagaaaatgataccccaaaatgaaggactcagaggcaaagtttctttctcatcctcccctgcctttccatctctcacccttccttctcccctgaggcaagccacggaaactagaattcctcttcaccaagacaggtcatagaaaccagaaccccttttccccaaagccagccataaaaattggagtaaaggtttcagtaaaaatattactccaacctttcccaacctttctgtgtaaaagctggccataaagaaattaaatcccttattcctgaggggtcccaccccataccaggaaggaagaaatgctgcacaaagagaccaagaagaatctaaacaggcgggccttgccgaatttccccactttgtctcttcacgttagattgtacccctgtgttcagtcgcatttctacacaactgtccatacttctttgaaactaagcataaaaatagatagttttccctgtatctttgggtcttcattctgaaggctcctgtgtcaatgcaaagctatactccaataaatttgtcatgcttttttttgttaacctgccttttgttacagaggtgttcgccgtgaccgttacaatgaagaggaaagagatcatcccctttctactcctacatccccaagtgaagaggacatggagtacagccacagccacacttaaagggcatgtaacatgaacaaaaataaatgtttgttgtaagcaattacaattcatgatgcatttatttctatataataacctggtaggatatgtctgtatgtgatttgaaaatcctaagcagattaatttttatgattgatttattttattcaatacttaattcattttttaacctaagtatcttatgcaggacatagtatagattatatgttcaataaatagttatggaatgttttcttttatctgattagtcatatttatagtagattcactattcactatttagattcactatttatcaataacctgcactcaatagttttggtgcattcttctaattctgtttatttgtttcctgataatagaagtatcacatgcattctatagataatttgaaagtataaatg

SEQ ID NO: 32944 - DNA, 2300 bp, Homo sapien
tttgtttctggaagttttcagaggactaaggctacatacaaggtctttgttgttgaattcttgtccttagtttcacaggaaggaaaattagcaaaatgttttttggtggtgtagtttttgggctgtcattcaataaatggcacttgagagcaaggagcatagacaggctcttgctaagccatgtggctcctttgtgtatcctcacatttgaagctgtgctctgcagtgggaggggaaagaggtgaccccctcatcagacttgctcctgagcagttaggagccacttccaatcactggcacagtgcctgcaatttttgttgtgttgttaggtgtttccagctgtgttgctcccttagggctatgtccaataggggaatgggccacactcttactggaccagtcctgtgaaaggcggcacacctaggacccataccagactgcaaacccatacaactcgccagtctcaattttctgagagcgtaggcttctccccactcaagtgctgagcacagatcttggcttggcacttccaagatgcaggccacagctccgagtcaccaggacctggtcatggctccctccggaacctcagggttgggttccagatgtgttgtgggatccaaagccctcccagactgctgaaacacactcaggtagaacaaacacccaggatgggcagtggaggctccactgtgtacacactcttatggggcagccaggcagggaccctcagaagggctggtgggcaggtgggcccacaggacaggcatgacctagtcctgtggggaagcaggccctgctttttccccagcagttagctggtggcagagcctctcagagggagactgagagccctggaggatggatgtttatggctgggttcccccagagcagtcttgtgcacaaaggtccccaggtctgtacctgctggagctccatctctatctaatctctgggaagatcccctgccagctcaaatgtccatgggtggcatggggttgcctgcagctaggatctcagaggaccagggtgagagtgagcagtcccctagtccctttactcaccctttccccaggagccatttagggccagaaaccagccccagtgttcaggtaccccatgagagcttcccagcttctccctcttcagcctcatcaactgcatcttatctccatccacattcagcattttgtctccaaagatttgttcaaatgttgttgttttagtcaaaatccccatctttctctgtgagaactgcacttcccagctgcatctagtcagccatcttgagatttctcccaattaatcttttagaaacaaaattatgccctgactgagagtggaacaccaggaatttttcttgtgtttttctctatcctaaaagaaagctttgaagtaactattttctctattctggggaaaacactaaaatttgaacatgggccacttacagatgttttagagaatatgtgtggtcttcaaaaatgcaatttgaatatgtgtttcaactaagctataactctgctgcttgttttcaagattgttttttctaagtggatttagccataatgtgactctatactaaatttcatcttcttgaaatgtgtgcatgtgattagccaagaaatttcttaatagacatatttcagaggctgagtcctctacttgattatttattcaagctggaagaaaaacttcaagaaaacactggactgggtttggctacatttagcatgcatgactcacagattgttctagatagagtaatagaattgttcacatgccaaacactattctagtttctggattcagtgttttagtcttaaacttggtctcaaggggcctactttccattgagagagagaaaataaataagtaaacaaatgaacatgaacagaaaaagaatgtcaaatagctctaaggtctatgaagacaagcagacagataatgtaatggcagaacgatagacggaagtaacaggatatttaaattgaatagaaagggaaggccttttctgaagacaggctattgagctcaggcttaactgtcaagaagccaactctaaaaagctccagtagaacattccaagcaaagggaaccacaagatcataggccctaaagcagaaacaagcttaaactatggaggaatagaaagaagacaatgtgagtagggtgtgaagcaagggagaaagtcgtagggaatcgagactggacagacagaggcaacaaaaaccattgagaaccttgtacgtgttggtaagtgctttgaacttgatttaagatgtaacaagaagtcgttt

SEQ ID NO: 32945 - DNA, 2300 bp, Homo sapien
gtttataattgaacaatgtaggcaggaagtgaaggctaagaacatacaccatctgtttgtttttaaaactctttaatatgtgtcttcaaactgcaaaacaagagaatgagaaaacacactttaattcaaatcttaataagaattctatttcagtaatctggtaaaaataataataataataataataatacctaaacattactgaggggagtcttttgctacaatgcagtggttctcaaccaggagcgattttgtccttcaggaacatttgccaacggctggagacacctttaattgtcgcaactggagagtgctacaggcatccaatgggtggaggccagggaggccactaaacgttctacaatgtaaaggacagcctctcacaataaggaattctccagcccatagtagaaacagtacctgcctcaatgtatggccagggtgtgctatattcacttttgggttttgccaccaaaatacttctataaaactaatatgccagattcactgtctttgccaaaaataagacagaagtgacaccctgagaaaacaaaccatgaaaattattcattcagatgaatatctattttagtaaaacctaatagattcttaataaaatgagaggtgatttggaaattttgccctgataatttgagagattaaaaatacattgttaacgagtacttcctggctacccgcccactaattgtatgtatctgtgatattcgctcaggcaaaagtttcaaagtttgcaaaataacatcagaatgattttgaagacctctgtatcaacagcttactttttgttgacaattcccaaagcaagtccttcaattttactattaagaagcttcttatgggtcccccttctgaaactgcccttgacacgttccacagcatccttccaaaaaactactatttctaaataaatttaaaaaaatccatgaaccactcacataataatcttaaaatacttcaagtattattaaaaatagtgaacattttatgggactaaattcagttaaccataagcatgtccatcaaaagaacagtgtcttcactaaatctactactaaatgaataagggtttgtgaagatttctatattaaaattcttctttcatggaattaattatatttatggagggaggaagcagtgttagtataaccttttagccctcatttagaaataggcttattatattgaagtcaatgatatacagatatgtaattcaagcagattctacgtgtatatctacgagtagggagcattaacctcaaaaataaattcctcatgtcaaagggctactactcacttgttccagaaattcattagcaagttgaaaaataagaatgacccagtctggttaaaagaaaatgcagtctacagaaatgttcattgcattttcatacttttccccccactggtccaataataaaaatcatcatatgaatgactgacacttagtaatcacctataatgcagtaggacctacacccctcactatgccctgtgctggccatcacagctaccttgctgcatacatattttgctccagaaaagcaaggctcagccaagagtcagcacctgcataactctaaagtcacaggggacctacaattcaaacccaggccagctttgctccaggacatccactgacatgtcatggtctccattgtagcaaaattcacaagttcaaaaggattttaagttgttttattcctttgtattcttctttcaacaatatcctattgttcgaattcccaaactcaaacagtttataaacgattgctgtagttagactttaatcgctgtcccacagttaattccacaaaggcattttgccctgtgtaattccattcttttcctattcctgtgtcattaggggaaaaaatatgtttttgcttatgagatatctctagctcaatttctttctggtagtgtgtctttgatcagttcagacatttctcagacttcgtatacgccctcgtttgtagatagcgttatgtgttctctgaaactttttattgcttttcagctttgtgtgtgtgtgtgcacgcgcacgcgtgcgtgtgtgtaaagaaggagattaggacatttagagaaggagggcggggaggagagatcctgagaatagaaaggaggaaagaaaaaaagaggaatggaaagagacagagaaaggaaatgggagtggaaggagggaggactgctttgtaactgctaagattgcagacagaaatagcacacaaccactgtgagctgtatgcgattcagaaaccaagaccaaattttgctcactt

SEQ ID NO: 32946 - DNA, 2300 bp, Homo sapien
gaaacagggtttctccatgttggtcacgctggtctcgaactcctgacctcaggtgatccgcctgcctcagcctcccaaagtgctgggattacaggcgtgagccaccgtgcttggcccaggattgctgttttctatgaaaatacactagagtctcagctcaacaagatgacttggaccccttgacactaagcgccagatatatctgagagatttcatcataaataattcttactgctatttgggtaacatgggcattgacctgtgaacactttaaacaatgaaaatgtatagatcaaagaacagaaactctgagctctgacaaataacattaaaaaatcacacacaaatgcagaaaacactcagctcctggtggaaaattcacttttcagccaaacgttttcttcaccaatgatataaaataaaacagtgttcctcaataacacattagcacttcattctacatatttacttgcaatcagtttgttctgcaaaaataaaagctggttaagcactctagtcatccttaaaaaaaaatacttgcggagcaatgagataatctagttcatcccctagtttccaatctgcaggaaaggtcaggccacagaactctcccaggttacactctacatacctcattccacttgacccactcaagagaacataaaactccccttccctgtcttctcccctccagtggtgtgtgagttacggttgggaggtggggtgctagtttctggggattcgagatttaacagaaactatcctaagtatgcattctagcaatcatacaaagggaggagtcctgaactaaaccgtcaaagaagccaatccacgtgacctaaacccttcaagctgggtccagcgctaagcaggcctggggcagacaatggcattatcagctgtccctgggcaggtggccaactagaacagcaggctctaagtcccatggaaagaaatcacagcctgatctcaagtacccacagaaagccagcaaactcatgcagtgaaaactattctccgaaacccatgcaatgaaaactattctccgatgggaaaggaggaggcagagagccagcaacaggcagcgcagagctgcgtggcttcgggttactgcggatgattgaaaccagaaggcgagacaaaaagaaaccagtgaggggtggggcgggtggaaggaaaaccccttaagactcctcaccactaaatctaaagggggaaccctcagagaggggtggcactttagctgctggcatcccccccgcttcccgcccgcacgctctggggcgcagaagggccggtcgtcccgggtcatgggggttgggggaccgattccctagcctcgcgagccccgccgccgccggtcttcccagaggcgccgaggggggacgcggtcccgacaccacactcacgtctccgatctgcagctccacttcctccagctggtccaccgttgggccgctgctcctgctcggaactggccagcccaaactcactgggccgcccggggaagatgctgcagaggcgtctgaagaggagggagaagagggaggcggcgggggcggcgaagaaacctgcaactcctcagggtcggccatggggaagggttgggaccgcggaatccgacccgagaagccgaaccgacaccaactgtcttttaaccactcgcgcccaaagccgaaaggccccgcctcctaacgccagaaatcccgcccagtctcctcgtgggtctcagccccggaccacaaagacgtttcatttttcgggacagccaatcatatgagtcaattcaccttaggcaactcacggctcctgcgcgagcctccaatcgatctcgaagggcactcgtagagaaaactacacctcccaggaagccgtgtgcgtcgccccgccttctactgcctttcactgcgcgtgcgtcgtgctgtgggattcgcggacccctctggccgcgctgtggctgtttcaccgctccccggctgggacttggagtcccttatctttccctggtttggtacatgacccggaagcctcggctggccgttgcgtcatccatggcgccggcgcagagcgagaaggaggtgggaacgccgtgaagcaagagcggtcggcagagcggggaggcgaactgcagcagagttcttgctttccggcaggtgatggcgccccccgcggcctagaggtccagcgcccgccgcgagcagcggacagtcctcctgttgtgtccgaccgagagtcctggtgactttgaacatgctggtgccgctagccaagctgtcctgcctgggtgagaggaaacgggc

SEQ ID NO: 32947 - DNA, 2300 bp, Homo sapien
gcattgtagtttagtgcatagaagttatttacttctgaaaactgatgactgacatatgacaaactatttctactgcttgtatagctactgattttcttgagaatatttggaactgtgtagtctgaatttctccaaaggattggaaaaaaaagtcacaacctttaccccttttctgaaaacacatctgatatctcactttagagattggaatattcagtctccgtggttgagaagagaagtcacaaagtccactgaactcatagcatcaccatatcaaagtcacactgatggcacattggtgtctacctctttcatgccagcaggctacgaaaatggcaatgaattgccatccaaagaaaacagaaatggtagtggaatttggttagcactgggcccaaggctgattgcatctaaattaggctctaaggcagatagcatctgactactttaacgttccaaacaccatcttatccatacattaagtgcagcaaaaaatgcatgggtgacatgaaatttaaacaaagttctaatttcttaatatatggaagccaaatttaacaaaattctactttcatgaaatttcataagaatatccttgaatttggaatatttagacttaatgattctatcaccaaaacttaagtaaactaaagatttaaaaaaattaagccagttatgacagaatatgagatcctttagggaacttttctgtttgaattaacgacaacaacaaaaatttaagtaaaactttaaaaagaccatccaacttcatctgtcacgatggttcacagaatacccataacacgataaagcccttagagttaatttaatttaatttttttttgagacggagtctggctctttcacctaggctggagtgcagtggtgcgatctcagctcactgcaacctccacctccgggttcaagtgattctcctacctaagcctcctgagtagctgggattacaggagtgggccacaacgcccagctaatttttgtatttttagtagagatggggtttcacaatgttggccaggctggtcttgaactcctgacctcaggtgatccatccgcctcagcctcccagagtgctgggattacaggcttgagccaccacgcccagcccttaattttagacaacgcagaaaaactggctccagatacacttgggtgacttggtcaacatatgaatgttaaccatgatgtgacagatcagacttcaatttctttagactgaactagaatggctccgaagacgaaagtcaggtcaggaccagggagaaaaactgggcaaatacgatttttttttttccatttccaacagaggtttgaagattagaaccaggatttgggaagcctcagttcaggagtccaccgaggtgtgtgtgtgttgacaggtggtggtgatgccgagggcgtgttgacaagttttccccgcccttgacctttagcctagatattaattctaccaactggggcaaccccagagggaggaagccagggtcccccaacaggctgacagcgcgtgacctttgccctagatagcctgagaaagctgatgagagaaggggcgagaggtgcctacagcccccaggaccggccttgtcccttttgccctaactcctccacttatccccaccgcccgtttcctctcacccaggcaggacagcttggctagcggcaccagcatgttcaaagtcaccaggactctcggtcggacacaacaggaggactgtccgctgctcgcggcgggcgctggacctctaggccgcggggggcgccatcacctgccggaaagcaagaactctgctgcagttcgcctccccgctctgccgaccgctcttgcttcacggcgttcccacctccttctcgctctgcgccggcgccatggatgacgcaacggccagccgaggcttccgggtcatgtaccaaaccagggaaagataagggactccaagtcccagccggggagcggtgaaacagccacagcgcggccagaggggtccgcgaatcccacagcacgacgcacgcgcagtgaaaggcagtagaaggcggggcgacgcacacggcttcctgggaggtgtagttttctctacgagtgcccttcgagatcgattggaggctcgcgcaggagccgtgagttgcctaaggtgaattgactcatatgattggctgtcccgaaaaatgaaacgtctttgtggtccggggctgagacccacgaggagactgggcgggatttctggcgttaggaggcggggcctttcggctttgggcgcgagtggttaaaagacagttggtgt

SEQ ID NO: 32948 - DNA, 2300 bp, Homo sapien
tcctaaaatttcaccgacacctattatttattttttcacaaaaggtatgttggtattttaattaaaaacgactctataaattggttttattatttatttatttattgtttagaaaatattttttgtagagatgaggtttcaccatgttgtctgggctggtcttgaactcctgggctcaagccttccacccaccttggcctcccaaagtgctgggattacaggcgtgagccatcacacccggccaacaaattggttttattatgagtagctagtaatacatgtaatttctcttttactttttaaaatattatgaaaaaatttaaatgtgcaaaataaagaagagtagtataataaactcccatgcaccaatcatctgcctggcccttatgtttcatccacaacccaacccacttacctgactccaggttattttaaaacaacttcaggcactatagcatctaattttcagtaatttaaaaaagagtgtataagaatgctttagagattacaaggcaaatgcttacacattatctttttccattctcataccctgttctttggcactttaccgaaaaggaaatgagaagggttcagagaaattaaatgacttttctttggtaacatgcctagtatacatgtagtcagaacttgaagcttttgcttttttttttttcttttttaacatcaactttcgtgcttagtccagtgtataacatcacaggcaaattcaaattgagaataggaatcagttgttctttaaccgtaacccttctaacttttacttatcctaagaccgggtagcaagtagggcaggagccttcatctagagggatggtgacagctctgataggggaaaattagcactggtctttccttccaaaaagccactctggctgctgctgttgacacaaggctcctggcttttgagacattatttgagtgctggattccaatactttttactttctcataagaaaaaaaaatgtgaagcatctaaggatatctcctgccttattgataaagtaagcctcaggctgaatccaaattgctgagctccaatagaactacagggcaaagcatctacacagggaattgccactcttctccaaaattaggctttattaagaggcaaggctatgttctcctcatatatatgtgtgtgtgtgtgtgtgtgtgtgtgtgtgtgtgtgtgtgtaaaaagtaaatgttttacacagatccccataagggaaaagtgggctatagtaatacagtatttttttgtttttcttttttttgggggggggggggacagtttcgctctgtcacccagtctggagtacagtggcgcgatctcggttcactgcaaccgccgcctcccgggttcaagcgattctcctgcctcagcctcccgagtagctgggactacaggcaagcaccaccacgcccgggtgattttttttttttttatttttagtagagacgggtttcatcatgttggtcaggctggtctcgaactcctgacctcaaatgatccgcccgcctcggcctcccaatgtgctgggactacaggcgtgagccaccgcgccccgccaaatacagttttatcaggaatcaaaactgtgctctcttctggactctcagctttagctgtttggagcgtttagtctaagccttaccacttacattgtaatgtgaagatcaaattgtaacgacatggcaataataaggctcctattggttgggtaccaccagtttatgccaggcattgtactgattcatgtctttaatcctcaaaacgaccttccgaggtcagcgtttttattctttttccagaggagcaaactgagtttctgagaagtcacacccaacttggtggcagagctgacgctggcatggggttgactccaaagctctctacgccacgagggtgggaaagacaacgaaacacaagcgagaagaataatgagaactgggatcgcaacttcattaaatgagaagccaggaacaggtggcggagggcacgcggttcgctgcacggagtcgctcaggctctttgaaacaccgcgcgggggagcggggcggtgccggaagtcaggccatggcttccggttcttgcgtcggaagtggccggtcagcgtcgctgccggtctccggcggagacggactctggagtttgggcggcccgggcggccactaggtactctgatattccgtactaaacacgtctgcaagtcaagatgtcgcacccgtccccccaagccaagccctccaaccccagtaaccctcgagtcttctttgacgtggacatcggaggggag

SEQ ID NO: 32949 - DNA, 2300 bp, Homo sapien
atttttgtatactttaaaaatccaaaggaggaggtgtggccagaaccaggatgaggaagaatgtgatgctgagaggaagcacagggagaaagaggggagaagggaagcattttggttccttttgtctcctttaactgaagtcctggctttaatagtttaaaatacacactcttcctttatagttgcctagtcaaaaccaaaattgaagatgatggctagagcaggttatgattttttaattgcctcttttggatgatcttgtctatttggactgggttggaactgaaagagtcctaggaagtgaggaatgaggcacaatatgtcaaattcctcttctatatgcagttacaaaagctgctaggctcatgaggaacatgcagattttagtctggagaataaaggacattttctgaccaaggatggagtaaggaaaggtggtgagttgctggccacagtatgacctgggactgtatctgaaagtcacaacgtataaagccaataccttctatatagcatcctgaccaacactggcagccctatgaggtaaaggccttcagcaaacagaaatagcaaagttgcaaattagggttctgtgtacactcaattgtgcaaaaggatgattgctcatcaggataaacacttaatccaccattttaacagtaaaagtccgaaggaaacaaatgactaagtttccatttctaccacctttctcttacctttgtgaaatttcagcacattattcacagctagttcccaaccaagtccagaaactaacacaattaaaaaaagaaaatgcaaagtaaaataggcccagaataggttcttttgattacttatgtttttggaaatatattttcctttttgagtctccaagagtcctcctctcaacaagtgtaagagagcccaggtgagtcactgttcactactcatggagaagctagaagaggcatggttggggtcttactaactttatctctatttcccatcatcggaaaaattcgtgaagcccaacgctctaaaacatagattaagaagttgctttgagtctggtaacgtgtcctacactggctgtttagagccctgcaccaccaaggattaaattccaaaggggactggggtgggacagggcaggaaagcggactcaaacacatgaactcctcccttcctcaaaccaaatatctgctgctgatatgccttgattgactgttaaatatgtattaggaaaaacaatcccttgctataaaatatcttaagtttctaaatctatgtagtgagttctgtgtgtgtgtgtgtgtgtgtgtgtgtgtgtgtgtgtgtatgttttaaaggggggacttaatatttcaaatgcaacttcttatataaccatggtatggtggcccaagacgccaaacagaacaaatgatttggataaacagtttaaattttgtgaaagcctggaggaatcgaatttggacatggaggaaacctgacaaaaccttgggtgctatgtgattcaaatcacagcccaccgaagcggccaccgcgcgtaccaagccttcccccctagcatacgccttctgtgaacgggctcttgtacctgaacaaagcgaggacccaagttcaggggctttgtctctaaagaacaaagatcggcctagctgcatgctcgctgtgcgaaagaacccaggctccgtgggaaccccacgccactcgcggagctgcgccccggcggccgccctcgcccctcgggcccctttaagtgccgcgcctgcccccgtccgcgtcccccgcgtgcccggagtactgggccgcccgcccgctcctggccgcacctcccacctcccgcctcccgccggggttacgtgagcccggggcgggcggccgccgggccaatggccgccgccggggccgccgcgctcctcccgcgccgccgccgccgccgtggggctgcgggctcctcccgcaggagataactgtcagcgcgcgaggcggtggcgggccggctcagtcatatgaccggcagccggcggctccggcgccgagcagagttactcagtcgcagcggccccgcgctcccgcaaggctgggcggccgcgccgccgcgatggccccgccaccgcggccgccgcccccggctgcgcgctgagccgccggccccccgagcgccacggccggagctgcggcggcggcatcatggccccgaccctgctccagaagctcttcaacaaaaggggcagcagcggcagctccgcggcggcgtctgcccagggcagggctcctaaggaaggacccgcctttaggtgagggggcgccggggg

SEQ ID NO: 32950 - DNA, 2300 bp, Homo sapien
agtggcacgatctcagctcactgcaacctctgcctcctgagttcaagagattctcctgcctcagcctccgagtagctgggactataggcatccaccaccacacctggctaatttttttgtatttttttagtagagacggggtttcaccatgttggtcaggctggtctcaaactcctgacctcaaatgatccgtccacctcagcctcccaaaatgctgggattataggtgggagccaccgcacctggcccatatcatagttttaatgcaaatatttagtgttattaaaccaatcagaaagtatctgatggacatctaccatggataaaacctgcatgaggtacaaaaatgaatgtcaagacccagactaatatgcaaataatttataatctagttaggatcgtaagagatgtattatacactttttttttttttttttggacacagggtctctctctgttgtccaggctggaatgcagtggtgcggtcatagctgactgcagtcctgaactactgagctaagtgatcctctcacctcagcttcctaagtagctgggactacaggcgcatgccactactcctggctcattttctaattttttgtagagatgaggtcttgctatgttgcccaggctggtctttaaatcctgcttcaagtagtcctctcgccttggcctctcaaagcactgcgattataggcttgatctacagtagttttcatagtgcttgtataagtaatcttttggttctctgttaaaaagagaaagtgactttaaaggcagtttatgggaagaaagaactcatgatcagtggccatgtcagttctaagctcaaaatgtgttcttcttggagaaaggaattcattttctcctaatctggttttatcttgatactatcaatttagcatgtgccacagagaattcaagttgtcatatgtgtgttgcaatttttatttctcaggagagggtgaatttcagctattttttgagtttattttgaaggaattttagggattatatatataagattgtcttaaggtaattgaaggccctgccatgacattagtttttctcacactcatggagtgaaatgtgtggataccgtacattaaaagtaatggcaaaaaccgcaattacttttgcaccaacctagtacaaaggtgcatttaaaaattgctgaagccaaaggaccagacaagagttcatcaggttttaggaatccattaatgttttcttcaccaaattccaggactaagaaaaggaaaagaattggggcaatcccttgtagttttgtatgtaaagatttgacctgtattccagggatcttgatttttatttctaataaaagaaaaatgttttcttcgtgaacccacagaatcatattgattctgtagcattgttctcctttttcagatgaagaatattagtgtcagaagtcaaaattgagctgcttttgtcctcaggttgggctttctcatttgaatatgcctaggaattcagtgcaagagttctgagggtttatggctgctcgttatcattttttttgcttgtattaaagcaaggatatatccctaatctgtgtcccacctccccttgtcatctatacattaagtcctacatttggctgttgtgggtaaccatccctcacttgctgtgggtagaattttgcaagattgcagagtaagacctgtcagctgacactggctcacatgagagccattaagagggtggtgtggccaatgtcagaacaaccttgcagctgaaggcaagtcactgcattgcccagagccatatgaacaggtcttgtgaccaattaattgactactacataatctccagctagggtgcacagatggagtgagtcagtccaagctgctcaacctgttaaatgtcttttctttgctaactggagtataagcttaagaacaaaagtaggacttgtctatgtttgtaatgggattgcagacagcgtgttttgtaatgtgatagatggatctgacttcctaaattattggcaggcttaatttacgtaacaaatgaatgttccacctttttttttttttaaacctttgaaaggggaaattagtacactgctgtcaagtagcttttctcacatactgtatagggagtgaaatgattgtttagaactgctggtcattacagaatgttcctcacataacaaaggaacttcaggatttgtctccaagtccatgtttatggtcaggataaaccagaagaacattaaaccgttcaggagatgtgcggcggcacagcgaacaccacaaaccagccagagagctggc

SEQ ID NO: 32951 - DNA, 2300 bp, Homo sapien
gattattctttaatgggtttctaactccagtttgattatacaaagatacaatgagacacatctttttttatgagatggagttttgctcttgtagcccaggctggagtgcggtggcgacaccttggctctctgcaatgtctgcctcccgggttcaagttattctcctgcctcagccttcctagtagctgggattacaggtgtctgccaccacacctggctaattttttgtatttttggcagagacagggtttcagcatgttggccaggctggtctcaaactcctgacctcaggtcatccacctgcctcagcctcccaaagggctgggattacaggcatgagccaccgcacccagctgagatacatctttagggtcttaacacagtgcctgtccagttagtaaacataggttctttattataattgtccatcttcttatcaaatgtgtaacttattataaaatgtaataatcaaattatcaaatgcagtagttttaatagttaggcactgaagtacttttgatgaaaagcttattgctgggtggttggatgacacatttgcccttattgtctcctccttaagctgactgtagagctcacagtacattagtcagtttttaatcaacttgtcaggatatataactaatgggacatacttttttccagttgaattttcttttctgtttttttctgagacagagtctcatgctgttgcccaggctggagtgcagtggtgccatctcagctcactgcaacctctggcttccaggttcaagcaattctcctgccttgacctctcaagtagctgggactacaggtgcacaccagcacgctcgcctaatttttgtattttgggtagagacggggttttgccatgttggccaggctgctctcaaactcttgacctaaggtgattgcctgcctcagcctcccaaagtgctgatattacaggcataagccactgcgcctggcccagttgaattttcaagcgaaatgaaataaaaccttcagactcattcatgactaagtgattttcttcttgttaatcaagctgattctacttggtgtgtgtatgcgtattaagataattctgtgtagaccacctcattaagtattttgaattaattcactgcacttctgttgagaaattcctaaatttggattttatcccaaggcccaatgtcctgggattcttccaacaaattcttattattctagtttccaagatatagtattagatctggtcacatattcagagctctggctttagccttctttgggccatctcattggctgacccactgagctgcagggaagacccagcaggcaatgggaggggctgtgggcacagcagcacgactcccacacaccaggggtggtgggccacagcctgtgtccagactgactcacttacagtggcaaaactaaaacgtggtccttactagagagtagaaatcatgagtctgaagcagggactccagattgggaatataagttatctgttttgctcttgtaaagacggatatatctgtgacatgctaaccccagagaccactgcctttgtgtccacctttgctctctaggtgatctttacggagccataggctctccagtgagactgactcgcaccgtagtggtagggaagcagaaggacttagtccagcgaatactttatgtcctgacctactttctccgttgctctgagctacaagagaaccagctgacctggagtggcaatcatggtgaaggtgaccaagttttaaatgggagcaagatcataacagccttggagaaaggagaggtggaggagtctgagtatgtggtcattacggtgaggaacgagcccgctcttgtaccccccatcctaccaccaacagcagcagagagacacaacccctggccgacagggtttcctgagtgcccagagggcactgacagtagagacctgggtcttaaacctgacaaagaagctaacaggaggccagagcagggttctgaggcttgcagcgcagggtgcctggggccagcatcagacgcttcctggaaacctcagaatgcattttgtggggatgagaaaaataaagaggcaccgcaagatggctcttcaagacttcccagctgtgaagttttgggggcaggaatgaagatggaccagcaagctgtctgtgagctgttgaaagtggagatgcctacaagactgccagaccggtcagtggcctggccttgccctgacagacatctccgggagaaaccttccttagaaaaggtcactttccagattggaagctttgcatctccagagt

SEQ ID NO: 32952 - DNA, 2300 bp, Homo sapien
tagtggaataattttatggagaagagctaacctggttcttctcccatattttcccttccctccagcctttgccatcagaatgtctgaccctaagcctacaacagattaaagtttgtaacagtctcaaaggcaaagcagaagcccgcatttcccctgaagtgttaatgggaagtcctccaacaaaagccaagatctcatttattttctgccttgtttactaaagaattactttcttcatttaggttccttcttcctttctcttctcagcatccttaaaaccacaggtgagtgagcaggcttctctcttctaggaatgttcaaagttgggcgccttggaaaatggtagtttcaaagacacaactaggagcttttcaaagaaagatactttcagctagagatagagagcccttgactataggaaccagaattaattaacaacagaaagagtaggaaagcttctgaaactgtagcaggccataggaaggtaaagaagagcataatgcaggtcagaaccaaagaaaatgacaccaaagatcagtaacacaacagcgactgactctagttgcccacattggggaaatatattcagtttctggttaggagggctgagtggttaaaatgagaagcactcttgtataatacatttgtgcatatgtgcttatgctgtctagttatctcaggtcgggttctctgaaagtggggggcaaggtggttatttgggttcaatacctgtgaaaggaaaggtgaggaagcaggactgatcagaggaagaagaagaactgtaagggctcaacacagccttgaccaacctggtgagaaatgactggtctttatacctctacctcattcagtacctgacataggctcccctggaaaaggcttgacctcagacagaggaggcagctctctgcagccaaggcagaccccgaaggtgctgacagctggacactgtctgctgacagtccttcctccagctgggctacaagccttccttgaaagggaacctacctgagtagcacatctctttgcctaccataagcctactgtaagcctttccagagttaatatagtgtttttcttataattctcaaaatataaaagatattacatttacagtagacaactccatatatttaatgttgaatacaaaattactgttagaatttatcttcaatggattatcaggtagccgatatatttctgtgcaagctagaattactgttcatacaattattcatcccacaaacatctattaactatttattgcatacaagtctctggaaattgaaatataaataagtatacttttatcataaactcctagaagtcagattctagtggggaggtcgataaaatagacaaataattgaagtggtgagttaaaaagatacatctaaacacagtgctatagaggttaaagggacatgaagaagaaagcacttagctgtgtctgcagacatcctcctggaagagcagatgtgggccttggctgtcaaaggacaagaaatatttgcatagcaacattacaggaagagcaaattgtatgtgtaaaggctcagaacaatgagaaagcattgcacagattgagaaccacaggtaaattgacatgaccaaagcacaagcactatttaaggagggattggaatatgagactggaaatatatctatatatatttgtgtgtgtgtaattatctcattaatttattaatgttattttttactgtattttatcttgccagtgtttgtcaaatatatttaaccatggtttgtgggggctttttgttttttgctgtaacatatttctgcaagacattctttttgaaatgttgaaagacagtggtgactgagcctgccagattatctgggacataagctggaactggatctagtacctgtgaacaagtgtattctgacttgatattgacaaataaggaaaagttattactggatgcaagttctgggaagactatagcagtatctgtctctgctcttggagattggaatgcagaactctgcaaggaggaacattctatctccctgtcataaagagtcattagcaaccacctggtgcaggtcacaagcagggagaggaaagactgcagagtctttcgttctttctggtgcagcttaactgatttgaagaagccgaagaagaaaatccagtagcacggttaagactttagccatggcatctgtatcataccaaaagccaacatctactactgtgggaaaacaaatgatttttacaggtaaatagtttttgtgtttgctttcacaaggagatctaaatttgctttttc

SEQ ID NO: 32953 - DNA, 2300 bp, Homo sapien
tctcctcttgtataagaacaccagtccaactggaccagggcccctcccttatgatctcatccaaccttgattacctcccagaggcctccatctccaagtactatcacatgagattagggcttcagtatatgaattttaggggaatacagtttaatccataacatgtaaccatagtagcatctttaatactggggttattttgcacttcttttgtatgtgagagagaataaagaacacacctttttaggtatttatacctgaggtatcattctaggaaatgagaatgagtttgtgaaaaataaatgcaaaaaaaaaaaaaaaaacctgcaaagatttaaacttactgggaagggaggttaaatttctgaaatgcttacatggtagagtgttttaaaaattaaaaatacatgcaactaattacctataagcacaaagagtaactgtaattctttaaaaacatttctttatcctgtttgaattgatttaatgagttaaaaaattagtgatttgtaattagctttcaactaatgtgctagctagggtttttaaattcttttcttgagtgggagaaatgtgtccacataagattttattgcattattaattttcatggtataattgactttcgcacagactgaattactaattagtataatgttaatgaatatggtttaattttaccacatcatgtggcctgagacacaagctttctctaagaaagtattgggatgagaggtatctccatagagattttacattggtaccagttttataccacccctacgttgctgaaaggagctctgatttgaaatggatggagacacacaaacacacacacatatgcatataagatgggtatctatacctaaaacatctaaaagcactgatatagactatttttcctttttgatagaaagtagaaaagtataaagctcatattttagtgtttccaagttatccagctaaagttactaatactgatgcatttggtttggtaatagttttcactgccacattgaataaagccttatctctttcagcttttgaaatttaagcaggtgtagggagaggtaagagtaatttcagaccttaggatgtaggccaaattttaagagaattctactgtgttcatatctctttggcttgagtaaatagatggtactaaataagtgaaatgatctcttgtggtaggttaattgactcatttgggaagtacaaagatccatgtgaaagaatatgatttctacattggggaatgttttttaaaaaaatgatgtagacaagataattttgaaattatatattgagtttgggtgattgaaagaattaggaaatgtgtaataatcttaaagcatatttttgtctacttgtttacctcactggagcataaaactcttctctgacaccatttgaaccaaaaattacagagcaaggataccaatcatgtactcctaaattatagtttataggcactgaaaggatacccaacttaactaccacgtgaaggaaatttctggggacagtaacgaattgaaataggtaaagcagaaggatgatgtaaattttccatgaaatagagtctcaggcaacttggtgcatctgactaggtaacattttcagtgaatgggtgaatatggcataagtcataatggtgtaaagctctaggaagggcacatttgcacacttgaggcccttggtcacatgccagatatttttgagcacacctaccgtgtgtgtatggcactgtgttgccaagtactttgggatgcagagattggtaaggcatagtgcagggaactcacagtccagtgaaagcagtacccataggtgaagaattcatacaatagcatggaagtgcaatgaggaagcagtgtggaaaagggtgaaagaaacttggtatgcacgagtcaaatgacagactccattaagtgtttccattaaaaggattgttgcttccccagtagcctcttctatacagtttcttcaatctcatttcagatcatatttctgtaataattaaggctttgagaaggacatcctatataatgtaagacacacatttaaagcatagaatgaaaaaatgaaaaccttaggcattttgagcaatatttcctttacctgtcatatatacagcatgttctgaaatacatggagtgtgatactggtgaaattaaaaaaaaaaatgtagcactttaaatttttttccttaaaggttgttttggtaattttaaatcctgaaatataattattacggggatattaagctcaaaattattctaaagttatcttttgttaaatgt

SEQ ID NO: 32954 - DNA, 2300 bp, Homo sapien
aacagattgttgagagatttggttgggaagtggaggaagaggaaaatacctggtctggagaatgattctgtttttgttttgtttttgagataggagagacctgcacatttaaaagctggtggggaggactccggttgtggggcagaggttaagcatatgtggcaaaagaaggataatgggtaatgtaagaaaaggggttggggggatggggagaaggatccaaaagagtgatgtggtgggaatggttgcctttagatatgaggagaaagaaggaaagagaatagggtgggtacagtctttggcagtagtcaagaaacacaagtcagcaagcactgacagttccaaagtcaattattaaaaatgctacattttctgtgtctattttctattacatgtgccattgatagataaacctgattgtgaaaagctgacagtgtttcagaattaaaatgtccttattctttgtcaagtataatgcagtctttcaaatacctacatatgtacatgaaattaagagtttataatagaataatgtatccgcattttatttcaactctctacctctgaagtttggtttggttttttaaaaaaaaaacctgggtaggttaattttttatattatttgcaaggcaatatgtgcatctgtgtgtgtgtatgtgtgtgtatgggtgtttgtgaaaatcacatcatctaaatgtatacaaagcttgtcaagtatgcattttataaatttttgatagatacttgtttactatagcacagcaatatttgaggatgggatagaggtcacattgattcctttatcttcaccttggtgaaaaaaatcatattttagttcaaagctgttcaagtaagtccttgctccgttttcccaccctgtcttcagtgatattatttggagtcagcaatcaatggattccatccctctgagacttgcttaacctacagctgctgatagaatacaggcaagagcttgttactttatctgaattgtccattgctaccttaatgagtgaaatggttaagtagaggagggggcgagtcttaaggaatgtgtgtaccatttgagctgaatatttcagtgtgtatagggagagggagggtgagagagaaatccacttacatcactagaactgcattgagtgtgagccttgcaggttaagagacagactacagtgtcttgctttctgcaggaagcagcaatgccgtttgtttcctaagaggaattttttatttagaaaaggaagctttctatccaggaaatggctttccttgtgcgttgctatgccaactgcctgcagccatggtcctccaaagtaagcacaataatgtaattatattggtgtattgcattcagactcatgatttttgagattgtgtgtgtgcatgtgctgtgtttctgttagtggctctcttgctagcaggcatgcttgtgttgagtgtgagggacagacatcattaaattaaatgtccatcagtgtcatgctgccaagattaattgtgcaaacttggttagtggagtgggacagagatcactggtcaccactctgtcagcatcattagcagctagggaggagttcccgattcacacgctctgccctgatttttttctttctttcattttctttttttctcttggttggagggttctgtatgtgtgattgcagatgaaacaagggtattaacaatgcttggctgaatgctagagcctggttcttataccaccctgactaatataattctgtgttaagcctttttgaggggagtctgtgtgcagtcagccattttagcttttttcttttttttttttttttcctctccttttcttttgcctcttgttcttcaatctcagaaatgatcttgttctcttggaagactgagagctgtgtgaggttttctcagtcttgtcatagcctaggatggttagagtttcaatgttataaaaatggagacgaacactgttgttcggattccttttctggtctacaagtgtgaagggtttttaagcttaccagtagtgacactttaagctgcagcttggttttccctcctccctttttttttttcctttttcttttaatttaatgctgtagagggtgacttgccatcgtgagagattggtacatgatgtgtaaattcagttcagcatatgtttcttcattatgaaaccactagcaatcccagctaaccatggagttatgggccagcaggagaaacactcagtaagtatcgcaaatgctgcttgtgctttgatagcacgtcatagagaactgctttaaaatgggaattgttgctctttc

SEQ ID NO: 32955 - DNA, 2300 bp, Homo sapien
aaacaaacataatcctgggttttcaagtcataataaagaagaaaaaatttttcctggagttgttcaacagaagatttgaactgctagaagacaaaatcaatgcccttgaaggtagatggataaaaaatctaaaatccaaaagaaataattatttttaaaatgcaataagcttcagagaaatgtgggatactgctaattatactaccatacatataattaattaccatagaagaggaagaaatgaaagggaaaggaacagaaaatgtattaaaaattataatggctgaccactccccaaacttaaaaaataatattctaaacattgaaaatgctcagtgatccccagttacataaactagaaggatcaaaatccagacatgtcatagtaaaaatattaaaagacaaaaacaaatagactttttttttttgagataggatctcatttggttgcccaggctggagtgcagtggcacaatctcggctcactggcaacctccacctcccaggctcaagcagttctcctgcctcagcttccaagtagctgggattacaggcacatgtcactaccacccggctattttttttatttttaatagagacagggtttctctatgttggccaggctggtctcaaactcctgacttaaaatgatccacccgccttggcctcccaaaatgctgggtttataggcgtgagataccacgccctgccaaatagacaattttgaaagtagcaagatatccacacgtcacatttatgggaatctcagtaagaattctagcatattatcatcaaaaacaatgacgtctaataggtaatgggatgacatattctaattggtaaaacaaaaaaatgcaatcaacaatctaacgtctggaaacttcatcttttgtagatgaaggtgaaatgaataccttaccagaaaaacaaaaattgagagaatttcttggtagcaaatccacttcataagaatgctaaacaaatttctttagtgaccataggaaaaatgtgaatacacacacacacgtacacacacacacacacaggtgcacacaaagtaccaacaatgataattatgcaattaagaagacattataaatgcttatatcttctctttccctctttttaactgaaataaaataatttgttttaaaatgtgtattttattgcagacctaccacaaaattatatatttgacaatgaaagcaaaaaggaggtccttgtattgcaatgagaaaaagcattaaatccacagaaacctataaagacaaagataaatagtaaataagaacatttttgtaacaataaatatatgtatttctccttttttctcatttttaaaaaacaaaatattatatgaagtaataattaggattaggcatttttggaatataacaaaaatagcacaaaataaggaaacagtagtgaaagttacataggactgaaatttctgtatctccctagaagttagttagtataaatctgaagttcattctgatcagttaagatttatatggtaagccccagagcaacaactacaaaaacaatttttaaaaagtgaaaatatcattaaaggaattgaaatattaccccaggaaatattcacttaattccaaagaaagcagtaaatgagggatagaaaaacaggatacctataaaaaatagcgtagaagatttaaatccaactatagcaataatacatttaatgtgaatggggtaaacaatccaatcaaaatacagatatagtctgatgagagtatagagatatccaaatatatggtgtttaagggagacaaatttcagattgaaaaattcaaatagataataaaggaaggagaaaaaattatgcaaaaagtttctgtaagaaagctggagtagctctggtaatgtcagacaaattagacttaataaaaaaaaagtgttactaaagtgtatctctttaaaagttaagtgctgtactttttctcacatttcactagaaatggttcactgcccctcccacagtagtgagagtcttactctcatttggcagcaatatattgatgtgtgttttctcgatgaagatgagagtatttgccatcacctcctcagaggcaacaggttttgcttttactcctcctagaagcaatggaaccttgcctgttccctgggggtgagacggatgactgcccctacattagctacctaacatttttgcttctccggacagaagagtaagggcaaggggacaagacccatctccccaaagcagctgatccccacttgcacaccaaactaccaatgaagctagccatttctgg

SEQ ID NO: 32956 - DNA, 2300 bp, Homo sapien
agccaagttttaaggtaggccatttgactgttcatcacatggcataattatttgactctattttaccaggcagatgaaaattaacttacttcttatttaactaaaagaaaaaaaacagaaaaaagttacttattatttaattaaaagaaaaaacagaaaacaacaaaaacaagcaaagataaaagtatttcaaatatttatgatttttcagcaaatatcatgtaccttgtgctgattgaaccaaataattattgcattattagtcacttcatgaaaggtcctttcatgttttaattttactttttaaatgttttaaattgctataaaagtgagtaaaattaatcttttctttaaatcaaatagcaattttattgcttgtattttagaaaaagtttaagtctgtctcccattttatattgttcaagttgtttacatttttatttgctgtgataaatacatttttcaattgaatcctggcatctaaattattaacctatttattcaaatgttgagaagacagaacttcccatcttgcaatggatacagtatagtctatactggctactactaggcaactgcaaataagcatttttttatatataggtctatcccaaaatagaaaggtttaactgtattgcattgaaataggattcatagggataattttaagaatgacaatctcaagtaaaagcagtacaattagttacatttagcttcaagcgtttattaacagcacaatcttggccaagtatttaatctccaagactcatttgccttatatgtaaaattatacctccttcccaaagatatttttcaatatttaataagctgaagaaataaacaataggtttatgaaacatggtaagagatttataaatattagctctcctttaaatcctttataacacacacaacaaaaacacaaatacacacacaaataaatcataaccaatagaatactacccagccttagtatgaaagaatgaaatcatgtcttctacagcaacatggatggaattggaggtcattatcttaagggaaacaacttagaaacagaaagtcaaatgcagcatgttctcacttaaagtgggagctaaataatggacatagagtgtgaaataatagacattggagattttgaaaggtaggagtttgctgggtaagagataagaagttatggctgggcacgatggctcacacctgtaatcccagcactttgggaggccgaggcgggtggatcacgaggtcataagttcaagaccagcctggccaatatggtgaaacccgtttctcctaaaaaatacaaaaattaggtaggtgtggtggcgggtgcctgtaatcccagctatttgggaagctgaggcaggagaattgttggaacctgggaggcagagattgcagtgggccgagattgcaccagtgcactccagcctgggtgacagagcaagactctgtctcagggaaaaaaaaaaaaaaaagttacttaatgggtacaatgtagactatttggactatttgggtaatggctacaccaaaagcctagatttcaccactatgcaatatattcatgtaacaaaacagcatttctacattttacatttaaacaagtaattaaaaaaccacatctatagcttcatattacaattgcattaattatatattacttacataatatattaaacatgatatgtcatacaatctataatattgcatttcatatattaatattgtatattaacactgtatataatttacatatatcctccataccaagagttttaaagaaacttaaaacacaatttattaaaaattataatagataataatgttctacgctgtccatgaaaggatagcaatttgtatggcaaattagaaagattgccatataaagaaaaaaataaaacgtaatggtaccttctagggtaaaccataagttagactcctttgtgttctaagtcatcctattaaagtcattgctgcttcatatccctgagagaataaaatgtttatgaaccccaaatagggccaacaggtgacacagagccctttccctttatgaattcatgcaaattacatcatgacaattatgacttaatccccaggattctaaacccctggaaagagttttaggcacaagattaagaggtggatggaactggaggtcatatcttaaatgaaacaagccaagcaaagaaagtcaaatatcacatattctcactcctaagtagggactaaaaaatgtgtacacatggatgtagagaatggaatgattgacaggtaatgaacactcaaaagggtta

SEQ ID NO: 32957 - DNA, 2300 bp, Homo sapien
aaattatgtccattatacaaacaacataggtcttggtggaattttataagcatacatcatgtactctctatattgctaaagtgaactatcaagatttctctgacatttcagcacattggcatgaagcagaccaaagtgtgctatgcgatgttcccaaaagaagcatatcatgtgcgccgtagccagcctaagttcaagttatacagttggctccattgtaattgtaattgtgcaacacccatctgcccccacagatcatctttcctgacatatcatggtgtctgccacctttattaaaatgactttgggaattgaagaactcataatacatgcatgtatgggtatatctgtgcaaaaagtcatggcacttgacacttacaaatgcaaaatcagtagttgtctgagaaaacaaaaacattgcagattacccaaaatgcaaaacttgtagtcaaggtgtgttggagaaatagtactggggattgtacgttcagaaaagaaatgggcaatttctggaataaagccatagagaaagttttatgtgggtgtgaatcagaataaaaaaatgttccttccctcaagcaaaaacaccatagttttttcctctgttatttcttcttttttaagtaactagaaagaagcagtttgggggtatgggtccacaaagtaaatagacttcctcaaataacttcttaatattagagaaaataaaatgcattatttttcctgatggggaaataagtaagtgtattcctttgattagagtccctgaaaaatgcttgtgagtggatccagtgctagatgatatcagactcctggcatatgatgacacatatcagtgtgtatgcattctgatggaaagcaatgtgtgaaatgctatgacattatttgaataaacaaccttttttattaaacatgctttatccaacttaagaaaatttaagcttagttttagatacccacttctctgtccaagtaagtcatgatagctgtaggtgggacatgtgcatggaatgtgaataatcacccttctggatgattgattgcttcagttcactgaaagtgtttgtttacaagtttaagcagtctgtggaatttggcatgacaggccccctttctcttgccttcaaggaggctagagcttcactgggacaagaaatatcacaaatactgagagaattgctaaaggctatgtaaagcttccagcatagcccatctttcatagaaatattgatatagtagacataataaatattgcataaccttcataattttggcagtggaagttgaagctgataactttcactttttattatttaatttttttccctctggaatctccaagtctatacagtttgaggatttgtttaaatcatgagaatgaataaggaaggttctgtaggttttataggaacgcatatgaagtataatatatactatggagcactcgtattttttttccttaagattctgtttagaaatgatggttagcgctgcaagctttcacgttttctctcagtgctcagaatttttttttttttcttccaggcaagtttctgcagcagcgactccctccagaggctccgtgaaccgagggaagggagtaggaacaccaaatacggatccgttcaaataaccaaatggcagggagaggcagcaaagtttgggcaggaagatgaaaaggattggagatgttttcaagaatggttgaatagattcattctatttctccgtctcctccccacccgcctcccactcggtcctctccgtgctccactgccccctctctccgccccgtcttccttccagagctgtgcccgcagcgatcttagagtgcgcagaaacggcagtccccgcgaaggcaaaggctccagcaccgtcaaagcgtttagtttctactggactggttgagaatacatcctgaagtccaaagatgcccacgctgacgttaagcctgaattttgttgccccgattgccgcagctgactctagcagaagcccagtcaagggggcggcccctcacctctcggcgagttgatatgcaaaatagttacgtcagatggtgggggcggggcacccccgggttgagtggcagcagctcctgcctagggaggaggagcgagaatcagcctggttcagtgactgagacaaactggaggtgaaaggagctggtactgtccactgtgctgtcggtgctgaacctgagacgcgagcggaccagttgctccagcacctgaaggcaacgccctcttgcaccctctgtgccctgtgggacccgcttcaccaacaggacccatatcaac

SEQ ID NO: 32958 - DNA, 2300 bp, Homo sapien
gagagggagtttccctcttgttgcctaggctggagtgcaatggtgcaatcttggctcactgcagcctttgcctcctgagttcaagcgattctcctgcctcagcctcccaagtagctgggattacaggtgcccaccaccatgcccagctaagtttttgtatttttagaagagatgggttttcgtcatgttggccaggctggtctcaaactcccggcctcaggtgatctgcctacctcagcctcccaaaatgctggaattacaggcgtgaggccctgcgactggccaacttctccgtttttattggtaataccaacttctttctaatttccttgaccagaaattttagagtacttttattcttcccctgatgctggggatgtcctttactctatttcattgactgtaagcctagttcagacttttatcacctaattcctggaaaaatgcaacaaagtggctggctggggaataattctggctcaaacgtcttcccttctcaaatctgtactgcatgtctttgcaagatcattgttaattaaatattttattcgtgagttcatgcattgttccattttccaagtatttttgcacactgaatgtatgacatgccactcccttatataaagccttacttagtgctcacatgaactaaatgagatagtatttttatctccattttacagataaggaaattaggatttagattaactgcccaaagtcagtaacaccaaacacaaaatggtagagctgaggcctgaacacaggtctttttagttgaaaactctgagctctgcttaatcattgtgctagtaagttcgtatcccaagtttaaagtccttcttcactttggaggatttccatgaaatagcctaccaatcctacttcccatttctgctgcacttggattttctatttcatatttcaaatatttttctagttatctcctgtgcattgcccttctctacttcaagtagattgtaagcttcttaaaaccttactcttattacacttgccttgcatttctatgaagatctactgttgtagatgacacactaaattctcagtgaataatttataaaatctttagcacagtccttggcacatatgcatgtttaacaaatggtatcaatgattattattactacacagggactgatgcctcaaactgaagacctaataggaaaccagaaaattctgatctcttcctcagtcctaagaactctgcttgctttctccacaatttagactagtggtttccaacaataagtgagtacatttcagtctcatagtctcatctctctactacgaaacagtgctaagtatgatatagacatcaccataacatgaacaacacagcaaaattttgtccattactgctctctttgagggtactttggagaaaggaaaatggaatagttgtagttacatttttgaaaaaatggttaataccctatctatcgacagatggatctattgatggataaacttcatttaactttcatgaagttactagcgtcttgtcaagacttcctggctcaagtttctgatgtacagaacttagcattcttcaggcacccccctgttgtataatccctgcttcattttggcgcttcaagcagaattggttcacatgcagcaataggaaaatccgacattcaggccttgaatggttcacatgacgcagtgaaaacggtcgatttagggcctccctagtcctgattatttttttttgagacggagtctcgctttctcgccaggctggagtgcagtggcgcggtctcggctcactccaacttccgcctgctgggttcaagcgattctcctgcctcagcctcccaagtagtgggaattacaggcacgcgccaccatgcccagctaatttttgtatttttagtagagatggggtttcaccatgttgggcaggctggtctgtgaactcctgaccttgtgatccgcccacctcggtctcccaaagtgctgggattacgagcgtgagccacggcgcccgaccccctaatcctgattttcgaagatatgacgcatgtatcctgcccccgcgagcgccgtcgcgccgtcgcgccacatacgtcacacgctcttcggaaagcgttgctgcgtaaatggcgggggcgtgtcttttggctcctccgcgtgtagttacctgagaaacgcgggaagttgggcccaggcagtgttgctgcggttgcctaagttgtttttctatttctggagagagccgtgagcttgtccaggggccccaatcctgaggccgacccggtttctggcgcggtgcgatggag

SEQ ID NO: 32959 - DNA, 2300 bp, Homo sapien
gtagagacggggtttcactatgttggccagcctggtctcgaactcctgacctcatgatccacctgcctaggcctccaaaagtgctgggattacaggcgtgagccaccgcccccagccactgttgagtatttcagaacttctctttgtatcataaagttgtcatagaaaagagtccttgagaccaatgatctttcaaagattggtatctgacattaataactcaagaatgcagtttcacaaattttccttagggagaacacttcataaaaattgagttaataaaatgataaaatacaatggccataatagttcagaactctggcagacatgcctttattagtattcttgggaaatagagaaagcatagtacctgagtccaaattatattctcaagtccaaaatatttgctgacataataatagtttctacataaaaatatattcttagtagagaattaaattacttcatttgtaattcttatagcaggctaaagatagccaatttgatgatcaaaaccatggggaaaacttccttctaagaacagaatgtgacttaaggcaatagagtagacagaggatgcatagaaacctgaatgaatattagttattcttccctgaaagagttgaaattcctaaattgtgccttggtaaaaattattgtgccttggttaaaaaaaaaagtatgtgtgtgtatatgtgtgtgtgtgtataaatgaatctgttgtcattttactctgcttaaccattagagatttttatatgtatgcttatatctgttgttatacactaatagtacaatcattacataatcatgacattttaattcttaattacaatgcctttccaactatataaaaatatgtctagtgacacatattttggaaagctttcttggaaaaacatccagagattgtgttcatcactatctatataaatgagcttatactgaaccttaaatatgtttattcagcctaacaatcagaaaaagaaaacgttttttaacagtataaagttcagatgagtccacttgtcttggaattttattttgattttaattagaagaaagactgccattagaattgttttctaatgaaatctttataaattctctgggcagtgccctgtatctttattagaaagacttcttatttttaacaattttatttggaagaagttctactcatttgcatcagttcatcgtctacataatttgtgtgtgtgtgtgtgtatgtgtgtgtttacaactttgacttttgaaactagaatagaatcaggtaaaacatctaagatcagtgtgccagtaattggcctgaatcatcgggcaccatgatgggtttggccgccttcaacgtactcggtgtacattctatttttttcttcataatgttcagtactgtagtactaatcaccgagaaaattgcattgacgcttttcgaccaccagggaaatattcagctcatggttctcccctaaaaaaactaaaaagcagctaagcgctgggaacaaatctgacttaatgcattttctcagtgggccaaagaaaggagggccgattgactgctttgactttttaaaggtcttctctttgttcacttataaagtgaggaaaacaaattctcggcactggcgtgagagttatttgagcgtcacaaaagaaagcaaaagaaaatattagtgccattattgtggcgaatttcatgtttcccagcgagccctttgattcctggtttgggctggcgctcgagctctccagccgggtatgacttcggccacaagatggcactgacctgcaaacaaagaaaagcacagtggcaccgactttttcaagcctcgggaaactgccctgccttccccggagtcgaggactgtggggattagggcttcctttcccctgcgcgggaggtctgtgtcgaataatgtgtggcttctgttggattgcttttctttccaaaattcctaggcaatgcttccccgaggtgtgcacctttgtgaggtgtttgtggggttgggggagcttcaggcgctactcgcgggacgccgtcacgtgatccgggatgaggtggagttcggctttaaggaggcgtctcttcctagcttcatcaatctttaggatctgagcaggagaaataccagcggatcttccccactctgctcccttccattcccacccttccttctttaataagcaggagcgaaaaagacaaattccaaagagggtaagttgcgagtttatgcctttccagagacttctgcgaaatctctcattgacaaggtgaaggatgagaggggaagaaaaacgat

SEQ ID NO: 32960 - DNA, 2300 bp, Homo sapien
tacagaaatttaatgagtagatcctatccctcagtttatatcacagagcaagactgttgttcaagagagcatgagattaggtcattaacataattccccttggtttataggtcaggctgttatgaaactacagaaagaaatacacagaaataaagaaaaaattctccctagcaaagatgaagttttatctagtttgaatcccagataggaaagtaggcagctgattattcactgaagagtagaaaaatatatgatcttaaaattggaatgaggaaactctttaataagtattttctaagaaattcaaactactttgcatattttaaatcttctataagattacattattggagaattttatgttgtgtttggccattggaccatgtctaatttctctatttttcacattggaaagaatcctagtaaatggtattcctaaagaattatataattttgctgttgagcatttctttttttttttttttttttttccaaaacagagtcttgctctgttgcccaggctggagtgcagtcgtgcgatctcggctcactgcaacctctgcctcttgggttcaagcagttctcctgcctcagcctcctgagtagctgggattacagatgcgcaccaccacacctggctaatttttgtatttttagtagagacggggtttcactatgttggccagcctggtctcgaactcctgacctcatgatccacctgcctaggcctccaaaagtgctgggattacaggcgtgagccaccgcccccagccactgttgagtatttcagaacttctctttgtatcataaagttgtcatagaaaagagtccttgagaccaatgatctttcaaagattggtatctgacattaataactcaagaatgcagtttcacaaattttccttagggagaacacttcataaaaattgagttaataaaatgataaaatacaatggccataatagttcagaactctggcagacatgcctttattagtattcttgggaaatagagaaagcatagtacctgagtccaaattatattctcaagtccaaaatatttgctgacataataatagtttctacataaaaatatattcttagtagagaattaaattacttcatttgtaattcttatagcaggctaaagatagccaatttgatgatcaaaaccatggggaaaacttccttctaagaacagaatgtgacttaaggcaatagagtagacagaggatgcatagaaacctgaatgaatattagttattcttccctgaaagagttgaaattcctaaattgtgccttggtaaaaattattgtgccttggttaaaaaaaaaagtatgtgtgtgtatatgtgtgtgtgtgtataaatgaatctgttgtcattttactctgcttaaccattagagatttttatatgtatgcttatatctgttgttatacactaatagtacaatcattacataatcatgacattttaattcttaattacaatgcctttccaactatataaaaatatgtctagtgacacatattttggaaagctttcttggaaaaacatccagagattgtgttcatcactatctatataaatgagcttatactgaaccttaaatatgtttattcagcctaacaatcagaaaaagaaaacgttttttaacagtataaagttcagatgagtccacttgtcttggaattttattttgattttaattagaagaaagactgccattagaattgttttctaatgaaatctttataaattctctgggcagtgccctgtatctttattagaaagacttcttatttttaacaattttatttggaagaagttctactcatttgcatcagttcatcgtctacataatttgtgtgtgtgtgtgtgtatgtgtgtgtttacaactttgacttttgaaactagaatagaatcaggtaaaacatctaagatcagtgtgccagtaattggcctgaatcatcgggcaccatgatgggtttggccgccttcaacgtactcggtgtacattctatttttttcttcataatgttcagtactgtagtactaatcaccgagaaaattgcattgacgcttttcgaccaccagggaaatattcagctcatggttctcccctaaaaaaactaaaaagcagctaagcgctgggaacaaatctgacttaatgcattttctcagtgggccaaagaaaggagggccgattgactgctttgactttttaaaggtcttctctttgttcacttataaagtgaggaaaacaaattctcggcactggcgtgagagttatttgagc

SEQ ID NO: 32961 - DNA, 2300 bp, Homo sapien
tacaaagagtaatgatgatcagtctcaaatcccccctgggaaatttaaaggtaaaaacacacttatcttcatatcttcctctttatgtagcatattgcttaaatttgtaaatttataatttcctcaaaaaaactcttaataacttgtccactccaagtgttcttaatactgtgtattgtcacgtgtatttaaagaagaaatgccaactcctgtttttgagacttgcttgtttgtgggtgcagtgggaagggaaaatagccaggttaattagaatctttgtatcagtggcaggtagccttttattttcaatactctaataacagtgacttcaacctaaaggttcatatcatcaaaatagaaaacaaatttgtggaaaataaaaaataagattttttaatacttttaatatgcaaaagcctgtagcatagactagtgttttgaaagtcacaatggggttcacttggaatttgttttaaagacaatgtgtatttgaagtgtacatgttatgactgtgcaagagatggaaagatagaaatttatgtggcaatgtgtactgcattaaccgcagagacagtggagttaagaaagtctaaaaaacaagccttattttctcaaggtcatcccttcttgacactttcatcccctactccttactgcagaatcccaggtgcctgctcagacggcctattctgttaagcttttggggagaatatattaatatttcagaaataacacacagaagaataaaacaggaactgtgtttacttgagttctttaaaagctcttggatgactctttgactgatgaaatagcaatctatacagatcccctgagtattgaatgctgaaatccagcagaaaggggacacaaaaaattttctttgacctcttctgtaacagtgatgtctgccccagatgttagaattacaagtcacattgctcccaaggggtacagttctcttcggtttatcccacacgactctactcagcaggagatgctgtctgttacataatagttctcagtattaaagggtacaataactacaccctttctcatggtaaagctatgtccaaagacacatggacatctacccaatgtctcttttctcccttctctccttctctctctctctctctctcacagacacacacacacacacacacacacacacacacacacacgcgcgcgcgcctaaagtacctgccacctaatgattagctaaaaataaagcaaacctgcgcaatacagatttggaaacattagggatggaaatcatgttgggaaggaacagaaggacaggttttctcttcttcttttgtgtgggcttttttcccgtctttttttttttttaacctgtgacaattcgtttttagcccttcgtcttctctttgctattgaatatagtcttgagcagcgttgatttcatttcagcttcactcccctgctcctgccacttgcccacacccacagctgccactccttggagtggggaaacttcccttctattctgctgggctcattaccgcagacgctgttgcctctcctgaacattgggtcagcctccccacctccactcttccttacttcaaagaggtgcaaaggaagagcagtgttttgtcttttttctttctttctttctatcaccacaccaccccccaccgtcccccaccccaaacaaagataaaacctgagagtcgaagcttgttctcaggaatactaagaacttaggggcacagccatcctcacaccagtccaagacttctcagagttcactacacagggttgagggctggaccggcaaaactcgatttgcccatcaagttaacttggtcggcctgggacccgaggccagggtgaagggacgacatcccggggccctgtggcttctccctagagcgcccaaacagcggcgtaggtctgggacgcccccggcccccggctttggaagaggctggcgcggagcaggcgccttggagcagggtctcgggggtccccggaacagtcacgtgttctcgagacgccgttaaacccccgccccctcttccccaccgccgcctccaggtcctgctcccgctgctgccgccaccgccggggtgcaggagcgatcgcgctgggccgcgctcccgggagcccagggcctgcagcggccggggcgccccgaggtacgggctcccgcccctccctgccaacccctttcgcgccgggtaggcctgcaccgaggggccgtggcgggtccccgcgcgggctgcgagtctgcgcaggtccctgggagcccgcacccgtctctggtgccagggcgt

SEQ ID NO: 32962 - DNA, 2300 bp, Homo sapien
taatactgtgtattgtcacgtgtatttaaagaagaaatgccaactcctgtttttgagacttgcttgtttgtgggtgcagtgggaagggaaaatagccaggttaattagaatctttgtatcagtggcaggtagccttttattttcaatactctaataacagtgacttcaacctaaaggttcatatcatcaaaatagaaaacaaatttgtggaaaataaaaaataagattttttaatacttttaatatgcaaaagcctgtagcatagactagtgttttgaaagtcacaatggggttcacttggaatttgttttaaagacaatgtgtatttgaagtgtacatgttatgactgtgcaagagatggaaagatagaaatttatgtggcaatgtgtactgcattaaccgcagagacagtggagttaagaaagtctaaaaaacaagccttattttctcaaggtcatcccttcttgacactttcatcccctactccttactgcagaatcccaggtgcctgctcagacggcctattctgttaagcttttggggagaatatattaatatttcagaaataacacacagaagaataaaacaggaactgtgtttacttgagttctttaaaagctcttggatgactctttgactgatgaaatagcaatctatacagatcccctgagtattgaatgctgaaatccagcagaaaggggacacaaaaaattttctttgacctcttctgtaacagtgatgtctgccccagatgttagaattacaagtcacattgctcccaaggggtacagttctcttcggtttatcccacacgactctactcagcaggagatgctgtctgttacataatagttctcagtattaaagggtacaataactacaccctttctcatggtaaagctatgtccaaagacacatggacatctacccaatgtctcttttctcccttctctccttctctctctctctctctctcacagacacacacacacacacacacacacacacacacacacacgcgcgcgcgcctaaagtacctgccacctaatgattagctaaaaataaagcaaacctgcgcaatacagatttggaaacattagggatggaaatcatgttgggaaggaacagaaggacaggttttctcttcttcttttgtgtgggcttttttcccgtctttttttttttttaacctgtgacaattcgtttttagcccttcgtcttctctttgctattgaatatagtcttgagcagcgttgatttcatttcagcttcactcccctgctcctgccacttgcccacacccacagctgccactccttggagtggggaaacttcccttctattctgctgggctcattaccgcagacgctgttgcctctcctgaacattgggtcagcctccccacctccactcttccttacttcaaagaggtgcaaaggaagagcagtgttttgtcttttttctttctttctttctatcaccacaccaccccccaccgtcccccaccccaaacaaagataaaacctgagagtcgaagcttgttctcaggaatactaagaacttaggggcacagccatcctcacaccagtccaagacttctcagagttcactacacagggttgagggctggaccggcaaaactcgatttgcccatcaagttaacttggtcggcctgggacccgaggccagggtgaagggacgacatcccggggccctgtggcttctccctagagcgcccaaacagcggcgtaggtctgggacgcccccggcccccggctttggaagaggctggcgcggagcaggcgccttggagcagggtctcgggggtccccggaacagtcacgtgttctcgagacgccgttaaacccccgccccctcttccccaccgccgcctccaggtcctgctcccgctgctgccgccaccgccggggtgcaggagcgatcgcgctgggccgcgctcccgggagcccagggcctgcagcggccggggcgccccgaggtacgggctcccgcccctccctgccaacccctttcgcgccgggtaggcctgcaccgaggggccgtggcgggtccccgcgcgggctgcgagtctgcgcaggtccctgggagcccgcacccgtctctggtgccagggcgttgtcgggggtcccaagagagcggggtggggaaggtgaagggagcgcggctggaaaaatggggattagggtggcggaacaggcacttgtcaggagtgaagagacagcggagagggtactgggctgaattctttcgtgccgagcaggtccctccggttcccaact

SEQ ID NO: 32963 - DNA, 2300 bp, Homo sapien
gtttgctattattttactgtgattattattttttctctaattcccatcttctgtactaccagttctagcctagtctgcttgtatttcctcctcctttatttgtctaaaaagataaacaagctttaatttgcaaaggacatggagagttatggatacatgatgacctcttaagaacttctccaatgccaacattcctgcaacaagtcttaaaatcagtagtgtcatattattactatttattctaatatgtgtccttaaaagttaaaatgatagaactagttgaaatagcaaataacatttgaaatatttttctgagatataatgcaagagataataagtataaagagtaacaacaccccctgagttagttgtttacaaccctgactgaacattgaaattgcctggggaagattttaaaattactgacgcctagatctattgcctagaaattctgatataattggtctggagtgcagcatggacatgagatgtttttaaaacttcccagataattctaaactacaactaatgttgagaaccactggtctcagactatctccagattatgttattaaccttgactacccattataatcaatggatgtattttagaaacatagcttcccagactccaggtccagaaattcaaattctatttttctgggatggaaccaggcattgtgtttcttatgtgccctaattttaacgtgaagttaaggtaagaattattgctcaagaaaccaagaggtttaacatcgcaatatgggaaggtatgatatattatcattgtgttttttttaattgttgttttattgatgacaaaccataaccttggcctgctagaagagttcaatggcacaaatttagttttttttgttttagacggagtctcgctctgtctcccaggctggagtgcagtggcacaatctgggctcactgcaagctccacctcccaggttcacgccattctcctgcctcagcctcccgagtagctgggactacaggtgcccatcaccacgcccagctaatttttttgtatttttagtagacacggggtttcaccgtgttagccaggatggtctcgaactcctgaccttgtgatccgcctgcctcggcctcccaaagtgctgggattacaggtgtgagccacagcacccggcccacaaatttagttttttaaagtaagtaactttgtcttaaaaatgatttgtagtaatagtcattaaaagataaactgaggcacattaaaatattaaagcatttatttgaccattcagtgattcatgaatctggtagctcctgataaaggagccaaggagaaggcttttatagggtgaatttggaagcaaaggaaagatatttgattggttaaagtggagtactagacttatttgggtcatcccagtggaaagtccccagttagaagttagctggcagtttctgattgattaagcttaaatttcctttttatcatttacactgatttgggtttcctttccttaggtaggaactcatggagctgaagctacctcagcctactggccttctaattatttcaacacagaaatagtactttacggcacactggagttgcaattctattctgcaattgggtggtttcagatttgttcttcctataaattttggtcaaattagtcattgcatttctttctataagtctgagattcagatatttggttgctctgagaaagtctctgttgagatagcattgccatactggtcagattgaaagtgactttgtatcctttctattaatgttctgatatgaaagagtgatgactcggatatagtgttaatgcattaaaaaagcacagcctgacaaatcgcttcctataatacacagaaaaatgtctagtcttgaatttataacacagggaaaggtaaaaaatttaattatgcttcctaatgttgaacatgcacgtgacaaagtaaatactaaaaatccattcagctgggcgtggacagggagagggaacggtgcacatcagagggtgcaggctactccaacgtttccgtttcctcagtctcgcgggaagctccgttgtgggcgccccggctggtggctgagctcaggccttcaggcagaggggaggcgagggcggggcggtcacgtgagagcactgccgcggtgggttgtgggggtgctgcggcgccgtttgctttgccaaaccgacaaaagagagatgatggccaacgacgccaagcccgacgtgaagaccgtgcaggtgctgcgggacacagccaaccgcctgcggatccattccatcagggccacgtgt

SEQ ID NO: 32964 - DNA, 2300 bp, Homo sapien
ggtgatctccacagggccagacttagggaatggggtagggtgggtgaaagatggcttcacaggaagtggctaaagtatggagctagggtgtaaatattctagattaattggagtctttcacagagtaccgtcatgtgcatgtaacaatgttttggtcatggactgcattacaatggtgatcccatgagattatatttttactgtacatttcttatgtttagatacacaagtacttaccattgtgttacaattgcctacagtattcagtagagtaacatgctgtacaggtttgtggcctaggagcaatgggctataccatacagcttaggtgggtagtaagctataccatgcaggcttgtgtaagtgtgctctatgatattcacatgacaaaaaacaaacaacaaaacccccattgaaatatttctcagaaagtatccccgtccttaagtgatgcatgaatgtgctgcctccacagtatatattcaaaggtgaccttcattgcatagattcacacacaaaaaaagccatgtgaaaataccttgcccctagattcaggaatcttctggacacactcttgtttacaatttaaattatttccaaaaattgatatatctgtcgattaaatacaagtatttgtgcggcaggagaatagggtctggaagcagggaagctaggactgatttgtgctgatgggatatcagttgaaagactactccccttcaacccctcctttttctgcatggcagttgctgcctggcagttgcaagcccttctttttctgtgtggcagttgaaaaatgaaagtgcctcagattggtccccttcctcaaccaatcagacttgtggaagaccaatgggaaacctctagaaggtatttaaaccccagaaaattctgcaacctgtgcttttgagcagcttgccacagcctgcttccacgcagtggagtagtgtactttcatttaaaataaatctctgctttcgctgccttgctttatttgtgtgttttgtccaattatttgttcaaaacgccaaggacctagccaactaccctcaactgttaacagctgcacacacatatcaaggcacaccagcttcaccctgcctggagcttcttcccatgcctagttttctcttacaattccggtctctgctcaattatcacttctaaaagaggactttatagagaccaccatgtgtaaaacagcttttctacatgcccccgccagctaatttttattagagtacttatattatttgaaataatatttttacatgcctccatcccctggaaaatgagctgagtgagggatattgttggagtatccccagtaccaggcacacagtaggcattcaataaatagtttttgaatgattacattgtctacggaattctaacatgtatgggtgaaacaaagactctcacatgctgtgagaagaaaacaaaaactgggttggcagaggccttgaatatgaggaagtggcctttccggataaagaaactaagactcggccgggcgtggtggctcaggcctgtaatctcagcactttgggaggccgaggcggacggatcacctgagatcaggagttcgagaccagcctggccaacacggcgaaaccccgtctctactaaaaatacaaaaaaaaaaaaaaaaaaaaaaaattagccgggcgtggtggcggaggcctgtaattccagctgttcgggaggctgaggcaggagaatcgcttgaacccgggaggaagaaagaaagagggaatgagggaaggcgggaaagagggaaagaagaaaagaaaagaaaggaaagagaagaggggcggggcggggcagggcagggcagggcagggcagggcaaaaaaagactcagtgcaggaaaggacttgcccaaggtaatctagtacgtggaaaagcggagggcaggagcctgtgccgtgcaagagctccggggagccaacaccgagcggcccttttgagagggtcccagcccctgagatgcgggagcccgcaagagggaacctcttgtctgaagaggttgctgcgctctggagtcgtgctctgggacagatgggcaagctccgctcttggggccggaagcgtgtagcgtctccacccgggctccaatccccagcctcgcactcagcaccaggcagagttcagcctcccgccgcaagctcccttccgccgctcccggcgagcacgcaggtctggctgtccgttgggctagagcttaaaagcccaacacgggcgaaaaagacgcggtctcagttaacggggacgctttagagaaacgcactcgcctctcc

SEQ ID NO: 32965 - DNA, 2300 bp, Homo sapien
gaattccttctggaaactctagaactcattttctagcctttttaagcttccccatgccaccttcctcagggtttcccttttttcaccttgaaagccatcagtgtagtatcttcctcctttcttacctctattcatattcttcatcttctctctctgactaactctactgcctccctctcataaggatcctaatggttacattgggtttaccagtataatttgcataaatctcctcaactcaagatggttaacttaatcacatctgcaaagtcccttttaccataaaaggtaaaatattcactatccaaagattaggatgttgagatatttggggggaccattatttagcctactataccttctcttcaaatatgacctgatctcttgagttagaatttgttcctttttctctggatttcagaatcatgattacatagttccaatatgagaatttttagaatgacttcgaaatttggggtaatctttttacctttactgttattttcttggtgacgaaattgtgcatttcatctctgcagtcaaacaggcctgaatctggacccagatctccacccatagtggagccagatacctggtccagatctcagcgttaccacctatcagtgagaagcagccccaatttttcagtttcctcagctgtaacatgtatgtaattatagtatttactacaaagatttattgtgagcattaatgaatatatggaaatggcttagaacactgataagcacatattattcactcaaaactgttagttattattactttccacttgtgagattattgtagaattaaagagacagtaaataaagctacagcacaatgcctggaacatagaaaattatccctacattctagttttttatttatcatcataacctatattaaatacaacaggttaaagtcaaatagagtgaagaaaatactgtttcaaaggtaggactttagtgaaatgcactcaactttatgctaataatctgatgtttcaggctttcttattttcagacttagtatggttatagggttaaaagatatgaaaggccaatagtgttgcaagggatatattttattagtttcattaatgaaattttaatagcaataaattcaggcttttaaatattacaaagtattttcaaatatctcatggggccttgatgttagcttcaggaagtatctagcaacctaatggctgtttgattagacttctcagactattattatccttgtcacataatagtgctttagtccatgtatcataggatcttcaagtattattcatttgtttccaaagcaaattgagctattccactcaaatgattacagtaaatagaatagaaacttgtggaatcatcttcctctctcgtaaatgaagtaacagcaaaatagcgcagcatctcagctgttccaggttcctcaaataagttttacttttgcaaaaccaacctcaaacttcctatattctctgttctgcattataagcaacatgaccagcagccacgtttgttgtaattttttaaatatgtggaaaaaaagcaagatatcaaccatgtattaccttaaccaagatgccaaattatctaacttgtttctccaggcaagcagcccaacaacagggacagctcccaggagccagtcaaggttgtctgtctgtccatccactcaggacatctgcaggtaagtgctgaacaaattatcttaatctatattctttggatcaatattcgtattcttgttgtttgttctgagaatgtgtgtctcttgcttctgctttacatggtccatagaaaatttatactggctattttttttcatttagttcattttcttcagttgatctttatttatctacttctggtccatgctgtcattttcatcattctctctctctgtttttccatggctttcctctccattcccatttcccatcctttgcctgctgctctgtctagatctgccatcttgcatgacatgtcagaagagtcatttgagtattgcacccctgtcatggtgctgagccctgctaggaaggagtctggtaagaaatcagtaatacaaagacctaggaggaggagaaaagcctctgagagatatgagcatgctgcagaagaacaaataagagggagaaaaaatgactttcaccttcaaatctcaagccccaggtggagggagctttacacagattcttcagattcatcttccacagatgagagtcattggattcaggcaaaaagaagagcccaggttaaattcagactgtcaagaagaaggaggagaaataataa

SEQ ID NO: 32966 - DNA, 2300 bp, Homo sapien
tgttttttctatttcttcaaataatttgcttgatattttggtagggtttgcactgaaactgtagattgctttggacagtatggtcatttcaacaatattaattcttccattccatcagcacagaatcttttcatttttttttattcctcttcaatttctttcattactgttttgtactttccattgtagagagctttcaccttcttagttaaatttattcctaagtggggtttttttggtcatcattataaatgggatttctcttttgatttctttctcatctactttgtttcactggggtttggaaacactattgatttttgtatgttgatgtgtatcctgcaaatttactgcatctgtttatcagttccaggagttttttggtggtgtctttaggtctcttaacaaatggtttcctctaccttaaatatttttaagcttttaaaataattcctatttgccttttaagattagctggatcgttacctccttattaatttcctataactactatcatagggatcaccccacctcctgggacctaacctgctgcaacatggcaccattttgagagcagagccaccaccagaatacatcacgtcctgggatccagtagtctctgcatctgcatttccctggggctttgtcgtcttatagttctagaggtcagaagccaaatagagatcccactgggctaaaatcaacatgttaatagggctgaattccttctggaaactctagaactcattttctagcctttttaagcttccccatgccaccttcctcagggtttcccttttttcaccttgaaagccatcagtgtagtatcttcctcctttcttacctctattcatattcttcatcttctctctctgactaactctactgcctccctctcataaggatcctaatggttacattgggtttaccagtataatttgcataaatctcctcaactcaagatggttaacttaatcacatctgcaaagtcccttttaccataaaaggtaaaatattcactatccaaagattaggatgttgagatatttggggggaccattatttagcctactataccttctcttcaaatatgacctgatctcttgagttagaatttgttcctttttctctggatttcagaatcatgattacatagttccaatatgagaatttttagaatgacttcgaaatttggggtaatctttttacctttactgttattttcttggtgacgaaattgtgcatttcatctctgcagtcaaacaggcctgaatctggacccagatctccacccatagtggagccagatacctggtccagatctcagcgttaccacctatcagtgagaagcagccccaatttttcagtttcctcagctgtaacatgtatgtaattatagtatttactacaaagatttattgtgagcattaatgaatatatggaaatggcttagaacactgataagcacatattattcactcaaaactgttagttattattactttccacttgtgagattattgtagaattaaagagacagtaaataaagctacagcacaatgcctggaacatagaaaattatccctacattctagttttttatttatcatcataacctatattaaatacaacaggttaaagtcaaatagagtgaagaaaatactgtttcaaaggtaggactttagtgaaatgcactcaactttatgctaataatctgatgtttcaggctttcttattttcagacttagtatggttatagggttaaaagatatgaaaggccaatagtgttgcaagggatatattttattagtttcattaatgaaattttaatagcaataaattcaggcttttaaatattacaaagtattttcaaatatctcatggggccttgatgttagcttcaggaagtatctagcaacctaatggctgtttgattagacttctcagactattattatccttgtcacataatagtgctttagtccatgtatcataggatcttcaagtattattcatttgtttccaaagcaaattgagctattccactcaaatgattacagtaaatagaatagaaacttgtggaatcatcttcctctctcgtaaatgaagtaacagcaaaatagcgcagcatctcagctgttccaggttcctcaaataagttttacttttgcaaaaccaacctcaaacttcctatattctctgttctgcattataagcaacatgaccagcagccacgtttgttgtaattttttaaatatgtggaaaaaaagcaagatatcaaccatgtattaccttaacca

SEQ ID NO: 32967 - DNA, 2300 bp, Homo sapien
taacatttgttcaatcatttgatatgttattttttacttattatataatgatataaatactagtgatccctaaaatattttaatttgaaaataaaagtgaacacatagatttcacaaagtacatgcatcacaatttttttatactctattagtttttaatttttataggtacatagtgggtatatatatttataggatacatgaaatattttgatacaggcataccgtgtgtaatattcacatcagggaaaatggggtatcattgcctcaagaatttatcatttctttgtgttataagcatttcaattatactttcagttatttgaaaatatacaataaattgttgttgactgtagtcactgttgtgctatcaaatactagatcttcttcattctatctatctatatttttgtacagcctctggtaaccatcacttgaatcgctatctctgtgagttcaggtgttttaatttttagctcccacaaatgagtgagaacatgcaaagtcggtcttttttgtgctcagcttatttcacttaaggtaatgacctccagttccttcatgttgttgcaaatgacaggatcttattctcttttatggctgaatattactccattgtgtatatgtgccattattttctttatccattacactgatagtttattttttaaaataatttctgatgctgctttttcatacttattactttttcctcagaaaagtcccattggatttcacaatttcacaatgcaataagaagcctatctgatagtgagtagcctttaaattgttgttgttattattttattgagtcctctttgtatttacaaagattaaggagtttctaaccgtatctacacttgtaataaatgttattcttagtcttcacacttgtaaaggataatggtgatgaatgcagcggcagaggctgcacgttcccacccagcactctcactgaagactgcctaatcagcactggctgctggtacttttctctgcaagcttagtctcttccaggaatgacaggtggtaggtaatcctgggaactcaagagcctccttgaagcttggactgattagagcacaaaccatgagctgttgaaatctggtccctgaacaggagagtttttgacatgaagctgctctagattgctgtagggctgggtctcagatctggtgtatctgcctgtttccatgaaaagagcggaatcttcaaaaatactcaggctgtttgtctattcctctaataaaacttctattgatgttatatagaatcttgagcaaaagatttggcatcgcaccttttatgagtttcaataaaccttgtgatttaaatagtttcatcattgatgacagtctttgggtgaggccacaagagagtcgcttctcgagtgtccattagtatatggtgggaagacaggaggtcaatactaaggctaggagtgaattgctactggtgccttcttgcctcagaccagcggtcttttcggtgttcatgtcatagattgttgaggtcccctcgttgtttaatgttttgcctcagactcccgcctgtaaacagtacacatctttctccctcactttagctgctcatcatttaagctgtcattggtcagacatcctaaactttctcattgtgactagggctctgagggttccaggggttctaattattatcgtggctgcagtgtaggtgtccatcaccgagatggggcacctgagctactgagcagccagaaaaaaactttctccttatccttggcatctgccatcagtttaagtactgatttaggaatctttacggcaaagaagaggctcttcatccccggccccatccccaccgcgcccacccggcccacatacaccctcggagcctgctttccgcagactcccctatgtcctgtccttgactccagttaacctggagatgctagttctgggaactcctagaggctctgttgcctcctccgcctgctctgcgttccccgcgtgagcgctggattattccagtctttgagcatggcagatttccactggatgacatcatgggagcccagtgaatgccggctcagagagggggacggagaaggggagggggagcagaggaggggagaggactggggagccgagccagagccgggctgcctgccacccggctgctcgtccgctagctggggaggagcgctccacccgcaactgacaaaggatgggagaatgcccgcgccccgggatgccggccgcacgcagcctggcggccgcctgagctacttcaccctccgccggtaagtgactgcaaacatc

SEQ ID NO: 32968 - DNA, 2300 bp, Homo sapien
ttagatcaggtggcagaaagtctttctggactaaactccatgacttggattaagtctactgggggctccactgtagcaaattttggaatcatgcttctctgtttaatcggcttatttttagtgtgcggaccagtcaaagaatcctgtgtcaaaaccgagagaacaaacaagacttcatcgccatggcacatttatataaaaagaaagggagagatgtgtgaagtcagggaccccaaatggagggactggctggacccgcggcagaggaacataaattgtgaagatttcatggacatttatcagttcccaaataatacttttataatttcttatgcctgtctttagtttcttaatcctgttatcttcataagctgaggctgtacatcacctcaggaccactgtgataattatgttaactgtacaaattgattgtaaaacatctatgtttgaacaatattaaatcagtgcaccttgaaaaagaacagaataacagcgatttttagggaacaagggaagacaaccataaggtctgactgcctgcggggtcgggcaaaaagagccatatttttcttcttgcagagagcctataaatggatgtgcaagtaggagagatatcactaaattcttttcctagcaagaaatattaatatcaataccctgggaaaggaatgcattccttgggggaggtctataaacggctgctttgggaatgtctgtcttacgcggttgagataaggaacacgccctggtctcctgcagtaccctcaggcttattaaggtggggaaaaactctgccctggtaaatttatggtcagaccagttctctgctctcgaaccctgttttctgttgtttaagatgtttatcaagacaatagtgtatcactgaacatagacccttatcagtagttctgtttttgccttttgtcctgttccctcataagcatgtgatctttgttctgctttttgccctttgaagcatgtgatcttttcacctactctctgttctcacaccccctccccttttgaaacccttgataaaaactagctggtttgaggctcaggtgggcatcatggtcctaccgatatgtgatgtcacccccagtggcccagctgtaaaattccactctttgtactctttctctttatttcttagctggccaacacttatggaaaatagaaagaacctacgttgaaatgttgggggtgggttcccctgataccactacactccagcctgggcaacagagtgagagtctgtctcaaaaaaaaaaaaaaaaaaaaatgacaaaagttggacatcagtgctgcaacaagtggtcaagtgatccaagtggaatttatcctcagccttcatctttaccattactgatagttcacttcttccctttttatttttcccagctgaactaaaagtagaaactaaaaataaaaataatgagtaaaaataagcaaagaaataagatctccttattgtaaacagcaaaagggccacttaataggcaacaataaaaaccaagacaaggccaggcacagtggctcacacctgtaatcccagcactttgggaggctgaggtgggtggatcatgaggtcaggaggttgagactgtcctggctatcatggtgaaaccctgtctctactgaaaatacaaaaaattagccaggcatggtggcaggcccctgtagtcccagctactcaggaggctgaggcaggagaatggcgtgaacctgggaggcagaggttgcagtgagctgagatcacaccactgcactccatcctgggtgacagagcgagggtccgtctcaaaaaaaaaaaccgaagacaaaagctgacaagtagctgtgaagtcccaagataaactatggttgaaaattgtttatcaaactctcgtgttcggcttgcctgttatcactaaagacattaaagaatactatagaaattgacctatgttcagacacgtcactcctataaaccacctgttgaatttcttgactgtcagccaaagcacaatctttgtttgctcagaactgtgtatagtagtggtatttacagatggttgggtgacagaaaaagtaaataactacgtttcattacagtttcctgtttccttcttgatccttcacaagggaagattttcttttttagaggtacagattcctcttagtcaagtcctgattaaaactccagctaagacattagtaagccttggttagtgaagtggcatcaggaagtgcctacattttcatggcctggtagcgttcagtgaaaatgttcattaacagacacaggccattcagtcccg

SEQ ID NO: 32969 - DNA, 2300 bp, Homo sapien
gcattgttctgacactttcctaccaatatttctccatacctagttattcagtactaagatgaatgatttattgctattgttgactcacattccacagaaatgctggatcacttttcattgtacctccatgtctaacatttcagttgctcattgactgtataatcactttattactatactccaaaagtcaactatttaaacaacatctttttgtttgtctttttgaaagactaattttaaaacatgtaaataaatcatgtgtaaattttcatgagtttaatacataatcactctttcaggtagaaaaccaggtattttatcacatcttttttcttttaatgagaaaaataatgttctatgtggttagatgacttaaatataacagtttgctctgtcctgatcagtggagatatgtatcttccacagcactggtgcatattagtgatattctaggaattcattgttgatcacctggtaatgaaatataaaaattttagtcaatatttgctctctgtggtaggtctctatcttatctataaagactcactactaaacctttgaatagacttaaaacttggcctgaaaatatagtgccaaaatctatattgatctcttattgatttaacattcaactttgttagcatgctgttttcctgaatgctgtactaagaagactggggcgggaaatggggagggatttaaaaatctgaataaactctttgccattcttaagtcacttgtatatcatgagttcaaactctattgtattccattgattttatgaagcaatggacagcatggtaaagtaggaccctttaacactatgcttgcagtccccaaacaggtcaatatattctcaagacttcaataaagtgaatttaagaatttttgtatgccatcgcctattataaacttcatgcctaactagacaggcagggaaatttacagattgacttataaaatcaagacaaattgtgcattaaattcaaacctcaggaagccccaaggttatgtaccaactacctgagtctaaagaagccaaatacaacaaaattcctaatggttcaaaacaaattacacatgctttagagctagtactttggctgtacttgtgtttcaaggcatacctatactattcttttggcattttgcattttacctaaaatatgttcgatatggatgttataaatggaatttattatacttacataataagtatagtcatttccatttataacagctgtatctgatatataagggagcacttgaaacaaaaagagatcttggtgcatgtgtgtaaaagacaaggctagactgtttttgtgttttctgaattcactgggagatgaactaagacttgttttctccatctccaatttctgtgactgtggtatgttagcctggtattccaccacatataaatttttaaccgaacacagatttcatgagtttgtggcttgcctgaacttccttttttaaaatcctggacatttgcagatgaaaataatctgttacttttaaaactgcactttacaaaatattaatataaatgtatatgttttgcagatttatttcaaaacattctaaattccaaaaatctttactgttacaaacccagtgaattaggcaatttggagagttcgtgtaaacaggcactactttgcagtaagtttggtaaagataaagcatttcagcacatgttctgccacaaagcatttgggactcttatgttagagcttcagaattccttctgaaaaagacaaaagagagacttcctgtcatttccactggtttctgcatgtgggaccaatatgggcaaagtttaaacagatgcaaatggtaaggggaggaggcagtgtcacgtcttgttttacgtatttcttcatatccagattgaatttaagtcattctcttcttggagcttttggagtacacttccactaaagttatagcatgcttgaatggtttatttcaccaatatttgcttatggaaataaaggggagtggccgaggagaaaggagaagaggagtggaggaggggtttgaggctgagggaggctctgaccacagcacagagcaccggcaactttgtctaatgtgatcattaaccttcctgcaaaacacagctggcagttctctgaggtttgtcactagaatgtgaagacagccacacagatattgcacagactatttacagatcgtttggtttacattgagagtcattgctctacttttgtgcggtaggaaaatgagatttcagcaattcctttttgcattttttatttttattatgagtcttc

SEQ ID NO: 32970 - DNA, 2300 bp, Homo sapien
agatggcactcttacatcctcctctaccacagacacgtatacacaccaccagtagataatctgttctgttcccacagagtaccctctagtgctgttcagctactgtccttcacttcactttgggaactgatctctaggctcagaatccttattaacttagttccatgttttcctctttaggtttattctgttaattcagagattaatatcgttcagtagatcacagatatgtaacatttggaaaaacttgtgtcaacaaaaaagactggtgagcttttgatgggattatgttgtatctttttagattaatgtggagaaaactgacatcttaacatgtcagccagtagacataactgagacagtgaatctagtctgttccatcaatttttatgtcattaacttgtcggaaatttgtagttttcaatgtacatgtgtttaacatcttttgtcagatttgtccttaagcatttgatatttttatgttgattatttcaattctaattcttcattactagaatatggaaaattgattttcgtgtattaatcttatttcctataagcttgctaaacttacttctaggagcttttatgtagattccattggattttctgcagagatagtcatgtcatgggcaagtagagacatcggtatttcttcctgtgtaagctagatcatttttctatcttcttttttttttgagatggagtctcactctgttgcccaggctggagtacaatggcgcaatcttggctcactgcaaactctgcctcctgggttgaagcgattctcgtgcttcagcctcccgtgtagccaggattatagtctcccaccaccacacctggctaatttttgtgtttttagtagagacggagtttcaccatgttggccaatctggtctcgaactcccgacctcgggtgttctgcccacctcggcctcccaaagtgctgggattacagatgtgagtcactgcacccagcccaaaagcacaatttttaaaaatctaggtttaaagtttcaattatttgtttataaaattaatttacaaatattcctttatgactacccctgccagcttttcagaggcagccactttgaacttttcagctcttttatagtcacgaaatcacattctaataatacttttggattttttagtttgaagtattatcatatcccactttggaagataagaatttggaacagccttcacccagtggcccttctaatagaatttatcatttttgttttaggatattttctcacatttattttgattatttcaataccattgaaatagaatagaatttaccatttttgttttagaatattttctcacatttatttgactatttcagtaacattcatttctgagccgtgtattgtatagtaattgccattttgttttctgtttttttgtggttttttttaacgctctgtcgcccaggctggaatgcagtggctccaccccggctcactaccagctccgcctcccaggttcacgccattctcctgcctcagcctcccgaatagctgggattacaggcggccgccaccacgcccggctaattttttgtatttttagtagagacagggtttcaccgtgttagccaggatggtctcgatctcctgacctcatgatccgcctgccttggcctcccaaagtgctgggattacaggcgtgagccaccgtgcccggctgccattttgttttttctataaacgtttcctgtagtaaataatctcattttcaatatgctttgttttccatgttcttattcttttttttttcaagttttaaccaaagcttgtatataagattactttattcctgcatcttctcaattgtttcttccttgtatttgcccttttcttttcctacttggcgagatttggcttccttttcaaggatctttttgcagtctttgtccagttttagcctagtgataactaccttattggggtgaatgcctacatggacagttgtgccattagccttttcccactgcacctgttcaatgtagatgacatatttctttcctgtaaacctgaactactttgccaagttgctgacctttatagtgtcctcgtacaacctgaacttcatcatccttttggatgggcatggatcaaacgtcgtacttcgtacttctgtctcagctctttggaaagagaggaagacaaaatcttcctgcgaatgtgggaaggtgcactgaaatgacttttgtggttcttgcttctgtcagaagtcacaaagggattgaacttcattttggctgctcccacttcagtgatggctgc

SEQ ID NO: 32971 - DNA, 2300 bp, Homo sapien
aatcccagcactttgggaggccaaggcaggcagatcacaaggtcaagagatcgagaccatctggccaacatgatgaaaccctgtctctactagaaatacagaagttagctgggcatggtggagggcacctgtagtcccagctactcaggagccagaggcagaagaatcgcttgatcccgggaggcggaggttgaagtgagccgagatcgtgcaactgcactccagcctggtgacagaaggagactccatctcaaaaaaaaaaaaaaaaaaaattattatggtattatagtagtatacacatgtcctacacataacctatttggttcactctttactctgacatcgtatatgagacagttcttttgtatgttgtatgacaatcacagatttggacttctcataaggggcctcatgctggtttgccctaattacatctaattatgtctgaactgttctgcataatcagcatatctaccattaaacagtcaacagaagaatcagaaacacaaaccattcttggaatatattgagttctgtgccacaccaaatcctatgttttaaaaaattttttccaggctgagctcaatggctcaagactgcaacccgagtagtgtgggaggcccaggcaggaagattgcttgaggtcaagagtttgaggctacagtgagctacgaacttgccactgcagtccagcctgggtgactaagagagattcagtctcaaaaaaaaaaaaaaaaaaaaaacaagttttccagaagatatgtctttattggtgtttatatttacagaaaacttaaagggaaattgaggttgattttccttgtcttcatgtgaccacaaaaggatgaagagaggatatcagggaccagccccagatgactcaggtaatctgagaccaggcctgggatccacacacaagacacacacacccagatggaagcacaatgcctagtctcgctctttcctcaatcccgatttaaactaatttggcagttttatgagattaaagagggtgtagacaggaaattggtagaggatggaaaatcgattaagattagggacaactgtgaggaggaagacaaaggagacagaatctgagagccctgaggcggactgaaaacggggaggcggctcaaagaaaagagtaagagaaatgagcttttctggaacgaggcattgataacgctgaaacatgattagccttttgaaataaatctttcgtttatttatttttttgagacaagctctcgttctgtcgtccagactgaggtgcagtggcgccatcctggctcactgcaacctcaactccccaggttcaagcgattctcccacctcagcctccggagtagctgggaccacaggggcgggccaacatgtccggctaatttttgtattttttgtacagacagggtttcaccatgttggcctggctggtctcaaactccagagctcatgtgatccgcccacctcagcctaccaaagtgctgggattacaggcatgagcttccatgccgggtataaaaggaagcttttaaattgtggagtatttcatacatccataatagtagagagaacattatgaagaacgtacacataaaaagaaaccaatttctatcatttgaattaacaatctttataaccccagcaacttctcctgccaatggagtaaattcccagacatcttataatttcatctgtatatttcatcttataatttcattatttattccctaaaagacaatatctcaattatcatagtgttactgtaacttttaataagctgttcagtgggaattataaccatatttttctccaaccagttataaataagattcaataaattaaaacagcaactggaattctcttctgttaaggcggggcagggagagccctcagtctggcacaggtagggttgggtggcagaagagcaaagcaaacagctgaggttccttcagaatgcaactttctcacagaacacaaggctctcaaggggcttcagcaccccaagcactgcagcgtttctcccaggaggctgggcgagtccgtagcggaagtcggagcggcagagcagtgattgggtgcggccggcaccgtctctgggcttcgacttccgggtgagaccgtgaaggtgtggcgcgacgttggagaccggggcagcgccatgtaccacagtggatggaaggatgcgcggtgcggcggggcagctgtcctcttctccccggacccagcgcctggagagccagccctgcagggtgggctgggcgagccaaactgcgttcctggtgcagggcttcgggtct

SEQ ID NO: 32972 - DNA, 2300 bp, Homo sapien
taatatacagggtgggtgcagtggctcacacctttaagtaatcccagcattttgggagcccgaggcgggtggatcgcttaagcccaggagtttgagatcagccgggccaacacagtgaaacccccgtctgtactgaaagcacaaaaacttagccgggcgtgggtggcacgcgcctgtaatcccagctactctgtaggctgaggcaggagaactgtttgaaccagggaggctgaacccgcgaggcggagcttgcagtgagccaaaatggcgccattgtactccagcctgggcgaaaataacaaataaataccatgcactcacctcactgcaaagtaatatgggggaagctgctgccactggtatttcttttcctttctttttcaggagactctggaatttcaaaaggtttacgaacaaggactttgctttatcggttgatttgtctaggtcacacctctattcaactgtccaccatacaccctttctaggatatattaaaggcatcgacgggtctttattccacaattcaaatcttagtacttcatgtttaaaatgcttcactggcttttctttgcatttgataaaaaccaatatcctcaattttgcctaaagggccttgcagcattcattctcgcctatctcatcagcctcacaaagccattttccatattttatacttcttgcaatttcccacgttgtagtgccaaccaaatgacctctttcagttccttttgtaccaagtttttaaaaattatcatctctaggcagggcgcggtggctcacgcctgtactcctagcactttgggaggccgaggcgggcggatcacgaggtcaggaaatcgacaccatcctggctaacacggtgaaaccccgtctccactaaaaatacaaaaaattagctgggcgtggtggcaggcacctgtagtcccagctactctggaggctgaggcaggagaatggcgtgaacccgggaggcggagcttgcagtgagccgagatcacgcaactgcactccagcctgggccacagagcgagactccgtctcaaaaaaaaaataaaaataaaaataaaattatcatttctggctgggtgaggtggctcacgcctgtaatcctggcacttttgggaggccgaggcgggcggattgcctgatctcaggagttcgaatccagcctgggcaacacgatgaaaccccgtctctactaaaaatacaacaacaaaaaattagccaggcgtggcggcgtgcgcctatagacccagctactcgggagacagaggcaggagaattgcttgaaactgggaggcagaggttgcagagagccaagatcgcgccactgcactccagcctgggcgaaagagagattccgtctcttattaaaagaaaaaaaaatcatttctaaaatattttgtagacgcagggtctggcaatgttacctaggcttgtcctgaactcctggcctcaagcgatcctcccacctctgcctctgaaagtgcttggattacaggtgtgagccactatgcccggcctgtactaaattctttaaagttgagaggctccacattggctcttcttccagccttgaagactttgaccgtggaattgatccaacgaatgcctcttcatccctcaaattccgcctgaaatgtcacttcctcaggtaaacctgagttcatagggtagggcacaatcccacagggtgggagagatccacccactcacccactgagatgcaaactaatccaaaggggcttctattcctctttcaagcatagggagtgctcaacgactccaccctgcgaccccaggctacgggaagcagttgaccctgcaaagctctccactccctcaccatctgggaggggacgctgtgctggtgaagcttttaaaaccaacttgcagacttacttggaccctcaagtttactcatatacataaaaagtgataagaatccgaaaagacagccaggggaattaaatgccagttggggccaacggggccctgatcacggaagagggcgcccccagctctcaatcttcacacaatccctgcacccagggtcacagagcatgcgcaggtccttcccgcccacttccggggcaactgccaaccaccgcgcaggctgagccccaggcaggaagcagcccacttggtggggttggggtatgagtccttcctcgcgggggctcggtgggtcctgagtattctttggccggatttgctgatccgtctgctccaggtgagctgggaaggccgcaggaaaggcccagaagggcctcgccaggaggcttaactggacaggg

SEQ ID NO: 32973 - DNA, 2300 bp, Homo sapien
tgtttctaaagtacataagtattgctaaaaattaaaatacatgagtcagcaaggttctttcccatgtggctacccccagcttaggtcctgctgaaggctccatgccttttactgagtctccctcacctgtacccctaaggtgattctcactgagatattctgttcccagcagaggctcagagatgccctgtgtgcactagtcaggggtacacagaggaccatgagctccttatgtccttgcagaacagattcgtggtcctccatccagagcaggagcacaatacaatccatcttttctgtttctgttttgagtcagtctcgctctgtcactcaggctggtcttgaactccgggcctcaagcaatcctctccatttggtcttccaaagtgctgggattacaggcgtgagccacccgcccagcctttggtttaattttatggtggaatctggccccattcagccttaagcctttagagtttcctttccttcatcccattggtcagactccagatcagtgtcctcccaaccacagcctttatcatcctctctgtttgcatcttctgcactaaggtgtgaagatttgaagatttcacttattgttccctgttcctacttcccactcttccatcaaatctcagacttcatcacaagagggtatttttctgggaaggtagctctaagttattttatttatttattttttatttttattttgagactgagtctcactctattgcccaggctggagtgcagtgacccgatcttggctcactgcaacctccgcctcccgggtccaagctcttctcctgcctcagcctcccgagtagctgggattacaggcatgcaccaccatgcccggctaattttttgtatttttagagagacggggttttgccactttagccaggttggtctcgaactcccgacctcagctgatccgcccgccttggcctcccaaagtgctgggattgcatgtgtgaaccaccgcgcctggccaagtagccctacattttaaacagaaaagtgcgccggccaggcgcgatggctcacgcctgtaatcccagcactttgggaggccgagacgggtggatcacgaggtcaggagatcgagaccatcctggctaacagagtgaaaccccgtctctactaaaaaatagaaaaaattagctgggcgtggtgtcgggcgcctgtagtcctagccactcggggggctgaggcaggagaacagcgtgaacccgggaggcagagcttgcagtgagccgagatcgtgccactgcactccagcctgggcaacacagcgagactccgtctcaaaaataaataaataaataaaaaagtgctatgccgattctatgacttcttctgcaaatattagcctctttcactgtctcatttaccaagttataagacttaagaggctcctcacaaggactaatccttcagccttgaagattttaccgtcaagtttgtccaacaaactcatactcgtcccttaaaatctactttaaatatcaattcctcagacgagaccttggtgagtcttagttggtagggtggggcctaatctccagggtggtaactacgcagcctctcaaccagagacgcaaactgatccaaagagctgattattcctcttgcattttaaaactaaccaccctggccgggcgcggtggctcacagcgaggcaggcggatcgcttgagcccatgagttcgagaccagcccggggaacgtggcgaaacccagtctccaccaaaaaatacaacaatcagctgggcgtggtggcgcgcgcctgtgaagtgggaggatcgtttgagcccggatggtcgagactacagtgagccgagaccgcaccagaccctgtctcaaaaaaaaagaaaaaaaaaaagttgctcataggaatgaaaaatctgaaaagattgccattgtgatttaaatgacccactgaagccatcagggaccccaccacggagggaaccgccctaggctctcctcagaatcttctcacgctccctgcaccctgcggcattgagcatgctcaggcctttcccgcccacttccggtggagcagccaaccaccgcgctggtcaattgtatgcctaaaactcgaaaaccaaggcgcccagggttgtgtgagggtttccgctctgcgccccgcggggttccatgggtcctgcacagcatcaggcctgagccgccggtccaactgctccaggtaagctgggagggccgcaggaaaggcgcagtagggcctggcgggaggcttacttaactgggcaggggcttcctgagtatcagctg

SEQ ID NO: 32974 - DNA, 2300 bp, Homo sapien
tgcctgttatccaagctacttgggaggctgaggtgggaggattgcttgaactcaggagtgtgaatccagcctgggcaacatagcaagactccatctcaaaaacaaaacaaaacaaaataaaacaaaaaaagcagctaaaaaagacattttggaaacaacttagaaaatttttgccatagattggttattagtaaacatggaattactattagttgtgtgtaatattgatattgtggttatgaaagaaaatataaaatatccttattttaggcaacaaagtatctaggaatgaagcttcatattgtcttcaatttactttcaagtagttcagttaaaaaatggccaggcacggtggctcacacctgtaatcccagcactttgggaggccaaggcaggcggatcacaaggtcaggagatcgagaccatcctggctaacacagtgaaaccccgtctctactaaaaatacaaaaattagctgggtgtggtggcgggcgcctgtagtcccagaccctggggagcctgaggcaggagaatggcgtgaacccgggacgcggagcttgcagtgagccgagatcgcgccactgcactccatccagcctggcgacagagcgggactccatctcaaaaaaaaaaaaaaaaaaaaaagtatgtgaacacacacacccacacacagagcaaccaagacaaaaaatgaacaactaatgaatcaagtgtgaggggtacatggatgttcattgtattaatctttcaacatttctgtaggcttgaaaattttcaaaataaaatgcagagaagaaaatttgcacgtctagaaaaggcttgtgataaataattcatagaatctcaggattatgagaccagcctgggcaacatagtgagaccttgtctctacgagaaaaaaaagaaaaagaaaaaagaagatcacgtggagtcttacaccatctcttccttcactaacatttgcgtagttttatctcacacatcctaaactggatcacactatactcaatgtacaaataagcattagaatgtatgaaagtgggcaagacgcggtggctaaacttgtaatcccagcactttgggaggccgaggcgggcgagtcacctgacctcaggagttccagaccagcctgaccaacatggctaaaccctgtctctactaaaatacaaaaatagccaggcttggtggcacgcgcctgtaatcctagctactcagggggctgaggcaggagaatggcttgaacctgggagccgagattgcaccactgcattccagcctgggcgacagagcgagactccgtctccgccgccccaccaaaaaaatgtatgagtgtatatattctaactgatatcaaagttctctccgggagctggtaacagaaaatttctttccttgtttgcttacatttttacaatcatgagctttttagaaaatgtcattgaagttttttctctttttgaaattcaattttaaaagaaacaagggcccagtggctcacgcctgtaatctcagtactttgagaggctgaggtgggagaactggccaggaggccaagaattcgaggctgcagtgagccgaggtcgtgctagggcactccagcgtgggcgacagagcgagactctgtcttaataaacgaacgccgtaagcattccgaactgctttgtttcccattggagaaatctgtaaatatgtcatggaaattggaatctttattctgctcctgtccctctgctggcggagtaggattttaccgctggttctacctaggcgtagagctgtgtctgcaaacaaccaggcaagaccgaaaaaagttaatgttcttaaaatatgcaagtggagcccgaaaatagttaaattcttggactaggaaggcatccttaaatgctcaagtctctgggtaagagcgcaccgaggggctgcggccagaagccccaggaaccgaggtggttcaggcggtagccaccgcccacagtccaggtcttctgggccggcacacccctcccaccatctcagccaatcggagctaagggggcggggatcgggccagccggaggcggggcggacgcaggagggggtgtgtctggggaggggcctggcaggtcccagaaggtggcgagtttcgcggccagaggcttacaggtccaggtggagaggccgggctggccagggcttcggcctccggcgtcgggaaatggcggcggggggcaggatggaggacgtgagtgcacggaggcggcgggcggttggccccggaatccgctttttcttgtgccggggcgcacggggcggagactcagaga

SEQ ID NO: 32975 - DNA, 2300 bp, Homo sapien
ctctcttgcctcgctatgcatgttgcccatacagcaatcagtcatctttttttttaaaaaaaactttgtattatgaacttttatttatttatgaattttgagacggagtctcgctctgttgcctgggctggagtgcagtggcccgatctcggctcactgcaacctccgcctcctgggttcgagtgattctcctgcctcagcctcctcagtagctgggattacaggcacccaccaccacacccggctatttttagaagagacgggatttcgccatgttggacaggctggtcttgaactcctgacctcagatgatccgcccgcctcggcctcccaaaaagtgctgggattacaggcgtgagccaccgcgcccggcccattattatcttttaaaacatacacataaacacacataaatgatgaccacccctatgcacccaacacttagcctcaaaaattaacattttgcaaatattcatctattcacttctctgtcctttttttttttttttttgagacggagtttgtttcgctcttgttgaccgggctggagtgcaatggcacgatctcggctcatcgcaacctctgcctccctagttcaagcgattctcctgcctcagcctcccgagtagctggaattacaggcatgcaccaccatgcccggctaattttttgtatttttagtagagacggggtttctccatgttggtcaggcggatctcgaactcccgacctcaggtgatcggcccgcctcggcctcccaaagtgctgggattacaggcgtgagccacggcgcccgacctctgtccttctttttgtgggatattttcaaacaaatcccagaaaagtcatccttttaatgatcagatcaagctactcaccactttctaattgcttctaatctcagtaaaagccaagtcctttatcacggcctgcaaggcctgggtgatctgtgattactcctcgccacacccattcctgccgccgtcctcctgacctcactctgcttcattagagggtctcccaccctcgcggccccagcaagcatcatctggaaagcttgttaaagcacacgctgctgggccccacccccagagtttctggttcagtagggctaaagtgggactggaaaattcgcatctctaacaagttcgcaggtgctactgcttccagcgggcatacttggagaaccaccagctgcactgttctccttcccgttcctcaacaaggcaggcaggatcttgcttagcagtctccacgctgctcttccctctgccctaggcattctttgcattactcaaagcccctgttattccatctctttaactcatgccttttgagaggccttctctgaccactctttctaaaatctctttccctctcctcatcctcatttatgtttcttcatggtaagcatcacttactgtttccgtcaccccgtctagatggacagctccacaagcagaaagacttggttttgctgtcacagccgcagcactaaaaccttgcttagcaggtgctcacttcacttgtccaaggaatggctagcatactgaggagggagagcctgcttcctgcctgggacactggacaggcaaatcacttcttcttgcctcagtgccaccctttgtaaggacactggttggttatgcctacccttcccatctccctgggtacaggcacaaatgaaaagaataacgtgtacacgcccgcgaagcagagcagcaagtggataccgagcattattacgccgtgcgttcggccgccctttttctgcacggagaaccccctccgctcccattttccagcgcccccgtcccggcgatccagagacccgctgtgggcggccgccgcccgcgtcccggcctgcgggccagcgtctgggcacgcccgccccgcacccggctggcgcccgcccgcccgcctccagaagcagaagcggcagcggcagcggcagcagcagcagcaggaggaaggggaggcgccgagggaggggtactcggccgccgcgggaggccgcatcgcagtcccgtcacagcgtcggcgccggccggggccgaacccggaagtggccgagcccgcgcgcccgccggtcccgtcgccgccgccccgcactcgggcgagcgcgggagccgcgcagtagacggagcgcgcccggccgagcgggccatggccgcgggggccgccgccgcaggtggtggcgcgcggtgaggagagcgcggcgccccctccggggcggatggaacgcggctcggcgggcgggcagtgccggcgtccgcggctggaatggtgctggctgtgtt

SEQ ID NO: 32976 - DNA, 2300 bp, Homo sapien
ggataagcgcgccgctgcggcgcgtgtcgccggccgcgggcgcagctctggggacagccgccggggccggcgggaggtgggagatgcggggcgtgacgaggcgctgtgcccgcagtcctgagcggacgcggacggaaactcagcctggccaggcggtgacttaaaacgctgcccaggatttctggggaagggtcttccccatctcgggcggatagaagattcggggtggggctgtgcatgggtgaccctgcaggtcctgtgtgtacctccctgaaatgcatgggcacctggtgccgagtttgcctacccctttataagagatcaggctaggatgcactgagtccgttgaaaaaaggaaactggaaagtaccagtcacccgctgtctaaatgaattgatcttaggttgcttgattccccgaatttctaacaaaattaatatctgaggagcttttgcatcactctaaatgagcggcggccgttcagggcatgtgacctcttttacctggcactgcagaacgttttatccagaaatcagcatcttctgtttcgttcgtacctcgggcaaattagtagcgtatcgacctgccaggcacaggtgtcttttttctttggtacccaagtacattcaagatcactggcaacagaattactttctagaaataatagctgaaacattatgtagaagacattattgcattattcagaacaagggttttttttttaaattttagtttttagttttaaaaacatcttggtaaaagtgaactgtaaatacccaggagtttcgaaaatttcaattttggttccctcttctcttaggaaggaacaagagtcctttgaatctgacttttcaaatcgcagacaaacctcatcctgaagaatggtttaccttttcatgagagcttattcatggaggcttgtcgttctccggtcaaatttggcaagcttcactccatgccgattgtaccgcaccagtctcttgtggttatttggcagaattccagccaaaataaggatacttggcttgggttgaataattttttgatgttcagcccttttaggagagctaatgggattctggaacgacagtttctaaaagtgcgtttcagaatttttagcttgagtggaacaggtcgtggaaatctagggggtagataagactcttgaattggccttcctgggctgacagaagcaggggcttagtcacctctcgatagctgtggctttgagggctctgagatttggtcatgttcttcagcaggctggaggaaggcacctgaacccctaggaaatatgatggtggatggttcacatcagcagcatgagcacacgggggtctgcccaggctcagaagcacttaaagcaggatatgctagctgtatttagccaacatatggtatataatatgtaacatgtaggtatgctatctgtagtaaacctgccttctacataagttcctgcagttcgtttttacttttggaacagagggagctaaaggaaagaacaagggaatacttagaatgcaggtgaaaagaagggtgtgggaaagcagcctctggagggagggagggaatagagacacagatgatttaaattgaaataataaaaaatagaattgatgtatgcattgaaacattgataaactgactctagggtagatcagctaatcataattttgatgaccagcgccatttttggcattgagattccatcaatagtgctggaacaatgagaggctgagatataatggaaaacttggaatgccagcatggatgaaagaattgttaaaactcctttcaatcaggggtggctaaagttggtgagactttttcattgtttctgtctatttaattataaatacaagtaggtttttattttcatttggttctgtccaggattaaacctaattcaagaactcgttatggtgttatttgccattctgtggatcagaaatagtttttttccttgccaccccttggcctgtttgcctccactcccattaacatccctccaccatggatcccgtgtgccggatttgagacttgcaggcagtgtctttaggaaggaactttaccgggcctcactgccagagctgggctagaacagaggccagtggaaactattaggaagactcagcttttcatgaagttagatttttagcctgagctttaagtcaaagaaagatgacctggacttaaagtgccttatggtatggttggaagcacggccccagattctctttgtgtaagtgtctgtttattaattcattcaatgtgcaaatatttgaatgcctgtctct

SEQ ID NO: 32977 - DNA, 2300 bp, Homo sapien
attcctttactaagctacatcttttagttacacatctttcaggtttgatcagaagcaaatgtaacacagtctcaatatcacccagacccagaatgcaacagaatctaaatgccacatatactcaagtatgcaaaaaacaataagcacaaatatatagtccaacgacaatttttaattatatgagaattaaaaaggatgaaagttggaggcaaggaatagaaaaagcacaaaagatcaaaagctaatttcaaggagtccatcctgaaggaaccaggaatggtgggtacagatgcctgacctccctccaagacaatgtgccaacaggccagtggagaacaaggtgggatctgagaacaatgtaaatttggatgttaaaagagaacacaagcaaaagcaccacgcacagtgccaggcagagacaggcattcaaatatttgcacattgaatgaattaataaacagacacttacacaaagagaatctggggccgtgcttccaaccataccataaggcactttaagtccaggtcatctttctttgacttaaagctcaggctaaaaatctaacttcatgaaaagctgagtcttcctaatagtttccactggcctctgttctagcccagctctggcagtgaggcccggtaaagttccttcctaaagacactgcctgcaagtctcaaatccggcacacgggatccatggtggagggatgttaatgggagtggaggcaaacaggccaaggggtggcaaggaaaaaaactatttctgatccacagaatggcaaataacaccataacgagttcttgaattaggtttaatcctggacagaaccaaatgaaaataaaaacctacttgtatttataattaaatagacagaaacaatgaaaaagtctcaccaactttagccacccctgattgaaaggagttttaacaattctttcatccatgctggcattccaagttttccattatatctcagcctctcattgttccagcactattgatggaatctcaatgccaaaaatggcgctggtcatcaaaattatgattagctgatctaccctagagtcagtttatcaatgtttcaatgcatacatcaattctattttttattatttcaatttaaatcatctgtgtctctattccctccctccctccagaggctgctttcccacacccttcttttcacctgcattctaagtattcccttgttctttcctttagctccctctgttccaaaagtaaaaacgaactgcaggaacttatgtagaaggcaggtttactacagatagcatacctacatgttacatattatataccatatgttggctaaatacagctagcatatcctgctttaagtgcttctgagcctgggcagacccccgtgtgctcatgctgctgatgtgaaccatccaccatcatatttcctaggggttcaggtgccttcctccagcctgctgaagaacatgaccaaatctcagagccctcaaagccacagctatcgagaggtgactaagcccctgcttctgtcagcccaggaaggccaattcaagagtcttatctaccccctagatttccacgacctgttccactcaagctaaaaattctgaaacgcacttttagaaactgtcgttccagaatcccattagctctcctaaaagggctgaacatcaaaaaattattcaacccaagccaagtatccttattttggctggaattctgccaaataaccacaagagactggtgcggtacaatcggcatggagtgaagcttgccaaatttgaccggagaacgacaagcctccatgaataagctctcatgaaaaggtaaaccattcttcaggatgaggtttgtctgcgatttgaaaagtcagattcaaaggactcttgttccttcctaagagaagagggaaccaaaattgaaattttcgaaactcctgggtatttacagttcacttttaccaagatgtttttaaaactaaaaactaaaatttaaaaaaaaaacccttgttctgaataatgcaataatgtcttctacataatgtttcagctattatttctagaaagtaattctgttgccagtgatcttgaatgtacttgggtaccaaagaaaaaagacacctgtgcctggcaggtcgatacgctactaatttgcccgaggtacgaacgaaacagaagatgctgatttctggataaaacgttctgcagtgccaggtaaaagaggtcacatgccctgaacggccgccgctcatttagagtgatgcaaaagctcctcagatattaattttgttagaaattcgggg

SEQ ID NO: 32978 - DNA, 2300 bp, Homo sapien
accattaatacagtcatgggcacattttttatttttcttactgtttttgtaaattaatataaaaatattcaaaacagtatataattgaaattgaatttattggaagcagatacagttctctggggagaaaaataatcttaaaaatgacaaatatttgaactagcaaaatgcatcttatagcaataccttaaaaactataatattaaaaactgtttggcagagaactaattatttttcagtcatacatgtaaattaaagtcccacttggttttgcctaaggtaagtcacgcttaactgagtactggctgtttggctttgtgctcatgtggccccaggccctgaagggctttgcatattattggggctctgtaggtgaatcagttatggcctttgtctcaagtccaagtgggaatcaccagaatgtcttaacttttggcacaaaagaggcttcagtttatacagactatcagtttataccccaactattcacaggatccagcaagaataggatagagaaaggtgccttatatgtggctgaagacttatttttctgtattccttgaccttcctttttcctcctttctgtaagcaggggaaaaacatttgccgtagcaccagacatacaactcagtcccctttcatcctgctatgtaggtataggtacatctttctcattaactctcctacttcccttgtcatacaaagagatgtttttcttcctgggaagtagcagggtagttttttgggatattttagctctgagatgaacagcttctttctgagatcttgtcaaagataatctccagggaagcacgcagttttgtacaccactattgttatttctcttctcccagggttttgtttacaaaggaattttgtgtaattatgatttcccatagacttttctgatagtttatggtcgctgacagtgcattgtatcagaaaaagaagtgagctttcaagaaatcttgaggctatgttatggtttaataagagatgctgggttaaagtgaaggtgatgaatagtggcacgttctcatgcttcttttacctttgaaacttagtgaattctagagccaaatcttttttgcccatggccctcagcattattcttggactgtccttttagtttttaattgaatccctccccacccgcattcaattgcttgtgtctccatgtatcatagttcacttatgttgtcacacctcggtgcttaaacttgcctcctactctccccaagtctccttggcttagggaccatcccttctctttcctccttccctatttcttttccacaagtgggtattaggaagaaagtcttttactgttttctttgcaggcagttttgtagaaggatacctggttttagtaataaagctggtatggaaatgacttcagcgtgaagttgctgcagttgacaaacaggaactgaatctgagctagaagatctctgtaacaagctttgttgttgactaactctttgttattattgtgatccctgttatgccttgcattctctaagcatcataagtaatttgttttctcgttgtctctggcatgagggttgtgacctctcactgagggtggagcctctgtgtctggtgcaggctatgcatgccccggcaggcatttgtgtgtttgttgaaggagtaatgctaaccaggtgggtccttttcagcagctgttcattgctattagccaaaggcagtaacatcgttactcttctagtcatgactggaaatccataaagacaacaagtgcccaaaagcagggacagcctcagctactgatcctatagccacaagaatagttcatgcagctggacatatggcacgttcattgttgtgatatgattttcaggtgcaagtgggtaacaaaagtacattttatgatttgctcaggtgagcttttggaagaggaaggggggagtattttcggcctgcaaaaagtggctgattatgctgcctgttgaatacagtgagtggcaagaagatgtatcaatctacattggcattggaacttccacagcagtgtcttgctgtaacatcactcttattcctttgtgttttaggtgagatgagtgagagccgagcaaagagagttagaataaaagaggtagatggctggaccctgaggatgctaattgattatgtttacactgcagaaattcaggttacagaagaaaatgtacaggtaagagtaaacacttcacaccatctagctttttatgcatacagtttttttaataaaaaaagcacacccacacagtatacaatttgcaccaaaataataggattca

SEQ ID NO: 32979 - DNA, 2300 bp, Homo sapien
tgtatgtggaatatacattccattccttctataatgaacatatatgctcattactctctaaagcaattgaacttttctgtttccctctaggaaataaaataagctaatcatgaaatgaaagacagtccctagaatttgccataccaggtcaagagagagcatcagggctgggcacggtggctcacgcctgtaatcctagcactttgggaggctgaggcgggtggatcacgaggtcaggagatcgagaccatcctggctaacacagtgaacccctatctctactaaaaatacaaaaaattagccaggcgaggtggcaggcacctgtagtcccagctactagggaggctgaggcaggagaatggcgtgaacccgggaggcagtgctcacagtgagccgagatcgcaccactgcactccagcctgggtgacagagcgagactccatctcaataaaaaatgaaaaaaaaaaaaagagagagagagagagcatcaggttaggaccctcatcccaaataagtgtaataaaatcaacaatataagtctcaagtgttatttgttctgttttgtatcctgtaataaggtacaaagtaccctttgtatttgatttctaaacaccaagcacctttttgaacaaaattaaaatgccatgatgggtctccacaattcctctatactcaatgcaaagtcccatttgaatagtgagggcaaaagtatgaataacaatagtctctgagatccacaagcagctcatccctaacagacaaagtgtttttgggaaaacagaaatatctctggtcttcattttcctaattaataaaatgaaagtgttagactagataactgctaagatttcctataacattaatactctgtgattctttgactttcaacactattaatctttaggagaaaaaaaccatgtatgtctccagaagttctattaacataaggcagttttaatgaaacctgaaaacagttaactcatgtaagctagaaaaaattcctgtcaacaaggcatagcagagactgcatgtagtttactaaggaataaagaggaccataatgaatgcatgaatatacaaataattaactcttttaagaagcatcatttgagttggcatgacttcagctaaaaagtgctgtgtatcaagtgctttcacagttctccaaaggaagaatcttctgtatcagtaaattaacactgcaatagacccttgaataatcagcatctattctttggcatgcatatcccatggctaaggctagcaatacgattattaaaaccactcactcaacacaatttctttcaagagggtggcattcaaatcatgagcttattctaaccgatgtttattccaagcagtgattcctagcctaaattacagaaaggtgggcaaatgattgaagaaattttctgtagaagaaactgttataaaaactggtcttacagagaataatgcatattccaaatatacttaattagggtgtgagtttattgttactggactataaagttagattataagcaagggttaaattgtactgagcctattatctatcacccacaacagtgtgggcaatgccaggcacataaagaggatagctttgaaatgactgactactgggtctaggctgaacggccaagagttggctggaagaacaagggccaaagagcacagatttatgaagaaatacaagagaatgagaaggcacacatctagtccgaaccaaggtagggaccccagagttctaaataccagaaaggtccaacagaccctggaactgcagtctaaggtgatgaatgggtttgtggggggaagatgatagtcacagggagctatgaaggagtctcacgtgagccaacagtatagattctgaaggcgtttatggcaggagaaacaaaatacgcagggaaagataatctcagtgttaaagacagatgtatgcctggaggccaagacagaaaatgagctgcagagagaacgcagtagcctgctagccagccagtaaagaagtgaggctagttcagcggactcgcgcggcctcgctctttggactcgtcaccctcccctccccctcccgccgccgtcacccaggaaaccggccgcaaacgcgggcggacctgaagctggtttcatggcagcctcaaagaaggcagttttggggccattggtgggggcagtggaccaaggcaccagttccacgcgctttttggttttcaattcaagaacagctgaactacttagtcatcatcaagtggaaataaaacaagagttcccaagagaaggatgggtggaacagg

SEQ ID NO: 32980 - DNA, 2300 bp, Homo sapien
taggggattttatacccgtttcaaccagttacttgactagctgttgcctagaaagggggtatacccgtggggagaggtgcttctctttggcagtactcagcagctggaggaatgcctgcttaggtcttgaagagggggatctgggtggtgtgccacagcatccactacaggaccaacagattcatatgcccactgcacagtatacactgagacagcagggtttgcagaagagaaagagtttagtgatggcagggtgccgagaggagatgggaggaaaccctcaaattcatctctctgaggagttctgtgctggggcttttaaggggatcctggagggcaatgggctggaaaattagggtcctcgattggctggggtaaggaggaatgaaaccatcaggatgtgggaactgcattctttggtgagtcagctccttgtcagaccagctgagtcagtagtttcatcagtacgaaggacctgaaaggttatctcaaagcacaaacttaacgtttcataatgttcaagttgttgtctatagagcagttaggggaaactataaccttgtaacagagtctacatgattctgaagcaataggcaaacaattatgaggaaggggtcagacagcaagctgacctaattattaatcctcagtgtgctgcaagcttggtttaatttcgttccccccacccctttttcccagattaacttcataaagtatataggcatggtttcagacaccactgtaaaggcatcctaaagacagggctgactctgacaaccaagggacagatcccatttcttttcatttgacgtgaccgctgtcatgatactttacaaagaatgtgtgtgccaaacatgagggatagacgaataagtacaggtcacactgaatctaaaaaagacacttttcaagagggaacttcctcaaggagatagtacctgaattgatggggcggcatggagatggctgattattccaggcagaagggccagtttgagcaaaagcatggaggaatgaaacaatagtattctgttttcagaagctgtatatatttgacacaatatacacataatcaaaacatgtgtacgccgtaaacacaatttttgtcaattataccttaataaagaaggaggaaaaagggccttcactagcccaaatgatgcccctgtgcggttttttctttaaaggcacctcttccgttaagtgaaagttttagtatattatcacatctgtacagttttattattaaaccccagtacacaatattttaatgttgagagatggtgtaaactgagctttagagctgcaaagacctgcgtcaagcccccgcccccgcccccgcccccgggcactcatcgtccagcacaacaattgcaacaacacctgggcgttctctgcccatgtagcgaggtcaaggtcctgggagccgaactctcccttgatgttcaatctttttaaatctttcccagcctttatttctcatctgcaaaatgacgataatcgcatttgaaattctccgttttcaaaatgcaggaatttattaaaggatacgtaggctggggaaacaagggagacgaaagatctaaatctaaatggtagaccagaaaaaggaaggcaagggtgtctggaaacacaaaacagtcaacatagattttaagactcatctatactctcttcttcccgggtttgggaactgcggttgctacacaggtcacatttgaaataaaagtcctgggacggcggccggcgcgacactctcccccgcacagcgcaggctctcactgggaatctgccgggaccgcagttgccaaggcgactccgcgctgcagggcgaggcggccatccgtctgtgcccgccccctcacgccgtggcgcgctctcacgcttccccgcctccgggcgctccgcggtgccgaccattggctggctctgcaggtctcactatcctcactccatccgcggagccaatggctgggaccgccaggagctcgttcgcgcgagtcacacgatgtcggcaactgcacagaccaatcaccgcgccgagaaggcggggcgggagctctcgcaggccaataacgacaggacgggccgcctggcccacccggctccacccccaagccaggcgaggcaggttccgaggttggaacacctggcgagtcctcggtgtcggtggccggcagtcatctcgcggccgttcaggtgagggggttggaggagtggctcatgagcgaggaagggggagcaggcgggctcccacccggtgctccgtgagatcgaggggagcgggttctgggtgcgga

SEQ ID NO: 32981 - DNA, 2300 bp, Homo sapien
tgagccataattgtgccactgcactccagcttgggtgacagagtgagaccctgtctcaaaaaaaaagaaaaaaaaaaagaaaagacgtgaatgtgtttttagacctgaaggaatggattccatgaagggagaaggatgaaagatgggaaaggataagtgatggacaagttcttgaggtaagataagaacacaggaagactagtcagtcttagaggaaagaatgaatgagcaaagaaattttaaggcctgtaatgacacaggatggaacactatagtcactgtggtgtaagtcatttgagatgagtaggacagaaggaggacggcctgaagtgaattcagatgcctggaggagttggctaggttctcaatattccttctgtagaatgggataaaaggtcagtttgagaagtgttggggaaggggacttttaaagcactatttagaatgcttctgaggctttaaaatactcatttttaaaatggtccaaaaaattcataaattagaagcagcagtggtgaacatttttaggaaagtgacccttgagaagtttattttttggttagtgacctattgagcttatttattaggtaagtagaacatgctcatttaaaaagtttaaattgtgcaaaagacatatgtcagatttttttttctgtcttccataacactatttcctaccccgccgcgctctgtcttccgtaacactctcccctaccccgtcgccactctgtcttccataacactgtcccctactccaccacactgtctcctaccccgccgagctgtcttccataacactctcccctaccccgccacgctgtcttcattaacactatctcctgccctgccacacaactctgttttcctagaagtcaccagtgtgaatttttccctttatccatatgtacattttttgtttctgtgtgtctgtgtatatacatatgcataaaagtgcatagataaaatacatatccttttcaaaaaatcttaagtggggctcttgctatgcatactgttctgtaacttgttacttggattaacactgtatcttagacatctttctatgtagagcgtatagatcttccctgttcttttaaatggctgtataattgtctatggaaggacttaatttatttaacccataccttgttgatggcttatttgtgttttgcttttattttttcctctttgtttttgctgctacaagcaatgcttccttccatcttagcggatctgtctttgtacccttgaatgagaaagttgctggatcaaaggatgtattcattttgaattaggtgttgctaatttttcctccaatgatacactgatgtatcccccctgcccacagtgtgtggtcatgcctgttctctcaccctcttaccagtactggacattaataagcttttaaagatttgctactcaggctaaaagtgtctctttgttttagggtgcatttcctcatttaatgaagtgaagattcttccttgtttagtgaccatttgcctttatttttctgtgaactgcttgtgaatggcatttgtcgttcttctgttgtctttttagtcttttttctaaagcacactttgtagccctttgttgtaaaatgttggaaatatttttcccagtttgtcatttaatctttgactttgtctttctattccccagtaggaggtacttaatttttatatactcatatttggcaggctttttctttataggttcttttggctttaagtgatacttttaaacccagctattgctcatttaaattagaaccttttccatgagaaccacactgacgatttctttaaatatagcttgaaaaaatttttcccctattgttcttttagctattgttcttgaaaataatgtgttttttaaaggaatatctacaaatagaaatggtgatgatatccagcaaatgttttaaaatggtgtaaaaccatttgtactcctttagtaattttttggtaaaaaatttatactcctttagtaattatcatttttaaaatgatcagaggatgcattttttaactgttttattttttgaaagctcattgtttaacttattatatatgtattcatttctacagaattataaggctgtctgcagagatttgaaaaatggcaacaaatgaaagtgtcagcatctttagttcagcatccttggctgtggaatatgtagattcacttttacctgagaatcctctgcaagaaccatttaaaaatgcttggaactatatgttgaataattatacaaagttccagattgcaacatggggatcccttatagttcatga

SEQ ID NO: 32982 - DNA, 2300 bp, Homo sapien
aatttccagaatcatagcattttaggtctgaaagagacagtgggaaacctacagtacattatttctcaaaatgtctttgtcaatcaaacatcaacatcagaaatgactggtcttctttttaaaacctagaagcttgttaatacctgaaacccaccccagacctgatgaattcataggggcttaagaatctgcacattctataaactctctacatgattctgttgcaagcaaacgttagagagtgaaaaatccaaaccttttattttatagattagggaaacaaacaactaagctgtaaaagagaaccccctgcccaacaagtgagaccacatagtaggcatgattttacacattacaatttttttttctccaaaataaaattttttaaatccagcaatcagggtggatatataatcttttgtataattgcctatgaagccacaaacaagtaatacatatgccagtaaagttggtacagctgacctacacctaaaaatagcccagaaattcaaagaccaagttttcattccaaaattttttattttggagaaaatagaacgcatatcctttgttcaaagagacagctaaggaacaacacaggacttcaatgaaaaatatgttgtttatgtgtgtagttactagtcagtatgccccacctagccacaaattagtgtggttactctaaattgctaacatgaaaatcttaacctcctacttctgaagttatttggttttagctactcaatttttttttctaggcttccaaggttgctgttttgggcatggttttagaaatataattataagtttgatttcaaacttctggaccatgtaatcaagcacagactggtcatagtggaaaatatacaatttttagctctgcctacattgacaaaaaaaaaaatggctggatccacatcaattcaacttgagtgccatgtgtttacagtgacagtttctccccgaaaacgcaaaaaaaaaaaaaaaaaaaaaaagaagatccatgctgctgtagtatatgtacataggggtgtttaaagccagcccctccagcagcaccttaccaaccatgtctgtgcttttatttattgatccaataagatgacttaaatatctaactccttttccacgtaaaagtttttattatgtgcaatgcattgttaaacaggtgaagaatgaacaagtttagaaaaacaaagaagcttaacatggaaaattacccgcatggtgtccacttttcctgctcggttgcaatacccaatggattatttattaatttagatttgtgctgtccctgaatccaaacagcagcctctttagagtaacatctgctccagacattgctccaggaatataaatcccgactaaggggtggatatttaaagctgtaaatgattttttatttttacaatagctttgcaaaaggaacggaggtgtcatgtcatcatcagagttttcttaacaggatttaatcttaatgccaaactaaatcctttgtctaaagcatcagcagagttgtacttattttccccatagtattaaagaggagggctggtgcaggcacagccatatgacattgccttatttattttgtctgtttgttttctggaagaatctaggaatgtgcataaatacaattaaggacagtatctacaaattggaagaaagcatttctattctcttaaacctctaaatcaaagcacttaatgttctgatttccagcaagaccttctaataaatgaaaacccaacccttgggtttgtgttttgactcttgatacaattatgaaagacgcatcaggagatggcaagtggctgccagtacttccttttttctggaatattctctaattcttggtggatcaagatggaaactggtaggcttggaatagatgtccctttaaaaggctccactaacaatacaagaatattttttccatacgcagtgacgtgggtgggtcatgggtgtctcaatgacagtaacgttcccgaaccccggaccttagctgtcatttcacctgcgtcgtcccggacgccatttggctgttgacgtggttccgagccagcaaataacgccagcagccctcccagatccacgccggcccgtctctccgccggccccctcctcgcagtggtttctcctgcagctcccctgggctccgcggccagtagtgcagcccgtggagccgcggctttgcccgtctcctctgggtggccccagtgcgcgggctgacactcattcagccggggaaggtgaggcgagtagaggctggtgcggaacttgccgcccccagcagcgcc

SEQ ID NO: 32983 - DNA, 2300 bp, Homo sapien
agtcggacattgcagtgagctgaaatcgcaccctgggctgggtgacagagcaagactctaactaaaaaataaaaataaaaatgtaagtgcaaggccttttggaatttggcaaagaataaaatctagaattctgtaatgtgaatgggtggcttaatcatcttaaataaggtcaattttgctaagaggacctaggtttttttagatgagttcattattttgaatagttgacaaatattaatccaaaaccacaaattcctttgtgtttaatttcaggagctcagggaagtagaaatagtatttgttggtaatcggctatatttccataaatatgagtcagagaacaaataatcttataaaaccaaactaaaaggtagaggtggtgaaaggactggagtaatatagagaagataaaggagatgacaggctacacaaggctctgtgagtttctgagatccaacttcttttatttctttgctcaacaaatacttgttaatcatgttatgatgtaacggtcactgtgcagggttttaaagattcggagaaaaagtagagaaatgtggccctgctctcatgaagcttcagtctaaagaggagagcagatattaaacaaataattacacaattaagactgaatatgttagcacgtggagaagtagagcgtgaaaaaggcaatccctacattcagtttcacaacctttctacgtaatggtgagagtgagttcctcatgtacattatctgagattgtaatttttttttaaaggaagttaccaaccccatcagtgttttacacttatggtaactatatacatcatcattcaaaccagttcactggtgttaatcattatgccagataatggcacaaaacaggaccaaaactcactctttttaaaggggcaatgaggagaggactcaaagcaaataaaataatgacagagacaacgatacatttgttcaggaagtaaacagtatttttcctatgatgaggtaaataaatcaaggaggaaaggaaagaactatttagagaagtccagtagaatgtaattaagactaatagcatgaacctaaacagaggaaaaattgagctaagtaaagtaccagcaacaattttctaacagctaagacagattataaaaatcctctcaagggaaggcacttcagctaatgtgaactgaaatattaaaaattaaaatggagaacatccatgatacatatactagaagaactacgccttcaccattaaaagataattgaacaaagacattttttctagctctaattcttaatattcttgaaaactttcaaagttttcattttttttttcttaaggcaaaaagcccttctttgtgactgtagtatctaatctcacttgaggtacttaaaatcccaagaccaaacattggcacagctcagatcatatcctggttttaatctgttcacttagtttctgtcttaaaaacaacaacaacaacaacaacaacaaagtccatggctgaaaggtccaagagttctttcctaaaagtttcatttacaaaagacgcaatttaaatgaacgtcttcattgggcaccacagagggccaatccaagataccctatctccaagtgtctactttaaaaaggcaagggaaactggctctgtctgggataggaaagtgggcaaggcagaattctagtttctataaatattatatgattcttttaatttggaaagaatcaaaattcatttggcctaaaatatttggatacgtgtctcaattactctgttagtgtaagcccgacctcctctctgctagcagaaagaattggcagacaaaatacatgctggtgactcagtgtgaggtgttctctcctccttggggggacgaagcgggagcagagaacactgaagccagaggcactgacttaaaatggagcatctgatccttaaagatcccctggtatttgttgtcagagatgtcagctggatttcagttcagataattacattttgcttgtctaatgcccctagcaatttccagtgggatcttcatttcccatcagaaattgctctgcatgtgatgctgtgcttcattaaacaactgccgtgtgctagctcacaggtggtgtttgtttcagtggtcactgaagtaatctctccgcaggcccatgccagccatactgcccagacttgaattctctccagagaagtttctcatccaagatccccagtaaagaaagtaagtcaatctttaagaaaggggagtttagaaatgaatgactacagagcgggtttcaagagggtgtgttttaagaggctgaatt

SEQ ID NO: 32984 - DNA, 2300 bp, Homo sapien
tgtgcagtcataagagttgaatgatcaggatacagcacacccccatcacaccaaaagcttcttgaagcctttttgcagataatcccctttccaccctcaacgtgggaaccatttctgccactatggaatggactcatgcactgtggatttctttcagtctggcttcttacactcagtacaatttggagattcattcatcctgttgcatgtatagtagtaattttttttattgttgagtagtacttcgttacgtggtatttcacaatttatcatttacctaagaacatttcagctgtttccaggttgagtaagtttgctataagcattcatgtataaatcttgttgtgagtatatgttttcatattttcttgagcaaatacctagaagtgagctactgggtccatttttaaaaatacatatttaactataagaaattgcctaacctgttttccaaagtggcttactattttacaccccactaatagtgtatgagagtactatttgctgtgtgtattcaatacagatgatgctgtcaagtttttacaagtttagctagtctagtagatatgtagtagtatcttgtggtggttttaatttgcatttccctgatggctaatgaagttcagcatctgtttctaatcttattagctatttgtatgtctttttgtgaggtatttgttcaaatattttcctcttttttttgcctttttattgttgaattatgagatttctttctatattctaaattcaatgcctttatcaaatatacgtattgtgaattattttttctatgacttgacttttcattttcttagtagtgccttttgtagagccaaactttttacttttaattaagtccaactaaaaaaatttttatatggtttgtgctttcattgtcctaagaaatcttggcttattctaatgcatcaaagattttcttcaattataattgtttaaaaatgaaacctactctctcataaaatattcagctctttttgtttctttctttattgagagacaagttaggccaagtaaatgttaaattccttcttaactagcattttaaaaattagttcctgagattttctattagaaagctgtactgccatttttccaaattttattatttatctgaggttgatattcctagttctcaatgaacatacactatactagaaaaaaaaaatggaagtatagttagggggcaaatgtgttaagtgcctacaaaccaatatagccttatttccaaagctgttctgggcatgggaagattactcctgattgggcaagaaaggcgttatgacaaaggcagccctcaagctgggctatgaatgatggtagaattttgatagacaagaatgaagagaaggcataccacatagcatgtcacaaacaggagaaaagaggcaaatttttaaaatatagtgtgtcaggcaatagtgggctgtgccgtttggctggagatcacttccattttagggctaatgagacctagccctaggaaaagatctggaggaagggtggaaggagagttcgtattgtattaagtgctgactagattttttttctgatacggccacccattgatttcaagtaggaaaagagtagagtcacagaggtgctctagaaaggttattcatgaagccttgatcaaagtggttcaaggggcaaagatattagctcaagagactccaattaagactcttctggatggcatcagacttcactgtcaagtattgaatttctccttttattttattttatgtgtgcatgttttatctctccttcatgattgtgagtcctttttttatttttattaatttttatttttatttatttttttttttttgagacagagtctcgccctgccgcgcaggctggagtgcagtggcgtgatctcagctcactgcaagctccgcctccctggttcatgccattctcatgcgtcagcctcccgagtagctgggactacaggcgcctgccactaggcccggctaattttttttgtatttttagtagagacagggtttcactgtgttagccaggatgttcttgatctcctgacctcgtgatccgcccgcctcggcctcccaaagtgctgggattacaggcgtgagccaccgcgcccggccgattgtgagtcttttataaaggtaggtgttgggtcttattcctcttctcatagtctccagcctctagtgtaaaccacacagcaatgttgattggtacacatgccatccaaagagaatgtatgaggaggcagagggagagaacagaaattgcaagttccagggacttta

SEQ ID NO: 32985 - DNA, 2300 bp, Homo sapien
aaaaaaatgaagtttcttattacaacctagagttagatttaatatttaaaaataaatcagggattaagcctgggtattgtgatgtaggtattctctgcaagtatattagctgtaaagaaacattcctgtattttgacttgaagttctactatgaaaatcattctaactctctggactacaaattcataaaattataaaaccaaataatgaaacacatgttaaaagtaataggtgtcattatacataatgaagctattatccctatacagtactttttttcccagaacaaatgaataaaacatatttattcctgcaaagtaagtgatgtttaggcaaaccacaggtaaaacttcttgcaaatttacacatgataaaatagtctaaggagatgtttgcaggcatttagattaacaagggacatttttaaggtttgggatagggaatgggaacactgtcagcagctcaagagcaggaatcctctagatgacatatgcattctctaggctttcagatgggctaagcaggacatattcttgttgagctctgcactagggcaacactattattaattatgcaaacttttttttttttggatgggtaagagaatttgagaatgactcagcaagagatttcaaaatcaaacgcctctacctgcttattgaacatgttctttttaaaaatctacttctgctctgtatcctgggcattaaaagcttaagatctatggaagggaagctccatcattgcagtggcctctgagaaagacccagttttgcaaagaacacttggtcagttcagttccacctagccttcctatacttttagtttaagttgaaaatacttggtactttttcaagattggcttcttacttttctctaacaaacatgaataaaacctagtaaaatctccaaaccaaagatgactttatctgtcaaagttgtgtgtgtgtgtgtgtgtgtgtgtgtgtgtgtgtgtgtgtgtttaccttcatacattcctctagatgataacttggatagggggaacactagtcaaataatatgtaaggctttttttttttttacaagtccttgctaaagtgacagttttaaagatttagttggaaaaggaaagctcccaatcaccagtcccttggaagcttgttgggggagaagtcatctcacctattttggaaactacttgcagatgtggggaaacctcggaattgctcacaacaggggttttacagagatttcctctgatttttttcctccccaatttcccacaacctgtgtttgtcttgagtctgctcggctgacatgtggtttacctcgctgaccctcctgccaggttttacaccctctcctctgaagaagtaaaacattactgaagccgaaggatactgagcaactctgctcatgggcgccagaactgtcacagaaaatttgcttcccgagtattccatccagcttcccttcctgcgcccacgtgagccatagcgccagcccatcggcaaggtctcagcgtttcctgctgctgcaatctgtaactcgattttggattttttttttaattgcagttctgaggatcttagttcttagcaaaactttgttggttaggagaccaacagtagtctgtttattttcttaccaaaatcgtgaagactcgcacacttttcctccattcctgcgctgctctaaggttaaacagcagcaaaggaaagaaatacacactcgctgtttatttggggggaggggaaatatggatttgcagctaagttatcacgatccttcgctccacccccggtctggcactctcaactgacacgtacatcatctattaattgctgtttgcgtacacagatacataatatattcatttttatctttggtaaaatataaatggaattgtcagcgcgctcctgtctgtttgtttgtctaaggctatcaaaagaagtcaagagaggaggctgtggtccggatcctgaccctgattgtatgaataagtaagcaggatgcaagtgattgggttagatggtgcgaatatttttttttttcaagttaggaagagggtaaaaagacaggctggcggggggaaggcaaacagtgcatccccaaatcctcacacttttgctctcttgcagtcagttgctttgctggcttctgcaggcttttaaggtctcgcggcgtagaaatgcctggcccccacccccttcctcggtctcccctttcaattcagatgtgctgatgtgcagaccggattcatcttctcggagctgcggcggcggctttgggctcaggcggcggcggctcgcgctcgg

SEQ ID NO: 32986 - DNA, 2300 bp, Homo sapien
tgcagtatgggaagctgccagtgaaagctagatgtgaaaacatgctctgaacattggagagtcagccacaaaatagacgtatttgggggggaaatgctgtataaacataaatatatgtgcttccataaatctaaaggtgaccatgttggccttagatggtgccagttattgagctaaaatgtatagcagatgctgaaggggatgagtgttagagcattattcctcatcaagtattttgtagctaataacaactatctttttaaaaggtaagttacaaaggttagaaggtcatttttacttttagaattactgacttctgccaagtatcagtttcttgtaagaaacaatttctgtgctttccctattagacttaaatttagaaataatgaggttttaaaacatgatgagatattcttattaataataaagtatttcttcaaattttgaggaagagagctaaggatgagagtgtgggaggtcaaaggaccaggggtcaggaaaaggtgatagtggagaatggaccacctactattgtcttaataaatttactaaacaagaatttaaatatgtaaactacatggtaataaccctctgtgaacaggcaaaaataaatatctttgaagaattagcacacatctatattcttaaagttttctgacatttgttcgtgtcaatcagggctcccatgaattgcagtagtatgttccgtgtttttctccactaattgcattcatcactgtagaaatggggggaattgagaaaaacatctttttctgagttaaaaatagtaatagaaatttctttcctatataaatattacacttatatttcctaccatacatattatacatttattttgaaatattacattaaaaaaggaaattaacattaaacattgagtttggtcgttttgttaatatagattgcaaaatgttagacgagattgatatggaaaatgtgtactgctgctattcgaatagcttctgaagttttggaggctacaagaaatgttcaaaggtcgtagctttgggagatgtagttttggctgaaatctctaataattcaaatagagattcataatgttattgcagtctattggcttgcagacatttcttgatttatgtgtaatattcacttcacctaaattctctaaatatgagagattctctgtatcagattttctctacaaggggctaattactgatttccttccagtttatttagaatatgtagaaacgacatggaaagccaaatattttgtcataaatggaagtttggaatacaaaattggtgttcgggcttcaaaactgtcttattttgcaggagggagacagtaggcttttaaagtttccgattcaggttctacgttctaaaataaagctgccagggagtttttataaagggaaaaatgcagctacagtatgtaggagatataggtgttctcaaacgccctacctcgttatgcttctgtctctcaaaacaaaacacacacacacacacacacacacacacacacacacaaaggaaaagaaaaaaagaaactgcaacctttaacatgaaagtttgctgtcggtagtaatccagaagctcacagcaaactttaaattttctgaaattaaacagatctcccaagaccttgtggatagatggcctttctttagggaggagctgagttcaggagctttacagggtaggaagtccaggtattcttatttattaatgcataaagttttcctcagatcttgtttctcacgtctgcctgacaaccctggaaattgtggagcagaggcaactgcgagagatagtacactttgtgttaaatccaggagcagagaatgagcaggctgtctcgcgaacatgagaacctcttctggaggggagaggttacaaagcagataaggattcctaggctaggagctacctcgtcctctggctccagccaagcgtcctatccggagccaactgtagctgggatccagcgagaggaaggtgggataggaggaggtggaagaggaaaaaaacggaggtcggggagggagggggaacggaggggagtaagctggagatccgcgcgcgaagggagggtggagatggggggagcgcgccgggcgcagggagctgagtggacggctcgagacggcggcgcgtgcagcagctccagaaagcagcgagttggcagagcagggctgcatttccagcaggagctgcgagcacagtgctggctcacaacaaggtgatgtgccaggaagcggttttgtgcccgctcgggctgctgcggctggggcttgcttccttatacc

SEQ ID NO: 32987 - DNA, 2300 bp, Homo sapien
aactaatacagtatttactctttaatgtctttctcctgctcagatttataatatttatttatatcttttgtatagttgaagcatctttatttttattacatataatagtttactttctgagtataccacaatttatgtatccaatcaactcttgatggacatttgatagacatttggaaagcttctagattttgtgttactaattatgctgctattaatattcttatacacttagtgagtggtgtgtgtgtgtgtgtgtacacaatgcatatctactgagtatgtactttataactagaggaggagttactcggtcaaaattatgcatatgtttggttttagcagatagtggcagctttccaaagtggttgtaccatttatattcccactaacattattagagagttctggttgctccatagtctcaccaacgcttgaaattgtcagaggctagtattttagctatttctggtggtgattttaatttatgtatccttgatgacaaataaatgtgagtattttattcagaattggcatttctgagaaaaaaattaaaaaaacaaaaaaataggcattttaaatatatttactgaacagttacatattccattttataaagtgtcctatataaatcattggcctatttttctacaggtatttctttttatctaagatttgtgttacttctctatatattctgagtatgagtctgttaccagatatatgtattgcaaatatcttcccccattctgtggttttcatttcatttactttcttgtgtcttttgaacagacattcttcacaataatgtaagtcaattaaaacagttttctttccttatggtttgcattgttttatattctgttaaaaagtatactccaggtcatgaaattgtcttcccataatgtcttccatggactttatcatttaccttttacatttagaccagcaattcacgcataacttgttttctgaatggtgtgtggaaacagtcaatattgtttttaaaaatgcaaatacctcaaaaaaagtcatttgtgaaaagagtatattttctatattgtgccgtggtgtcacctttatcaatcatctggtgtctgtatatacgtagaactccttttcaaatctatttttttactgatctattttttatctttgtgccaagactatgatgtttaattattattgctttgatagatggcaatatcaatctttcaattttattcttcaagaatgccttgatgtttcctggacatttgcatttttgtataaatgttagaattagcttatcaatttacatacacataaacacactcacattccaactgatattctgattgaaattacattgactctatagagttgatatttttacaacactgagtctttctattaacatattattacatttcttaagatattatttaatttcttgaaataagcagtaaaatttaaattttttaaaataaactgtcttatatattacattttgttagctttattcctagatattttcctgatttttaaaataaactgcttggtacggtaaatataaaaaaattgtcattcaattattttatagtattagattttgtattttgtatttactcaaggtagtgctcagtgaactgctactgtagatttttcttcagttttcatttcttgtttttagaagctcttcttcctttgtggatgtctttggttccttgatattctttttaggattacaaagggttatgaatgctactattctcgttatacagttggagtgcagaattcgctaaatgccatgctgttagaaaatctcttaggtaagcagtttctgtcacagtagtcaccctcaggagtgacaatgatgaagtaaaccacctatatgtgtgtggcaaggtcatgatagataacctttgtgttttctttccccatcaagctgtagcagctgtttgcatagataacagtgaccagtagtaataatacattctagcaaattcctttttaaatattaatgccaggaagtaaataataacatataagtaaaaaatgatgaatgctatgagtaatgcaaaaagtttcatagcaatgaatgttatctgtttgatacctagccctccctgaattatccatcatgaaaacaaggagaataaacacagagtaagacaacatgggagagtagaagagagaaaaccaaataaggaatctcaaatgcagcctctcccttgcctcccaaccattgtgaacacagatctcaatgaacattttggtgaataaggcaagtacatttaattaattttagtcaagcaggc

SEQ ID NO: 32988 - DNA, 2300 bp, Homo sapien
taaaacctatcacacctgtacagttactctgtcaatatattggaaccctattagaatgtttcatcctttttcattcattggttgccattatataggtacaactgctacagtccaactttcatttgaaaaaaaaattatcataacttttatactcacctattagaaaatgtgaacttttacttggagcccagatcaaagtggttgcatagcagagtatgtaacaaatcatagtttctatcacagtgagacagaaatcattttatgaatgtcagggtgccaaattttgatattgttttacagctaatgtttaacatagaagatttcatattttttattcctattgtgagaactacagtttaaatcaaagagtgtaaacataacatttatctatttttcaacaaacattactgataattgtttcttttgtgtaaaggaacacaaatcttcttgtcactgaattgtataaatcatcttccagtctggtgagagtctattattagtgcatccaatgaagaaagcatcttgctttagtcaaagaattatagaaacttggaattttggaaggacattaaggatcatttcatctaaatcctgcattttactaatgaggtccagatgtctagacaagtcagttgattttcacaaggttagatttaaattcataataggctaagactagaactccattttccttgctcatttgttcactgtcaaggctatagttcagactgttctttctctacgtggttccaatatacacaaatttgttatcacagtttaggtacatgacaccaatcgctaacaacatggttccattttcactttccacggtctatgaagtgtgagtatttgcataaagtgcaaaattcactgtcagccctttcatccactaatcagtaaataaatagcaaatgagcaccatagtcgggggatggactttcaaagtctggcagtgattgttcctgcggatctcttatctaatgcattcacagatagcaaagtacatagttgtgttgcctcctttatcactggtaaccccagtgataaatccatgtggcattttacaagaaaaaaaaaagtataatcaagggagagaatggtccaacaaagacaaaagtgcagcaaaggaaaagaaaaacacaagaatgctggaagtgaaattgattatgattaggagattcaaaaatggcaatagcaaagcgatgctaggaggaaacctgggtctgtgtgaaattgtggtacagaccacattgaaaatgtacaatgaataaaacaaacaaagtaacatctctttaacatattttattttattcgctctaggaacaaaaagttgtgtatggtcaaagtggagtgtttacttcttgtgttaggtggaatacacttcccaaaatgtcaatgtcctaagctttgcaacctgtgaacatgttactttacatggcagaaggtactttgcagatgtaatttaattacaaaccttgagttagagagtatatcctgaattatccagctgggcctaatgtaatcacaaggtttttataggaggaagacagaaggtgacagtcaaagaaagcttaacaaggtgagtgcatcttatcgtatatgatcttacaaatgaataaccttccacagcaagcttagagggaaatgtgactatggaagaatggtcagaaagatgcaatgttactagctttgaagataaaggggtagagtatgagccaaggtgtatcagcagcctctaggagctgaaataggacaagaaacagattcttctctcctagagcatccagaaaggaacccagtcctgcacacaacttgattttaacccactgagacctgtgtcaggcttttaactcacaaaagtgtaaagatgataagtttgtattgttctaagcctccacatttttggtaatatgttactgcagcaacataaaactaatccatttgctctttgaattgtacatatcatggctgacacttttattatatggtgaaaataactttgcagaatctaaatagaatgtcagtggagctacagaatgaatagcttactagggaatgttgacactgctgccattccagttccaagaacttagtgaaggcagacttatttacagaaatgaggaaagtgtgagaggatggagatgcccaagaggaagtgatcagcaaaatcacactagagaaactctcagacatattttatgacattaaaagctccaggaatgagaaatatcaggggcatatctactcttaagaagaaagaagtatgagaattcaccaagacatagaaatattatgaataa

SEQ ID NO: 32989 - DNA, 2300 bp, Homo sapien
tccatttcctctctactatctatctatgctgtggataaaatatgggcaataacagtaccaagctcatagagttgttgtaagaattaatttatacaagtatattgacttgaaacaatgtttagaatagaggaaaatccttattattgataacatttattactgtacaggttgtagataatcaaatgatatttaagtatgagtaaataagttacaaccaaacattttaaaattttcatcagggaaattttcataaacataaaatagaattatattaaataattaactaccatctttcccaatagttttcaagattttgccacactggtatcaaaaggtgtctcatgaccctcttttctatggaatattataagccaaataccagatatcataatttcccttaaggacatgttttttaaaagctaaatcacaaaataatgatgaataaaattatacattaagtacctattatctgggagaaaattagggaatattatcaaatctcttttctctgaattatctaataatcttagggaaaggattttggtctcaaatattttgacaaattttgttcatattcacatatttagtctctaataaaagccataagacctgcaacttactaaaataatcataaaaaatcattgtagttgaaaactcttctattgtttctaattaaaaaacaattttagttgaaaattcttcttttgtttctaattctgaatcctatagttttaataagtatatctattattttataattgctatatgctgtctacatatagcaattatacaatataaattatacaattatagcaattatacaatataaattatacaattttataattgctatatgctgtctacatagcaaaaacacaagaccctgattcatacacagacacatacacatacatagtaggacctactagattttaatgtttttgagccaagcagcatggttccatatatctctcatagtaccaggtatactggtaaggtaatcagataatattataaattgaatgctgaagaatatatatatatagttgctcattatatatatatatatttgtgtttgtgtgtgtgtgtgtgtgtgtattacataaatacatactgcttcatggcttttactcatattttaacatcagaattattttgggtagttctagacctatggatgctgatcagttgacacttgtcttgttagtatttggttctttcaataaaggattatttgctcctaattcttattcaaagtattttaaaatttttataaatgaacactatattgttcaataaatagcaagtagcagtaaaataatataatacagattcattttgttatttttggaatcatatatgaatgtatctagatagtttccaacactatattgaactttacaggtttttctaaaatttatttccttaaaatgcaatagttaatattaaaattacatatatataaatataggaaaattaagtgcaaaaatgatggtgaatatatttctccaaagacttttattggtggataatgaattcttttctaaatatatttaaaataatttttttttaatttgtgtatttttagtagagacggggtttcgccatgttgggcagcctggtctcgaattcctgacctcaagtgatctgcctgccttagcctcccaaagtgctgggattagaggcatgagccaccaggcccagcccctaaatacattattttttaatataagagcagataaacagtagttgaaatattcttttaaaattgtatggatacacatagaacctagcaatttaagataggaaactagggctggagcacctgaaagagtttccatgttaacaacaattaagcagaaaataaatgattaactttatgggtaatcaacttagctttccataagtcatcagctttttcaaaagattacatttctttcattagttggctactttatgtgtcttaaatcaacatacaactggggattaggttaatggttctacttattttgtgcaataattctgcctactcacctatgactgataactaagtataaatacagtatctcaagtcatgctgtatccagatttgcttttacattttcttgcctgagtctgaggtgaacagtgaacatatttacatttgatttaacagtgaaccttaattctttctggcttcacagtgaaacaagtttatgcaatcgatcaaatattttcatccctgaggttaacaattaccatcaaaatgttttgtggagactatgtgagtataatgcttatttctgtaaagcttttcactc

SEQ ID NO: 32990 - DNA, 2300 bp, Homo sapien
cttcccttcccttcccttccctcccctctcctcccctcccctccctttcccttcccttccttatttttttccttcccttcctcctcctagtccattaaccttatagtaagtagagattctttctaggttctataaaccctcaggcctaaagacaggttaagtttcaattttggtgatgctgggtttttttttttttttttttttttggaatttcatagacattttaatgggaagttgaaagatacatgtactttaatgcagttttactctggaaaacaagcaatatttttataacattggtgaaatcaacctagttacattatttttgtaataatactgcagaacatgggataatatatctttttactcctagaacaacttaaaagctataaactcttgaactggaatggctttaataatcagactgtttggcaatacgtttcatttctgacaattcagtttatgtgctctattttgttaaagaagttgccatgtaacactataaaataatatgaaatcaaattttttctgatacatttctgatatctttgtggtataatagatattgatctatcatttattatcattttcaaacgtatttcgtaacacttaacattgtgtgtctaaaaatactcttttctttaaaggtgctatcagtgctaaagcattcattgctgtccttcaagcaacccagagtcatggacatgttaaaactttacttcctgttttctttgcagttcctggtgaaagaggtatgcattactgcacttttgttttgggaaatagcattactactatctagatttcttatcatgctgaacaaattgtagcttttagaaggttctatccaatgattgatattatttataaatggtataattataaaagttgggcccagtaatagttataaatatttcttatattggcattaaatactattttaaactggtacttaataagttacttattatgtggtgacttgagtcaaactaataaattgttttttgttctttagggctatttagatcaagaaggtaatcctatggggtttgctggacttgtatcacatttgcattatcatgaaccttctaatcttgtttttgtcagttttcttgtaaatggactcttccatgatctctgtcagccaaccaggaaaggtaagcttgagattttatatatatatgtagagagagagtccaaaaatagcaacagatttgtagaaaaacaacacttcaggaatatttttaataaagaaaatacaattaatatgtagataatttatagatcttcaattgataaagtaaatacctactaatatatattaaatgatagtcagccatgttttatgacatgtatttacaatgtcaacacctccaaaatattaacttcagtgattccttgcctccaggattaataacatattaaataatatacactttttagaaaatattttcttctaattaaatataatatatattcatcatagaaaaaggatatagtaaagcattaagttaaaaataaaaaattactcataattacactatccacagataatcactattaatgtttgtgaatattttcttccaatcatattttctttgaatattattgtatagtatacctaaatagctaatagtatattaatagtgtaatttagaatcatattttcccctaaaaatagcacaattttatccatattgagtaaatttttaaatacattttatttaatacatttttgattaaaatcctttgatttttacatttaaacactaaatctatatggtagttcttaaaatcactaagatagactaaagggaggaaaatctaggtaaggaaataaggcaatttgtgtgggatcattaggatctaaattagggtataggtagcaaggatgaaaaagaaggcacagataaaaactattagcggatatatggtaattcttcaattgctatgtttgtcataaatttttagtttccatgaaattaaatgtaatatgacattccatttaaacatgaaaaaatagaattataccctttcatatttacaagaagacactttgttttatataggctcaaaacatttttctcaagacgttatggaaaagctagtattagtattggcacatctctttggaagaagatattttccaccaaagttccaagatgcacacttcgagttttatcaatcaaaggtaaactgtgtgattctgataaaatttagtaatgtaaaaccactaaatagatcttacctaaaatgacttagcagctgtagaattttaattcaaagggcagttcatttgt

SEQ ID NO: 32991 - DNA, 2300 bp, Homo sapien
tctcgaactcctgaccttaggtgatccgcctgcctcagcctcccaaagtgctgggattataggtgttagccactgcacaaggcctagtttatctctttttcatgagaataaaaatatttcctaaataaatactttggcaaatttttctaccatgaaatatatctatgttctctctcctatcagtgataatgaacaaaaggaatactaaaataactttcaaactgaagtcttgctatgttttgtgtagtgtgtcccatgacagtgcgcagggattttctggataaattcatgaaggagctttatatggtttgcttgtaaatttggatctttagtaatattcaaaaatagactgacttttaaaaattattcacattgaattttgtatgacatatattacattcacaaaagagagagaggaagaaagacaaagagattgagattgtttctgctactctaggtagcatcttttaaactaaatgttgaggaaaatctgacatcatagttaaaaatcctattccctgaaaaaaaaaataagatgtagcatttgcaactttgctatgcttttctcttaactaataacaaattatgtatctcttttaaaggctaataaccacgtacaatattttctacatgcttatgaattgatagaagagagaaacacctattttgatcagggtattctgtgtttaaaatagtacctgttaaatagtagttgctcaattactaataggttaatgagatcactccacaaaaggtactatgaaaatagtgacagctttgctatagagaacattttttaaaaaggtatttattctagttattttctaaatgtattattattttctacatttttgttcttatcaaaaaacttgagaaaaacaggtaataaatgatgtgttgcattttcgcagatatatagatttcagttacagaataattacagaaaatcactccgtatacttaaacattaatactaaccattggcatgtatgacaatcaatataaaaagaaagagaagatgattagaaatacccagcattatatgaaaagaggattatctaagtaaacttttaagtttgtcctgctccttttctgctcagttatgacaatttaggggggaaagacaactttttaaaattactgaggtatgctttttccataggcataatctcaacaaattttagtagacaaaataggtaattgtccaaaagtggatttgtaaaagtattattgccctatcataaaaaattttctttctagttattcatttaaaaatatttactgggcctggcgcagtggctcacgcctgtaatcccagcattttgggagggcaaagtgggtggatcagctgaggtcgggagttcaagaccagcctagccaacatggtgaaactctgtctctactaaaaatacaaaaattagccgaatgtagtggtgggtgcctgtaatcccagctacttgggaggttgaggcaggagaatcgactgaacctgggaggtggaggttgcagtgagccgagatcgtgccattgcactccagcttgggcgacaagagcgaaactccgtctcaaaaaaaaaaaaaaattactgaacacctatcagttgtcaggtactcttacggatgctgtggatacaataatgaatcttgcttggagtctggtataagacaagtgaacaaacaagtaatattattgaggtagtcattaatgctatgaagataaatcatgtgagacagagatagataatgatggtaggggtggttattttggatgtggtgagctacagattcctctgtgacatttgagtagacagctgaagaagccagagaaacgaatatttggggaagaatattctgtgcaaagcaaacagcgcatttgggaatgtacttgtggtgtttgtgaaatagcaagagtaccaatgtgtctagtttctctagctttcccattgtggcttaattgaagctcaaagagtttttcagcaactttatgacaggaaatacttgcattctattaaaatgctattttatgaagtaattgttttattctctttcaaggtggtgacagctactggaacacttgctttaggtgtcaacatgccttgtaaatctgtggtttttgctcaaaactcagtctatctggatgcgttgaattatagacaggtattgcaaaatgcataaacttgcttattgtattgctgaaatatggccatagcgtagtaaaacatgtgaacctttagtttacaaacatgccacaattcacagtagcataactggacattcatccttgcctggctttcagtttta

SEQ ID NO: 32992 - DNA, 2300 bp, Homo sapien
ctgcgcccggcctggaattttcatttaatagttttgaaccacagtttagctcagatccctgacaccaccaataaaaggacaattttgtattttatcaatgagcaatgaaatctcagagagggtcccaagggcaaatatatagcacatccataagcaccttcaaagacgggtgcaaaaagaacaacttataaggttgtgggcgtggttaagggaaccaacaaaaacgatgaggcacccaggaagaatctgtcattcacctttgagaccaatgagtaaacatttcttttttgggtaacactgtattcatgcttccctggcacgctgagttcttccaaagctgctgtggataccatgtgctctactttataatttccatagcaggtagtaaaaaagaaaagaagaggcagaaagaggaagatacaggtgaaataggatcacatcaagatgtgtaaactcacggcaagtgaaatgatcttgttccataatacctccaaactgacagttcttctgagcaaacctagttgatctgtcagttttgagcatctccacactttgatccatttaacacatgacctccatgttctctccaacaccctgacctattgtttctctccagcaacctcctattgtttctgctgcttaattgggaatgatcaagtgttatgcattgtttttctaagtgaactgctcacctagaaaaacagtgcataacaatcagtatgaactgtattacatttcctttgtagcctcttactgtattcagtaggtgttagttaatattgttaaataggtgaaatataggtgattgattagaagaaaccctgacataataagtatgaaataattagcagagcagaggaacaaaaagggtatgtatgaatataaagcaatggagagagattagcaacatctagaatgtgacagttggaagaggtggattgaattgaagggctccaatgagtacaccaaatacttatctgtggtcaaccataggactcaataaatgttgctaaggttttaaccagatatttcaagtaataaagatatttttctttgaacatagtagagcacatatgaaaataaaagatggagaaaatatttgttattcttcctaaacttttacaaacttgagcttttttgatcttatttctattatgaactacaatttttttcccaacactgatatagctacatctcaacaatccacagagatgatgaagtgtggatagtggaacttcaattttactttatttggtcctttctactccaaaacctccactaatgccaagtgagatagtgaggccatctagatgattaatcttgggtaatcaaatgaattatttttgatggtctttataacaattttattgtttattgtttatcaaggtaaaaccacgaaagatttaagtatagctgttcaggtgatgaaaaggatccactccttgatggaaaaatactcagaacttttacaagaagatgatcggcaactcatagccagatgccttaagtatttaggatttgatgagttggcaagttctttacatccagcccaggtaatattatcagaatagctcaatttcaacagggtaattattaggtatacataaagtgttttgcaaagatagtcatctcttccagattttttttttttttttactgaaaatactattattagtagtaacccaactgcccaatcttgaagtaatacataatgagaaaatttgtacaaatgcttacctggacaaacagattaaatgccagataatctctgcagatcctttaaaactaaccctgcacttaattctagcaaaacatctcaaaactagtgtgattattcaattgtctttaaatatatcaggttgtagccacaaatatcatgacgtatatttgaaaatcttgatgtctactaattttacctagttaagacaatgatttaaaaaatttaaatttaaaaggtggtaaaatgcttttcacatagaaagtgctcagtaataaatgttttacttatttaaatgatattctaattcaatgtcattttcaaaatggacttttaaaataatgcaggatgcagaaaatgatgtaaaagtgaagaaaaggaataaatattcagttggcattgggccagctcggttccaactgcaatacatgggccattatttgatacgagatgagagaaaagacccagatcccagggtccaggattttattcccgacacatggcaggtaatactgcaaatgaaacaaaaattactgtattttcttattatatgtgatctcagaggtttctcattattgtggct

SEQ ID NO: 32993 - DNA, 2300 bp, Homo sapien
tgttttatccctcgaagctttatttttcttatctacagaatgacagaaatcatagtacacacctcatgaacttgctgtgatcattgatatggtattagcatattgcttagcacatagtagctgtctgaattaattctacctcttgttataacacaatccattatttctgctgtttgcaaatatgttattcatttcctacaatacagtttgcaatattgtattagttctctatggctgctgtaacaaattaccacaaatttagtggcttaataccacacaagtttgttctcttacagttctgagctcagaggttcaaaatcagtctctctgggctgaagtcaaggtgttatcagggctgatttctggaggctctagaaaaaaaaaatgtttccttgcctttggtagtttctagagaccaccagactccttggcccgtggtcccttccactgtcttcaacgccatctgtgtagtgtccccacattctgtcactgactgtttctatcatcacattgcccctcgaactcctgtctccctcttataaaggcccttctgatgaccttgggcccacctggataatcccgggtaaggggtaatctcctcttctaaagattcttatttaatctattttgcaaagttacttttgctatgaaagttactgtattcataggttccaggaattaggattttggcctcttttggagggaggagtgcagggtattattcagcctaccccaggcaggtacatcagagatcacagtgaaggagacaggaatattggctgatttaagaccaatcatgtgttaaattctagagtcttttattttctttcttaatctcatcactaacaaacacgtgaatttctaaacaaatgaataaacaagtaattgtctgatggatgtgagaaatgtcctccttccccatatccccctcttttaacaacttgactctctaatttttcacaagacaaagtatcattcactactctctctgttctgtgttccctgtggagcagtgcctggaccttggctctttcctttccttgtagacaaagcagcctgtggcttcttatcatgctgattacccaaattcactgctgtctttcctccacaccctcttctatttccaatatatgaatgcatatttatagcattaatgaaatcaagcatacgagggcactgaaaggaaaggagatgagtatcgaaacccacactgcaagtatcaacaggcaaaaattaagagaacatttcatcaatttgaggcacaaataaatgtgaccattctgcattttcaatttattttttaatgttgattcttggcccatgaaagtaccaattacagtttatacagaacagtaatcatcagcttctcataacagaaactcaaagttcatgtattgttacatactttcttttttctttttgcatacaagtagaagcagcaagatctccaatttcattgtggggtttcagattccacagtgtcttttacattttatcaatttctaaattctaactcttcttgattttatcttgtttagatgttacaaatttttctgcctcaatttactctatatttatgcccaaattccaaagcccatttttattgcctttgtctctctcttttaaggttttttttagtttcattttatttttaattgacgcataataattgtatatatttttggggtacaatgtgacgtttcaatacatgtatacattgtgtgatgatcaaatcaggataattagcccatctattacctcaaaactttactatttctttgtgatgagaatattcaaaattctctcttctagctattttgaaatatgcattattgttaactatacacaccctactgcagaatagaataccagaactggttcttcctagctattgtaacttcataccttttaactaacgtctcgccatgctccccttcttaagattctgattgaagggaaggatgctaaactttccacgaaagtgcctcgcctaattcgtgctgaagggaaactgaaacctaagtgcttctgagaggagaaaggaaaccgaaactcccgccggatgcataaaagactggctgcggtggctcagagcgccgagtcctaggccaggtctggggtaacctggaacttccacctgggctctgcgctaggtctctgtttcactccctccccgcggggcgcgcagctcgcgggtctttggacaccaccggtcctgagtccgcggtgaggagccggggatgtcccttgggaagagcctggggcggagctgtctagcgggagttctaggtcttcttcaa

SEQ ID NO: 32994 - DNA, 2300 bp, Homo sapien
gtttgtagtctcaggtcttatgattttagttttaggttttttttgttttgctttagtgttcattaaagagaagaatgggaaaagcacttgctaactttttcattctttttatatgttgatttttactttttcctttataaaggaagtcaagtatgagtgaaaactgataatataacttgtttttgactgtctatatattttttgtggaaaaatagatttgcttctaccttaaattctgttatgttgtcagcatttgccacttaattaattagatcaatatgaaatttttacattaaagaattattagaagaattataagtgaaatgaaagattgaatgtattctcaaatgtgtcactcttaattccagataaaaatgaggaaaacagtattgctgtattaaaaataaaaattatattttaaatataaaataacctgtttataaaagtttatttggaaccatagaaaagctgaaagaaggaaaaatcacccatacctagttccactactcacttgatcttagccaaaaggccaagaagcgatagttccactactcaaaggaaactgctttattattttggtatatttcttccagtcttttctacctaaatgtgggtaagtgtttgctttttaaagaatggatgcagttatgttgaactagatgtcagaatttggtaaatttgcctgaggttttcaatcagaacaattttgggggatgtaaccccatgttgagtaatatataattcacattaaaatttaaatttaataaaatatcattgtaaggttaccaagttttccatattcttatatattcattatcatggccagttacgtcagattccacttgccaagacaaagagtcttcccagaaccctgtaatgagtcaggtgtgtgccttttgatagtcacagagaacagcgacacccagttctatgtaaaagtggccccattcttggttttgattactctcccaggaagagagagtagtacactttaaaggtttttgttattgtttttcatataataacgtttgtgagggtggcatattttctgggctcctgcgtatttgaggagattttttcttttgtagtaaggacaatttaacctggcataaattttttggatttgagccattagtcttcagaattgtcgatgcttcattttctttggcatctactgttgtggagatataatctgtggccctactgattgctgttttcttgtaggtcacttgactttttctgcccatgtatatggatccttttctttattcttatatgttacttttttaggagaagtttctagttatagtttttttttttaaaaaaaattgatagtgtttatcatattcagaaccttttcaatttatcacattcaagttgtttttgaagaagtatatttattaaattagatttttaatttgatttctattttaattgctttggtttctttattagaaaaagtttcactggctgggtatggtggcatatacctgtagtcccagctatttgggaggctgaggcaggaggatcacttgagtccaggagtttgaggttgcagtgagctatgacctactgcactccagcctgtgatgggagggaatgctgcaaaggtctctgaaatgtctgtgaggacttttccaattgtcttgactatcagcatttgccttccttttagttatacaaatacatgcaggctgcttgaattcctgcccagaaaataggcttttcttttctgccacatggctaggctgcatatttttcagatttatactctgcttccctttcaaatacaagttctagtttcaggtgatttctttgctaacacatatgcgcataggttgatagaagcagccaggctacatcttgaacactttgctacttagaaatttatttctgccacataccctaaatcatctctttcaagttcaaagttctacagttccctagagcaggagcacaatgcagctaacctctttgctaacacttaacaaaattgacctttgctccagttcccaataagttcttcatctccatctgagacctcattagcctggacttcattgtccatattactattagcattttgatcacaacagtttaacaagtctttaggatccaaactttccctcatcttcctgtcttcttctgagccctccacaaaattccaacctctgtccactatgcagttccaaaatcgcttccacattttcagatatctttatagcagtgccccactcctcagtatcaacttcctgtattagttcattctcacgctgctatacagagacacttgagactgg

SEQ ID NO: 32995 - DNA, 2300 bp, Homo sapien
tgaaaatataagtaaacattgtgatacaaactctgaagaaaaaaaaatcagttagttttcaccaagataatagcaaaatgggaagtaagaacaacaactttggagcaggtactcagggaaggtgtttctgaggcaatgaccttcagctgggctttgcagggataagcaggaatggtcagctaagaggtggatgaggattttaagtagcagggtcgtatatgtgaaggccctcaggtggaacacgtgtgttcaaggtatgaaaagaaggccagtatgttgggagcagagtgcatggcggggaaagtggcctgagatggggttggaaaggtgggaagaagccagaccatgcaggaagttacacttccagttaagcagcttgtggtttactgtaaatgcattgggaggacagtgtagggatttaattaggtatgtagcctaatttgatttttgtttaataataccattagggctatgatgtgaagaaagtatagagaaagagtggaagctaagagaaaaatcagaaggctgttgtagaaagccaggtgatggtggcttcaatgacaacaaaaaatggagagaaaaacatagcttcaaaatagatttttggaattggaatctgtaggaattaataatggtttcgatatggagattggagacagttaagtgtcatgatgtctattgtctgaatttatcaccattcactttatttaggttaggtcatttataggaaactggaaaaatatgcatgatgattttatgcttctattttttatttacgattttgacatcaacttttcaactgatttttttttctttactaggtccattatcttggcagagaagttggagcaaaattttgggagctcctccttgtcattattcgatgtccctttttggttctttcagctaccataaataacccaaatcttctcaccaagtaggtataggtaaaaagagtggttgttatatattcagtggttgaattatatactgtctatatggtctgaagtctttaaggttttttctatgataactttcaaataaatttattacccaatctttgaaacgtcagtggtcttgctttgttgcccaggctggccttaaactcctgggctgaaggaatcctcccacctcagcctcctgagtagctgggaccacaggtgtacattaccatgtctggctttctcaaatttttttgaagatatatttcctggaagttagagaaggaaaacatcttctccaaagaaaatcaaggtctcccatagccagatctgaaattgtgcaggacaatttctaaaaattttcaagtaaatgtcatctgaagtaagagagagaattgtatccccctttctttgtccttatccaataattaaagctaaaatggaaataactgggacacagtcattgaccttgcagatgacaatcataagaacaacaaagcattatatgaacgtcaagtattgttttgttaccagacttgatttttcctggtaacagcgacgatggcagtaacagcagcactggtaacaagcacacagtgctttctatgtggcaggcacgctaactcattcaagccacgcaacacccttatgagaaagatactttcgttatcttctatgttatgatggagaaagggaggcatagagaagctgaggaatttgcccaaagtccacagctctgaagtcaactcaggtggtttaaattgagagggcatgctctaaatttttaaacttgtgaaattttctttgtttaaaatatccaagttcttgataaatacttctatattttatttaaattatatgcatgtttattctgtaaggtggctgcaatcagtaaaacagtactggaaacaggcagacaagattatggaagagaaatgtatttctgaaaaacaggctgacaaatgtctcaactttctccaagaccattcatataaaaatcaatcatatgaagttagacttggtaagcttattttttttatgttttactatatatttttatattttactacaaagctttttatagggatttttgtgttttaaatccatattctaataatcgtatgtccattaatttggatattcttgctcttcgtatctagtgctctatggagagagatacaatgatttagagaagcatatatgttcagtaaaacatgatgatgtttattttgatcattttcatccctgtgctgcgctaacgacagatattgtaagtataaaagtgtatttgtcctgttagtggaatttttagtgtatatcgcaactggaaagggactcaatcttcatagaactgcagca

SEQ ID NO: 32996 - DNA, 2300 bp, Homo sapien
gaagttctcctggataatatcctgcagagtgttttccaacttggttccattctccccatcactttcaggtacaccaatcagacgtagatttggtcttttcacatagtcccatatatcttggaggctttgctcatttctttttattcttttttctctaaacttcccttctcgcttcatttcattcatttcatcttccattgctgataccctttcttccagttgatcgcatcggctcctgaggcttctgcattcttcacttagttcttgagccttggttttcagctccatcagctcctttaagcacttctctgtattggttattctagttgtacattcgtctaaatttttttcaaagttttcaacttctttgcctttggtttgaatgtcctcccatagctcagagtaatttgatcgtctgaagccttcttctctcagctcatcaaagtcattctccatccagctttgttccattgctggtgaggaactgcgttcctttggaggaggagaggcgctctgctttttatagtttccagtttttctgttctgttttttccccatctttgtggttttatctacttttggtctttgatgatggtgatgtacagatgggtttttggtgtggatgtcctttctgtttgttagttttccttctaacagagaggaccctcagctgcaggtctgttggagtaccctgccgtgtgaggtgtcagtgtgcccctgctggggggtgcctcccagttaggctgctcgggggtcaggggtcagggacccacttgaggaggcagtctgcccgttctcagatctccagctgcgtgctgggagaaccactgctctcttcaaagctgtcagacagggacatttaagtctgcagaggttactgctgcctttttctttgtctgtgccctgcccccagaggtggagcctacagaggcaggcaggcctccttgagctgtggtgggctccacccagttcgcgcttccaggctgctttgtttacctaatcaagcctgggcaatggcgggcgcccctcccccagcctcgctgccgcccctcccccagcctcgctgccgccttgcagtttgatctcagactgctgtgctagcaatcagcgagactccgtgggcgtaggaccctctgagccaggtgcgggatataatctcgtggtgcgccgttttttaagcccgtcgcaaaagtgcagtattctggtgggagtgacccgattttccaggtgccgtccgtcacccctttctttgactcagaaagggaactccctgaccccttgcgcttcccaagtgaggcaatgcctcgccctgcttcggctcgcacacggtgcgcgcacccactgacctgtgcccactgtctggcactccctagtgagatgaacccggtacctcatatggaaatgcagaaatcacccgtcttctgcgttgctcacgctgggagctgtagaccagagctgttcctattcggccatcttggctcctcccccatattctgtaaactctttaaaaacttgttttgaaattagtttttaaagttgcaagcttatatgtagcatattgtgcttcattatttttgggaataattatatatttatcattcacattatttaataaggactatgattaaaatggtgatgttcctttgttaattttttgggcagggagggcatctcggtacattgcccagatggtcttgaactcttgggctcaagcgatcctcccgcctcagcctcctgagtagctggaaccacaggcccatgtcacagtacctggctctgcattatatttaaagagaaaatgactttaaaaaagtactgtcatagtgtcatgactaattttcatgcaagtgtattgtgtaactcactgtaagtttccatatttgatcatctttccagagctctatgaatttattcaaaaaagatgctctgtgtgtgtctgcatgtgtatgacttttgagattttaatattttttattgttatgcagaaccacatttgaatttgggagattccattaggagggattatgaagacctgtggaatgttgtgtcacacctggttaaagaatttaacgttggaaagtcttttcctctgagaacaacaagaagacattttcttagacaagagaaatcggtcattcaaggtactaaatgggtaaattaaagtggaacaaaagcatgtttgtcctgaacaacttttagaagccctaataattcaattcttccaagtgtaaataattttccttcactgtgctttcttgtttacctcttaattgaggtttaaaatacatataataatgtgg

SEQ ID NO: 32997 - DNA, 2300 bp, Homo sapien
atatgttgtttcttgactttttagtaatcgccattctgaccagcatgagataatatctcattgtggttttgatttgcctcaagtgtctcatattttacagctgggaaatactttatttaagatattttatatggttttctcccttttacagaatgaaacagtgattcagagtgcatataaaagcctcatacaacacttggaagaaataagggttttagtattagcaactcattttgaacatttgaaatggaatgatatgatggaagaggtattaaaatttttatttctttaaataaaagtttgatagaatttggtaaatgagaatgaacttgtgattagttcagtccttagaccagactaaagggtgccatatacctccttagtacatgtatactatctgaatcttagaatgtcatgctctcagagtaccttgaattcatcggatggcatatgtaattttatattcatttccggaagccatattttaaaacagactctgggaaactagaaaattgtagtacttaatgcaacagtaatgtttattttccagtattcaaattgaggagggctctaagatatcatttgccatataaacagtcaaaatgtggaattaattataccttaagtctaattttctgattatcttctcaagctatgctttatactactatttatcatgatggattactaagcacctctttctttttttttttttctgatgctcaagcggtaaaaggtggttgcataagaaagtttggaaaaaaacacaaaagtagtaagaatatccataattccacttcttgatattagcgttttaacatatatttttgtgtagctgaggacatattgtgtgtgtgtgtgtgtgtatgtgtgtgtgtgtgtgtgtgtgtgtgtgtgtatgtagtttatatatatgtttttggtgttttgttttgtttttttttcagacaaggcctcactctgttgcccattctggagtgcagtgacacaatcatggatcactgcagccttgacctcccaggctcaggtgatcctcccacctcagcctcctgagtagctggacccacaggcatatgccaccatgcctgcctaatttttaatttttattttatatagagatggtgtctcactttgttacccaggctggtcttgaactcctgggctcaagtgatcctcctaccttggcctcccaaagtcttgggattatagctgtgagccaccatgcccagactgtatatatatttttagtgtacatttcattaagattattgcatattttcttgtcattaagaatttttcataaatgtagtatctaatgagtgcattatattttcttaatgctagacacttaaattacttcaaaattttggctcatataaataatgttataatgaacattttgatgtatatgttttttgtatacatattgggttattattcctctgtgctaaattcccagaaattcaaaactggatcataaggcatcaacatatttaatgatcctgatggacgttgtcaaagagctttgcagaaattctatacctacctgtacttttatctttaatctgtaagagaggtgactcaccacacaattttcaatgttgtgtgatattattttaaaatttttgatattattgatatttataacaagctaatttttgttttaacatatacttctctgatttttagtaaaatgggatgattttatttttattaataatctatttccttctttgtgaatcagttcatgttttactaaatcttaatttcttattatttaatttctttacatatttaggttttcatatttctctggcatattggttgtaattatttttcaattttctatcattaaaatgatcatacatttttaaactaaacatttgaagttccgtttagtcaaatctatacaatcgttttctttatgtttcttacaagtaagagcacttctgagtaaaagaatatttctaaataatttgacatttgaagaaatttcttttttgataggcgtatcagactctatttctgcttcagcacctatggtcagaaggatcggacatccagcgtgttctctgtgtcacttcatgttcactatccttgagaatgtaccatcgtgtcttagtaagtaaaaagaacacagccgccaggcagaaagctgtcattcatcaggtgtaactggtataacttcactggtggcatcaggttctccactgtggacatactcttggtttctgaccgccattttcttcattaggaatttagccccttcccccaccaatttatgtgtattaaataccaaa

SEQ ID NO: 32998 - DNA, 2300 bp, Homo sapien
acagctgtaaatagagagaggttaacaatataggaatggagtgagattcctgaggaagctggaggtaaccaactcaaaagggagtggttatattgtatgtggagcatgtcatgggcttcttggactagatggaggtgtcagacagttaaaaggagtctctttaaaacagatatattcttagtggacttgaagagaacagcaagatgctgtagggttttaagggccactgtaaaaaagatcaggaacctatagtcataaacagtaaatctgaggtgaaaaatattagacaatttccttcaatgtcctggtaagggcaaaaaatggtttactagattgaggtgatcaagttgcagtgaaggtgcagaggaaagagagtggatgaagcagttgagaatgttagtgagaggaaggttcagtgcctgttcacagagttgatcctggggaggtgaaagagtggggctcctaaggagactgagagattgaggcaagggggaagtctctaaaaagtggaaatggagtttatgattttcaagtttctggataatgtccaggctggagttatggtaacatattattaaagtggaagagaactggatattgatttggagtagagtctgcttatgtgcattgtacatatactttgcggtgggaagtgggatgtgtggagttaacatctagggaatccccacctgatacatctatatctttaagagagaaaaacaacagcagacagtcaattatattaagaacatgtagggcccacttctacaaccaaaagaggaaatccccattaaattgtatgtgctttgggggaggaataatgacactgtagtatttaaaagaactggaatgagataatatatacagagaatattgtagatattatctttggaattaaattttgaagtcttggctaccattaactacctgtagggtcatcgacaagtaattgaattctctaagccttatttacctcatccataaaatagcaacagtaaagttgctcatgggatttctgtgagatttaatgtgataatacatgttaagggcttagcctattgcctggcacataaaaagctcaatgaatgcttttacagcaaagcccaattttctgctgctagcaaatgcattcttatgatacaaaggtccagtatcagatgctagagaggaattcatctgagatgaactcatgacttaatcatgagtcatttcaggttctttctcaatgtcatcctcattgagaaagagaatcataactattttcaaccaaacataaaattaaagaaaaatcctgacagaagtgagcaatgttttcacctccttttcgaagccactttatattccagagtctgagaaaaaactttgttcttctgggctctttctattgtgaacaagtcacttccaccctttccttttcttgaagacagaacttccggtttcgatttctctccatttattaccccatgccgttactggggcaccctcaccaccaccttgaatctcaatatattctgcacatgcataacgtcatggaattaagcgtctggagcactaaagaccatgatgggctggggttgaaactcgaatttcaaacattaatgagcttgatgacaaaactaaagagcattcttcttctcaatttaaattctctgtgatagatgattggtctttcaaatgttcacactggacagttatactattggaaatttttcataaaatgaacttcttaggacagaaactcaaagcccctaatccttttttactccatttttgcctgtccagtaccttgccagaaaagaaaaacgccacacctcaccgcagactttcatagtgcttagcgtgctgcatttactctcagcctcaattccttgtttagagtcccagatttctctgctttctttccctttacaattacatgcatgtcccagatagcatatcatcgcttctactattacttccctaagattctcagagtaaaccaatgcagacctatattctacctccagaaaactgcggaaatcgaaaaggcctcgcggtggagaaaagaaaccgaaactaactccctagataaaaactcaggcgctggctgctgtgtggctcagagcgcccagtccgacgccaggctctgcgctcggtctcctctgctccacctcctccccgcggggcgtgcagctccgaagctctttggacctagcaggttcggcggccggggtgaggattgcgggtgacgtcgggtgtcgctagggaccctggagcggagctgtcccgcgggggttctaggattccttcaacatccagat

SEQ ID NO: 32999 - DNA, 2300 bp, Homo sapien
atgggttcactgcttcctattcccaagcctttctgagactccatggggtgaatcacttgcttcttttctgtatctcctcctgcaggcatttaagctttgtaatttagttacatgcatacttatatttatctctttccaacaattttgttcatttctgatatcttctattgtcttccctcccaatttctgcccttttcagtttttactattatcttgtggttttaggaaaaagcagatataaatatgtgtttaagcaatgctatggtttgaaggtttttgtccccttcaaaatttttgttgattcctaatcccctatgcaacagtatcaggaggtgtaacgtttagaaggtgattcaggaggactcctcatgaatgggatttgatgcccttagggcttgatggaggaagtttgaccccctcttgcccttccaccttctgccatgtgaggacacagtgctcaaggcatcactgtggaagcagagacaggaacttcaccagacaacaaacctgctggcaccttgatcttagacttcccagcctccagaactatgagaaatcaatttctgttctttgtaaattacccagtctgtggcattttgttataatgacacaaactaagacaatcaatcagagttatatttccttgtaagtataaattttatttttttatttttatttttattttttttaagaaggagtctcgctctgtcacccaggctggagtgcagtgatgggatctcggctcactgcaagctccgcctcccgggttcacaccattctcctgcctcagcctcccaagtggctgggactacaggcacccgccaccacgcccagctaattttttgtatttttagtagagagggggtttcactgtgttagccaggatggtctcaatctcctgacctcatgatccacccacctcggcctcccaaagtactgcaattacaggcataagccaccacgcccagccgtaagtataaattttaaaatcacttcttaattaatataatagatgaaatgacccacagaagtatccactcacagaaaggaccatttctaaaggaccagtttggcctataaagaaaatacaatagcagaccttcacaaattttctaacatcagaaaagaaaaaatatttagatattaaactgaatcaaatgtgatggtcttacccagacaaaggaagactcagcaccccatttccaagttaactgggagcttttgtgttgctctttttgccccccttatatttgattctgctacctgacctttaaacagaaaagctttctcttcttgctatctatgtttgttatttaaaagatcaaaatattaaactcttgctatatctatttgtcatttgaaagatcaaaatattaaatgattgtgaaacattttttgcaactgtaagagggttgatacttttcctgaatattattcattcaacattcatttatttctttgacaaatatttaagagatgctcatgatgtcctaggcattgagctaagaactcaatgttgcaatgtggataagatccagtccctgtgtgttcatacttatttaatactattatagacaaggcctttaatacataccatagtcatatatcaatttttaattagcaatatgaaataagagaacaatgggactttccactcaatttgacaggtggctaaattttcagttactgaatttactattttagggtaatctagcacatgaccaaaatttaaatgcacagaacagaagatcagagtaagaagagcttccatttggattatcactttttctacttggagtcacatactgtactttaaattgattaagaacatgttaaaggtccaggtggtgatttccagctacaagtccaaagtatagaagaatgtgtttaaatcctacgtttatcagatccataaatatagttccttctatgttaagtggctttatttctaagaacccagccctcggtcctgggggtgcttcccagcccgctgctggaattcctgatcgtggcagtctgctgaaacatgagctcagttaccaaatatagctgagtggagtaagaggacagatgagagtctgaggccacagttgcctcaaagtgaccacggaccaggcagtctctaatgaataggcaaggccacaacctccattctcccagaaaagaagaaatgctcatctgaaattcatcacctctctggagtcttcaaactgaccaagcattgaaaaggtctgtaaggtgtatcttaatatactaactagtagggcaacattttaaggacttaaaaaaaaaaaaactaa

SEQ ID NO: 33000 - DNA, 2300 bp, Homo sapien
gaaaatacattcaagtattaaaaatacactgaatataattgttcctcatatacgagccatatctgaataactggagaccagtcaggatgtttctatcctgcagcacagactggacaaaggaattagagtgatatttgggttagtaaagtcagggagaatgatgacaccctctgaaggattaaggatttacttgaagaagagtgcgaaatatggttcagtagatagagtagggctagcatgtggtgaatctaataattcaggcacaaaaaaagtaactatctttctaagaagacatgtaagacaaaagtacagtattccacttaagaagatggggtatgttaacattgagtttcaggatctctgattaactaccctctgttaaacagcaggtctatgactcactgcatccagtgaagcagtaggctcttgagctggatttctacaaccccctcgactcttgcataatgtattttgaaattagagattttcttagatgggaagatacttctacgcaagcaactcaattcagtcctctgaagacacaccatttctggggaatgtcccaccaagtttactcctgactgacacaaggtagaaagttgaggttcaccacatccaggaagcttccattattcactcctagactcagtcttgtggcagacatcaccgctgatgttttctagatcgtccctctcagtactctatgaacaatatatagcaaaagaatggcacacttagagtaacaaggagtcattgcttcacaatataaagttcaaaatgtcagtggaatttaaagctgtaatagcttacagataatgaaataccttttatttaattctgctgatattcccatgtaagtgttctatgccaggcctctagttatctcatgccctttaagattagattagactctcatagcccccaggtttttctcactttccttaaaagccttatcaaaattttatattattaacatattatttgtttaatatcttctctatctcctccactttactacctcccatgacttttaactccttgaacatgataactgtgctgtaagtctggatgaagggtcagcaaatttcagcccctgagccaaatccatcccaaccctttttgtatgccctgcaaactaagaatgtttttctcattttaaaactattgtttaaaaattaaatatcaaaataataatagttttaacacattaaaatgatataaaattcaaatatgagtgtccataaagttttattggcacacagtcatgctcattcatttccatcatctttggctggtttcatgctcatgcagagttgagtaattataatagaggctgaacagctcacaaagtcaagagtatctaccatctggccctttccagaaaagtttgcccatccctggcatacagcacagctgtacttccagcacctgaaatttaataagtgattattaccatctgttggactgttgagtgaatgaatatgaatgcacataactggagacaataaagtttcaaagatttcactgaaaactataaataaatgaaaattggaatccttaaaatgcattttgtggtttagggttggataatcagagtcagatttactaaaaatatcaatattctattgatctcattacattaatcaattagagtttgagtaaggtgggcggggggctgactgtgagccctatcctactaatagtgcctactgcacacatcatctttttgaatgatttaatactgcctagtgagatatttgatagcactcacagggcatgtattaaaatcataaaatgatcaacacaagtatacttgatatttcttccaacttgtaaaataaagaaaacttatattcattcactttaatgtttctcccaatttgtgacttacaagttttatgattaaaatggggaaaaaatcattgctactaatgacattctatgctgtctttcagaacacagtttcagaaaacagtttccagtgcctctggccttcctactgaaagcagacacagagtgcatgaagaccgttcaaatatgtcagggacctcctcccatgagtccttctatgactccctctcagacatgcaggaagaaagcaagaatactgacttcttcccgggcctttctgctttcctcagccaggaagagataaacaagagtcttgacctggcccggagagccatagccgactccgaaacagaagattttgactcggaaaaggagatctcgcagattttcagtacttctcctgcaagcctctgtgaacatccttcccataaggagaccaaattgggtga

SEQ ID NO: 33001 - DNA, 2300 bp, Homo sapien
agctcccaaagattgtaattcagtagttctgagcagggctcaggggaatctgcattttcaacaagctcccccaccctcccatcccttcctgggtggggtagatcaccctcaaaaatcactgtcaccactacctctcctgaccccaaaacgccacaaaccgcgtaacgttgggatagttctcatttggagcacaagcaaatgggcaggcacatcacagaaactaatggcagagttttcagtaacatttgacaccactaacagctgccacccaaaaggcagcctccttgtgtggaagaacagcagaaatttcatctacccttcagtttcatccccacaagcaagcaggaccagtaaaaggagtgtcctctctgtctaagacatttatatatgttgggtgtttagactaaatttcagacttctaaacattcacaggtttagcgaaagtagttggaggggcttcttcagatttctgcgctcatggtgatcatatactgaaaccctccaaatttttccttcctctttcgcccaggcattttaattaatacaatgtccttcctaattcacagaggaaagatctttctaagaacccttgctggagatgagaaaggtggtaaggatctgaaatgtgtcttagcaagactcacccaacagggccaccctgcttcattgtgatgcctttcagataaacgaagtattcggctcttgttattcaatgaccctaataaaactttacaactgaagtgtagaggaaaaaaataaataaaaagatctaatgacatacaagaagggactgaacctgtcaaccccagaatattttcagtctgaaaagcaacctcatccttattaactttacattgattcccaaagagcggaaaatttaataaggaagaaaaaattcaatatttcatgactcaccacttcctcgggataataaatacgaactaaagatatatacactgaacgcttttaacattttattttcacttcaaaaaatactgtttgcactatctctactattgacctctcaagatgattctatttccggaacgcattttttgatatggtttctaattcaaaaatctgtcacatctttgatatttcataggctccattaaaattaatagcttcatgggtccctcatgagtttcttccttaaattttcaaacggtttgtggtctgtttctcagactggccaatgacaagcagttctgggactggaagatggaagtagtgaaataatctttaaaaatgtgtaaaaattaagcactgtctgccaggggctttagagttggcaaatagctaggtctttattaaacggttggttttgtttctcctgttgtttcttcctgatatccgtctgtgtggtaactgagtcactatgacataataccgcagagaaagactgcaggacaaccagacgtacacatgttcatccctcaatgagtcgcaaccttgggtctgttccctagacattggtggaaagacttgattaatggcagacttgttcaacataaaaaagaacaaagaccagatttattcttggcattccctttcctaggggcttacttgtaatggggtaattaatttatggctttgcagtaaggcggcatcagaggagcaatttaactcacaagaggtaacgcagatggagagtacaactgaaagataccttgtgtggaagggtacagaaggaacctcaagctggacgttgatttcttttatcagtaatacaaattcactactagctgcttcttggatttccccccttgagagctgcaacgtttcctaaatgaacagaggtctttagggaatgcctcaaaccacagctgaatggggagtggctttagaaatcgccggtggaacttgcctgttaccttcttacaattccccccgcccctgggcaacgcaaaagccgtcctaagtgcgataagagcatggagtgaagggagttatttctggagtttagcagcattcctccccaggacacaccctctccccctccccagcagcccggcactccgacacactccgcgcacacgcgcccctcggcgagacgcggcgcattcgcgcgctggagaccggcggcctctcaccgagcctgagtcgtggccgctgcgccgccaggaggcttcccgggagccggcggggcccaggacctctcgagcgcagcaggcaaggggccggccttttggcagcgcggctgccagttaattttctccgttgcattctgcaaacgagatcgcattcagagcccagaagttgcaagctgggaataagcgagatctgaaagacccccaaga

SEQ ID NO: 33002 - DNA, 2300 bp, Homo sapien
taggttacaggccaggtgcagtgggtcatgcctataatcccagcactttgggaggccaaggcaggcggatcacttgaggtcaggagttcaagagcagcttggccaacatggtgaaaccccatctctacaaaaactacaaaaattagctgggtgtggtggcaggcgcctgttatcccagctacttgggaggctgaggcaggagaatcgcttgaacccaggaggtggaggttgcagtgagccgagatcacgccactgcactccagcttgggtgacagagtgagactttgtctcaaaaaaaaaaaaaaaaaaaaaagttataggctgagtgcggtggtcacgcctgggaggccgaggtgggaggatcacttgagatcaggagtttgagaccagcctggacaacatagcgagacgttgtcttgaacaaaaaaaaatgttttaaattagctgggtatgatggcacgtgcctgtagccctagttactcaggaggctgaggtgggaggatcacttgagcctgggaggtcaaaactgcagtaagccatgactgcaccactgcacttcagcctgggcaacagagtgagaccctgtctcaaaaaaaaaaaagttacaaaattgtatggaaacaattatctaagctattttaagtgtgtgtttaaatacacatccaaaagcctggaggactatattttaggcagctaacaatttatctctgggagtaaaatcacagggacattcaattttggtttattgtttaaagaacaatatttggtttttaatattttacagacatcgttattcatttaaaagtcaataaagatatttccgagagaggaatagactacctggctgaagacagtgaacctagcaatgctagtgttagatatcagtaatgacggcaggatacagttacagtactaaaccctttaaacaagtggtctactggctattcaaaactagttagcatttattggcagttactgagtgaccacgttaccgaaacagcctggcacaacagtaagttcagtaaatggtagatattaccattcattcattcattcattcatgcattcattttgttaacagcttattgtgtgtgaaagatttggtcccagtggccaaggagcacactctggaaggagaaagaagacagaaattgttgtgacatggtgtgccaacccagctactggaggattatacacagagccaggggtgtccttagctgatctggtgaaagaaaagttggtgatctggatttagggctaagcccacaatctgtcacaaattttgcatagaatattaattctggaacgaatgagtccagttcctctttgaaaacacttctacagaagttcctgtgtagatgagcgttaaaataagtgactcagggcctccagtagtttatgagctaagaggatcacaggataggatagggaccgggttcctcagatgttgctagatcaaatgctttactcttctcaccctaagggctcctgaatttagctttttattacacagaacccagtaaactaattaatggaaatctaaaaattatccttcctcttcttagaaaagaaatatactgcatgatgatttgtgcttttcgatttaatgtcacacaatcgtttttacactgtatgtgctttccctccccacagccccagtcccagccccagtctcgcagttccattccttcagggcagcttccattctaccgtgagtttttattgctttcccctaaaacgctgccctggagtcgcgtttattggacactctttagtctgtaaaggaaaaaaacacaaacaccggaggagaatcatcctaacaagccgacaacatatctatgggcctaaaaaacttaaattctttcccgttattagcacttctcgatcgttccaggaaagcccgatttgtagcttggctgccccaggaaggggcctgcgaccagaaagatgcaaagggcgggacaaggttacgagtgggtgcggggaagcctccctaacctgggggccgcgtcccagagctgcgagccacgcctcctctctcccgcccgccgcgccgccggactcttattttgaagggcggcgggtgaaggctcggagcctcctgagtcacccggcgggcgaggtataaagcccgatacctgccccgcgcccggtccgcggagcccgctgcagctcccgctcgctccggacgcggaatcgggcagcagcgggaggcggcccggagagccgaggtaggcgcggggaatcggccctgaggctggtggaagaaatgtgtgaattaaagggagtgcagcgtgcag

SEQ ID NO: 33003 - DNA, 2300 bp, Homo sapien
gccagttctaaatgcatgaatgccagagcacatgtgctggacagtctacccaaaccacacagacatctggaacttcagggcagtggtgaatcccagcagtgacatgcctacttttaaaacactcaagttcaataggaccccacaaagttctttgctgttcaagtatttgatgctctgtacatattaagaacatagaaccatctcctcattacacctttcagttcccaagaaagtgtgtctttgtcttctcatggacttaagtgtaatcactttactggataattatagaagggaacagaagacacaggacagagtttagaacttgctgatgttcccacagctcatgatacttgagaaaagacctagatattttttcactttttattggccacttcaattctttgtattgctgagtctctgaaggcttgatttttgcctatggataagaaagttttggggtctgatttttagttttaaaacgtttattgtctattcatagataacttgttttatctgcttgttacagtgccgccttctgttgaagtttcttttgacagctattggtccctatgtttacctcatgtgaataaaggaaaacatcctggatgtacagcaaagtttttgagtaaaagagtgagatattagatcattgctagctgcttactcttatttcagaaataaaaatttgaactatctcttctcaatggtaaatatttggggaattaaatatacatcattacaaaatttttgctattgtttattgaacacctacctgttatagaagtcacttgtttacatgtgtttgaaataacatacaatatcaatgtgtattaaggtttgtgtaagaaattcgcaattcagtttactactaaaattttgcataaagactttcttaggggacaaatgtagagattaaagtaaattttttaaaaaatccacctgtggtatttattgaatgtagagttgacagcactgaaataggcaaattggactaacgtaaatctgccaaatataacttcaaccaagtgtttttttgcttttaactttctcatttgatagaattcttttaccaaaaattggctacgaatgagaggactgagaattgatgtcgaaacgtttttctcttaatatttcttgatccgttaaaaacaaattatggctcctggaagtcagacaaaatttccatcaggatttgtaaactggttgggatcaccttatgtgaaacttaaatgagagtgaaatgggcgagcatacttcactgacttagcgcttggtccagaatgaactgctggccccacacttgggcctgctaacgtgtgcccgttccctgggtgttctctgcagctggcctaagtgccaagcgatgtccacaagctgagctcactcctggaatacacgttcctggccgttccatctctgaaggtgtcacttctctttttccccccagggaccctctgaagctccagcaactccagaaccaaatccgactggagcaggaggccggcgctcggcagcctccgccagccccgcgcagcgcgccgccctcgccccccttcccgccgccgcccgccttccccgagctcgcggcctgcacgccgcccgcgtccccggagcccatgagcgcgctggcctcccgctccgcccccgccatgcagtcctccggctccttcaactacgcgcgccccaagcagttcatcgccgcgcagaacctcgggcccgcgtcgggccacggcacgccggcctccagccccagctcgtccagcctcccgtcgcccatgtccccgacgccgaggcagttcggccgcgcccccgtgccgcccttcgcgcagcccttcggcgctgagcccgaggccccgtggggctcctcctcgccgtcgcccccgcccccgccacccccggtcttcagccccacggctgccttcccggtgcccgacgtgttcccactgccgccgccaccaccgccgctcccgagcccgggacaggcgtcccactgctcgtcgcctgccacccgcttcggccacagccagacgcccgcggccttcctcagcgctctgctgccctcgcagccgccgccggcggccgtcaacgccctggggctgcccaagggtgtcacccccgcgtgagtaaccgccgcggtcctccacttccctgcccctccgcctcgggtcgccctgggactcccacatctccatacacgcgctcccatcagcctgcaacccagagcgccccagtaacatttcacacatttctctccgtgcgatgtaaaaattcttaacggcaatttgactcagtgattcttg

SEQ ID NO: 33004 - DNA, 2300 bp, Homo sapien
aagtgagaagcagaatggttgtgtgagtactcacagcaccgttactaccaaacgcatattgctagcacaaaagtttcacttaaggaaaattagaaatcttgctgcattcttattatttctattattagtcttcacatctttttttctaccattacaggacattggttctcctcatgcttctgtagggagtcctctggatggtcaaaaggttaagcttttcacctttcttctccttccagtctttctctgtgtctgttttcttctgttcttcctgttttacgtgtgtttctatcttttctgccatatattaattataaatgctatgaccagtgtctgtttcatttaatatcagatacacaaaattactgcaacatgagttttcttgtcatgtatttaccagcttgaatttatttatttatttttactttatgtatttatttatttatttatttattttgagatggagtttcgctcttgttgcccaggctggagtgcaatggtgtgatcttggctcactgcaacctctgtctcctgggttcaagcgattctcctgcctcagcctcccaagtagctgggattacaagtgcatgccaacatgcctggctaattttgtatttttagcagagatggggtttcaccatgttggtcaggctggtctcgaacttctgacctcaggtgatccacccgccttggcttcccaaagcgctgggaatacggcatgagccacagtgcctggcctctgacttgaatttaattctgtcattagtggatactctgaacattaaatcaagaaaaatttttcatttgttatatatacctttctatggggaacaaaagtgctaattcttcaagggattaatttgatagtaattagatgaagcaaaacaacttgtggtataactcttgcagttttattcatactgttgtatttcttccctcaaaccaacaaacttgttttttaaacactgagtaacttctttaagagaaaacatagttaaagttatctttcatttaatattaaatagggaatatttacatagactcccttgtcttcattgcacttttttgttttggagacagggtctcactcttttgcccaggcttgagtgcagtggcacaatcacggcccactgcagcctcgacttcccaggctcaagtgatcctcccacctcagcctcccaagtagctgggacaacaggcatgtaccaccatgcccagctactgttctttttaaattttttgtagagatggggtctcactttgttgcccaagctggtctcaaactcctggccagaagcaatcctcccacctcggccttccaaagtgttgggaattacaggcatgagccactgtacctggcctttaatgcactttgtaggcaaggaaattgtaggatccaccgtaatcaccacaggaatgttgatgggttgttttttttttttaaagcaaaattttggctagactgtcagtcctattttttcttctaaagatggtgggttcctaacagctgcagagctgaggaggcggcccttgcaaggcagggattgttagaggtgggggaaaaaaaacaaacatttttttttttctattattcttttactattttttctattaccattttttctagtaccattttttctattattcttttactataattgtatataatatggcagctgcttgccacatgtactatgtggagagatgtaccaccctgcatcagcttttaccctacagaaggaaatcagcgttccattatattttattgttatcaacagtttaggaatacatagctttgcttttgcctttttctttccttccccttgtttcccctcgcctcagagaaaagaaggaaaaaaaaattcatctttcctacccccctctttttggatgataggacttgaagacaatctgaaataccacataaactcacttccagatgttttttgtttcatatgcaattgaattgggctcagactgtgtttttaagctgtatggtaaaaatatcactgtcttctagggccttattggggggcagggagagacgtgacactttgtcagaagggattgagtctgctaacttaaactttccttgattcaggaatacaaagtctccagctgtgaacagagactcatcagtgaaatagagtacaggctagaaaggtctcctgtggatgaatcaggtgatgaagttcagtatggagatgtgcctgtggaaaatggaatggcaccattctttgagatgaagctgaaacattacaagatctttgagggaatgccagtaactttcacatgtagag

SEQ ID NO: 33005 - DNA, 2300 bp, Homo sapien
aatagacaaatttgatctgacccatttttacatcactgggaaactgtttgtttgttttttagaacactgttattttgagacagggtcctgctgtgtcatgcaggctggactgcagtggtgcaatcatggctcactgcagccttgacctcctggacttacatgatcctcccaactcagcctcccgagtagctgggaccacaggtaggccaccatgtccagctaatttttttttgtattttctgtagagatgggggtcgggggggtgggggtcttgctgtgtttcctgggttggttttgaacttctagactcaagcaatcctcctgtctcagcctcccaaagtgctgggattacaggcatgagccaccacgcctggcctgctaatagttcttaaatgcagctcttatcttattacttctgcagttaaaggcctgtttaatgcttggcacctgactttaaagctgactataatatagcaccatcccaaatttcctcaggcttgtttcctcattgtttcaaacatatattgtttcaaagacacaatttttatgtgtgactgtttgcttatattgtttaacttcctattgtatttgcttttaataaagtctaatagatgctatgaaaacagccttacaatctctttttcttttcatgaagctcactgtctactacaatgcttagtgtgccatttaggaggacctatgaggagggagttttgctcaggcttctctgctgcataaccaggaggctgatttcttacagaaattaccacttgtaattatatttcctttgttgctttcgctggcaggaaactctaagtttatgaatctcttctttaatactaaatagattcttatagcatgactttattcgtattttttccactgacctaatttattgttctggccttgtgggagaaggggcagtggtcctctttgccttttaaattcaaatactcatgtatttttgcaaaccatttcaaatctttttttggatctaaatggaataggaataacaaatttaaattaatgctcaacttgcttatttatagactttttgctcttgttttccttttttcaaacctcatccagccctcaaatccagcttttccatgcaccccttcattcttcactgatctccattttctcggagctcttgtgttaatataattttgcattttactaagtatgattttggatacctcctagtgtttcatgtgtattagtcctgtagttctgggttgtagtttttttagtggtagggaccatggctcatacttttctgaatctagtaaaataatattgtatcagaaatgctttctgtttacactataattgtaacaaacattgaattttttagcttattaactctcagagcacccagtacatcttatttagaattgcaggaacccatttttgtttctctacagcagccgaagcttgtttcatagatcttgcaagactattcaatcattcagttaaaattccttgacctcctgctggatgatgttcgacagggcattcatcttcacgacacccttcgcgatgaatggtaacatctgggcgggtagaggtccatttctacagcaacctgggggaggaacaggtagggtaggttttggtgtgggtgcgattcttggggacttcttcaacaggtaggacatcaagtctgtagccaaaacaacacctgggcgaagggcaaataccggagccccgaccggctcacgcccagtaatgctttctctgggttctaactacgtgatcaggtcgtcttggtttgccagggaaagcccagcgtcttgacaaccctgtcagttccgaacaaaccgggtcgattggtcaccggggctcgaatcccgactgatatgacccagcggggacagaggatccccctcagtgccacaagtacattccccaccgagcagcgcgcctgcgccagttgctctcatgcgtcaagactacaggtcccagcaagcatcgaggccctctccaggccattcttccgccggcggggagctctcgtcggcgtatttgttaggtgtggcgcggaagagtccgtgcgtgatgacgtcgacgcggcgacgtcgagctcttcctccttttcacggcgtcttgcattactattgtgcggctgcaggaggtgtcgagcggcgttatttttttttgcggtttgcctttttttttcttttttttttttttggaaccgcggttgtttaaaagcctgagggaacctggagaggggctcccactccctaccctctttcctccgagtttgtgactccgagatggacaaagtgtgtgct

SEQ ID NO: 33006 - DNA, 2300 bp, Homo sapien
acatgatatcaactagatttgatagtttcctctattcatattttttgcctcaatgagaagaaagtcttctcaactccctcctctacttcttactcactgggacaggagtgctgagttgatcagtcagtttccagcacactgattaggtttgcactttcaaagatttgtttctaggtgtctaaataagcttatggtggaagaagacattctctggctcctttttctccagcattgccaggtgtgctggcccttcatttcatgaggatgttgtgtttgggatggaggagatgaagtagcttttcaatctgctttgtttccaggctccttacacccaacctgtgcaggaaagaggaccctacccctccatggttcactgcagtttattagagctctacagtgaggttcaggccactcccactataatataaagcattactttgcttcatttgggctttttattctcaaggtgggatagctagaccaagaaaggatttgtaaattctggatctcctggccaattgccttgaaaatgcttgtaatagggccaccctcaactagaacctcattttcatccctaaacacatatcggaagaagtctttatgatctttctcccgccattggtacttcaggcattgacaggtgttattctggcgttactgcctattatttctgaatgattatcatgtggagaaacttcttaaagtctgaagaagagatatggtcatgtttgataaagatttatcttactaattatagatgagacaagccacctgaatttgagtccccaaggagccttaggaacaaattgtcagtcaatttgcaatcatctgtagaagcagtgactgctgagctccagttaacatggctttgtgaggaagcggttgttccaaagcaagttcatttcataaaatattgactgagagagtttccattcttctagtagagtgatcttatcaacaggatgagaagacatagcctgaacaatttaagtgggaaaaatagtacatgatattattttatataaagacatttgtgaagtgcccaatgtgtaatgccgagatggaaaaatcactgttttccttaatattatatttaagttaccttttaaaagtttattattttgcatctcaattttttttgagaggttgagctatgtttccattactgtaatatctgggaaagttatatgcagcttattgtcactgaagctttccagaaatgttttattttaccctagggaaaacaaaaggcttgtgttctttcctttcttgctgataatatcagtggagtgcacagattttgacccctggtactcttaatttacactggggcttttcagatagatgaagttaacttgccaataggacttgaatttcatgtcttaccctgttatgatttaaagtacgtgcacataggatgatagctgatacaatgacatgacaaaaaacatattaagagtttctgccagctttttgtgaggttctcccagaatacagaaagaaaggcaggaggtaaatatacatggaagcacatgagttcattttgaatggttttattctttgtcttcttgctcatttttaccaaacccagaagttgccccttcattgttcagttgtgctttgagcaaatacccaaccattattgtgcaacagggtgtcacgaaaagggtgataaatacaccattttgattgctcttctcgaaatttcacagtgagctgaaataaattttcatttgttattggcaagttttaaaatcagacattatggaaattcttaagaaaattgtcttttactctttcagtcttgcaatggaattgtttattcttgatttaatatctacctgtgatatagatacaatgaagtcccaatattgagagaagagatatctcacatgggaaaaacagacactgcataggcaaactttaaagtagtgactttaaattttggatgaaatcatgttggaaataaacctcagggaattcttaggaattgtttaaccttcttgtgttggtttgttggttgcttttgcagtttaactcggctgctaagcagctgatagaatgggataagcctcctgtgccaggagttgatgctggagaatgttcctcggcagcagcccagagcagcactgccccaaagcactccgacaccaagaagaacaccaaaaagcggcactccttcacttccctcactatggccaacaagtcctcccaggcatcccagaaccgccactccatggagatcagcccccctgtcctcatcagctccagcaaccccactgctgctgcacggatcagcg

SEQ ID NO: 33007 - DNA, 2300 bp, Homo sapien
tcaagggtataaaactttgatccactttttacaggtcggggggcagacaatgatataagtaatgctaactatattgctctacttcattggaaatattaaacttaaaaaatattcaactagttgaggcctgtgctttgcacatagctctctgcctgcctgcccacttcacgtccattttccacactactgccagactgatctgtccggcacataggacctaagtctgtttgtgcattaaacatggaaatgacttaccattaccagaagaacgcagcaataaaaactctttcatatgttatacaagaccctcaataaactggcctctgcctacctctcctttatgttccgtaattcttatccaggaatactgcattctttatgctccccagtcccgctgcacatgtgacttcttacctccaggtctttgctggtgctgacccctctgcctggaatgcccttactgttctctttcattcattcactccaaccttgacaactaattcctgtgcatcctttaagacttggctcatgtgtcacttcctccaggaagtgtttcattttcctactcaccaaacacgagagacctatgttttttgtccccataaatggtgtgcatatctttatcattacatttattacactgtattgtagttattactaatatcctttaagaaaagaactgtcttattcttctttaagtcatcagcacttgcacattgcgtggtaaaaagtaaaagcttgcactgggtgcgatggctcatgcctataatcccagcactttgggaggccaaggtgggtggatcatttgaggtcaggagtttgagaccagcctggccaacatggcgagaccccattttgtaaaaatacaaaaatgagccagacatagtggtgcttgcctgcaatcccagctacttgggaggctgaagcgttaaaatcactcaacccaggaggcagaggttgcagtgagccgagattgcaccactgcactccagcctgggcaacagagcaagactccgtcttaaaaaaaaaaaagaaaaaaaaagtaaaagcttgataaatgttttctggaagagtgaataaataaataaagactccaaaagcaggagccctgtaatcttgttcagggaattattatagacatgttggatttgccacttatctcctgaatcaacgatatgcaacagcgctcagagaggccaaagatcttaaagtgacaactgatgctcaagattgggcacccccaatgccgttgaaaagtatcatattaatcagttgatgattaaattgcactggggtttatgtacacaattttaaacttgtcatttaaaacagtaatgcaatgcaggaacattaaattcctcatctcttagcttatcagcctaacaatgtgctctcttccaggaaagagcaaagttgaatgatcttaggctgtaaaagaccacgtgtctatacacttacagattataaacttggggatggcaggtactgtgactgttcactcactgctgtatccaggagtagaccctcattaaatactcattgagctcatgaaagagtaagacctactgcccacattaaaagcaatatcaggaagagatttgcctaaaagccgaactctgatttttatcaaccaagcttaaaagcagtttagtaaattaataaatttggtttaaatttttcccctcagtatctatcatttctcctcagtgtttatcatttatcctgatgaataaagtagttaatgtaggaagttaagcttgttttttatgagttcttgagaggcagacctggcagtcatgctttcatatactgataacctcaaagaaagaaggcaaaacacccaccaagttaaacttaagaatagaagcctaaatcatggctggtgcatgggtgtcgtactgttcttatgtcactatggacaattgttttgtgttttctatttattggtaacacatatatattgtttttgtgtgagattttcttcaagggttacagtgtggttttgactttgactttaaaacaatgacaacgcagttgtattttcagagacattttaagaccattattttattaaaattcatccctcttttttttttaaagggtatacctcagttaccatgtgccaaagcattatacaactatgaaggaaaagagcctggagaccttaaattcagcaaaggtgacatcatcattttgcgaagacaagtggatgaaaattggtaccatggggaagtcaatggaatccatggctttttccccaccaactttgtgcagattattaaaccgttacctcagccccc

SEQ ID NO: 33008 - DNA, 2300 bp, Homo sapien
cgcgggaggccggcgcggcggcgggtggctccgagaggtgccgcgcccgctcccggggaaggcgctgtggcgcggggccgcccccttgcgccccgggcgccggctgcgtcccggcctcctcctcctcttcctccgccctccttggctgggaaagtgggaggcggcggcggcggcgtggtgtgtgtgcgcgcgtgaggggggcagcagagaggagtctcccggtgccgccgcggcgtcagagacactgcgagcggcgagcgcggtggggccgcatctgcatcagccgccgcagccgctgcggggccgcgaacaaagaggaggagccgaggcgcgaggtagggcgcgcggccggcgcggggtcgacggggacccagcgtcggcggacccctagccgcggagaaggcggtggtctcgacattcccccatccccgccctgggtcggtctctctctcccctcgccctcgggtccccgtgggccgggaatcaggacctgcggaagcggagcagcccgcggcctctgccttctccgggcaggaagctgccagggctccgtgccgcggtctccccgggcgcagcccagcaccccctgcttcccggatggcgcggtctctctggggactgtcgccttatcttggctgggctagaaagctgcttccccgtggcactctgtggggctgagtttcgcaacttaagcctgcgcatttatttttaagtccttgaaaacttcccgcagtcgtgtagagggatttgtgtccccggcctgagctaaagggaggcggagatgagggaggctgtagggtgagatccccacgccgggaccggccgggccgcagccccaggccgcgaccggctcctgccgggtgccgccgacacctggccccggggtgtgtctgcggcgagcggccgccgcgcctccctgcgggcttgggagtacctgtgcttggcgccgtgggagcgggggtgcagccctggggctcccccgctccggctttgtcaagaacagctgttaatgctcccagccaaatctttttactcccgttctcctgggcattcacttttacatttattttggcggtggggggagagcggcgcagtaagtggcttgctttttcctgaatggcctcattttcatatgcccacagtttccagtccaaccttccattgtcgaattcttttggtgataattttgccagcttttctgaatgggattaggacaggccgttcagaaatgtgtttcagagtttatcaactactgccctgaagggcgcttttctgttttagctgctttcaagcaaatctgtgtcttttagaattgtcaaccttcagctctttttggttgggcaaaattaaacagttctatttttaataacagcgaagaaacatatgtatttaatattgggatcatttaccacgagcgattacatgaggcatggtttcttaaacgctaaagtggcttaaaaaagggaatttagttggatataaaagtaaatttcaggtagaggaaactttcaatggcctctgtcagcttctcctatgagttgaagactttattaaggcagctgataccactttcagagcttaagaaattatgttccttattgcacttcataaatccttctgcgggaattatgtaatactctgtgccttgtgtttgcccagtgaatccctagatatctttaggggttaattttgcgttgtttagaaagcctgttttgttttcagttgttgactttggagtttaggaacccacattccaaagcaaagctacactattcagacagggaatagtgtacttttgggtactttttgattcttggctcctttgaactttttccctagataacaacactcatgttctcttttcccccttttccccatgactctagagcaaagtctgaaatggatgttacatgagtcattttaagggatgcacacaactatgaacatttctgaagattttttctcagtaaagtagataaagatggatgaatcagccttgttggatcttttggagtgtccggtgtgtctagagcgccttgatgcttctgcgaaggtcttgccttgccagcatacgttttgcaagcgatgtttgctggggatcgtaggttctcgaaatgaactcagatgtcccgagtgcaggactcttgttggctcgggtgtcgaggagcttcccagtaacatcttgctggtcagacttctggatggcatcaaacagaggccttggaaacctggtcctggtgggggaagtgggaccaactgcacaaatgcattaaggtctcagagcagcactgtggctaatt

SEQ ID NO: 33009 - DNA, 2300 bp, Homo sapien
ggtgggtgccagcctgggcaataagagtgaaactccgtctcaaaaaaaaaaaaaaaaagaaaagaaaagaaaatgggtgtgactattgattttcttttgccaggagtttcaagagctgcaccattctatctatgaccttgtgtgctgctctctaaaaatacataggaaaccaaaataagaacacaataaaaactgtcccttgctttcgagtaattacatgattaacagtttcttctttcccttgggaagagacacactgctttgctttgcctagggtggggatatgacggtcctgtgcaaaagacagggccttggaatggtgcaaagagaactggacttggaatccagagagctgggactgagtcttggttcaacattacttactgtgtgaccaggggaaagttaacctatttgagcttcagttttaataactgcaaataatccctatctgtttattgactgtaatcttctggtcagcctcatcttcatctatctgcccagttccacatgcagaactaagtagtaactttcagtttgcaaactggactagaaattctccattccattcattccttccgtcgtctttctcagctcaaatgcccatgtatttgctcacttctaatggaaggggaagtgggctattatttttggttttcatacattatgactctcagcatatgaatctatttagaacaaggctgagaaaagatgacatagagggttgctgagagaattgaactgatgcatgaaaaatgttcagcacagtgcctgatttacagtgagtgatcattgttagctgtcataattttttcaggcttatgtgatccttatgtcttgaatggtttagctgtggccctagctggagactagaggataaactgagactcctcgtcaaatcataaacctagttggtggctgggcagagatttcttgcatcatctgttgtaaccctttcttcttataaccacctagtttctgcccacctttgaggaggggtatttgggataactttttgtaaattgatggtaaatgcaaatatagtaatgtcaactttagatcagtgacaaaattttaacttgcttctccactaaatcgagactgaaaaacctcaaaacctatggacaagatgtttttcaaaactccacttcggtttacaggtgtgtgcttggggcaaccaaaacaaagattactgcgatgatggcagccacccaggctcagataaaagaggcgcctctcagcgtgctttgcggtgccagcccacctgaggtcagactcaattctccccacttagggcagggataacagagcccccgagcctgggttggaagtccgtactaccgttttcctagtcttgggctttggggtcagcggtcctccaggcttgctccggtttgggtcctggggtgactgatggctgggtgcggacaggtggccgcggcactgtccccatcgattcaccacgccgctctcggccctaaggggcaacacttcgctccgactctaccaagtaagtgtccggggtgggcaaccagacgcaaagcgcagcgggatcggttcccgccagggctgctcccgccgcctccgcggacccagcccctcccgcgccgcgactcgcccagcctggggaggaagggtccgtccagggctcccagccccgccggggggaggaggaggcggcgggaccctgtcccggggcttcttcctgcttcccccagcctccactcccgccgccttcccgtccggtggctccatttttcaggcgcgttctcctcagggagaaggcgtccgtccccgagccttcccctcgtagtcccctgggggccccgctccccatcctctaggctcttgcagcgccccctcaggccgccgccccaatcccgcccccgggctccggcggggtactgggcgcaggtcacctcagcgcgggaggccggcgcggcggcgggtggctccgagaggtgccgcgcccgctcccggggaaggcgctgtggcgcggggccgcccccttgcgccccgggcgccggctgcgtcccggcctcctcctcctcttcctccgccctccttggctgggaaagtgggaggcggcggcggcggcgtggtgtgtgtgcgcgcgtgaggggggcagcagagaggagtctcccggtgccgccgcggcgtcagagacactgcgagcggcgagcgcggtggggccgcatctgcatcagccgccgcagccgctgcggggccgcgaacaaagaggaggagccgaggcgcgaggtagggcgcgcggccggcgcggggtcgacggggacccagcgtcg

SEQ ID NO: 33010 - DNA, 2300 bp, Homo sapien
cctggcatattggcagggcttattcgggtccctctccttcattttagtctcatggcattgcaatgtggtctttaagaataaactattttcatgatggcttgggcttccagatatcaaatagaagttcccagttctcttaaaggctcagcctggaactggcatagcatcactttcactgtcttccattactcaagggaatcaccatgccagctgaaattaaagaggaggagaaacagagctccctctagttgagaggaaaaccagaaaccctgcaaaatgtgaccatccttaattcaccacagtaacttaaataatcttattcattagaacatagttactagtatcattatggaacgaaagtttgttcccctccctaccccccaaaaaaatcatatgttgaaatctaatccctgatgtaatggtattggaagtggagtctttgcaaagtaattaggttatgagagtggcgccctcattaatgggattggtgcccttataagaataggccagagagctttctgctttctaccacatacggatacaaggaggaaaaggttatctgcaaaacaggaagagggccctctagaaccaaccgtgctggcaccctgacattggatccttcagcctccagaactctgagaaataagtttctattatttacaccacccagtctatgatactctgttatagtagcctgaactaaaacagtatcttatgccttttctttaaaaaagaaaagaaaatagtgttaggcatactatggaagctgtatagcctagtgcaggagttgatagaccagagaataaatattctaggctttgcaggtaatgcagtcataagtcaagtttatagaataagttgataatgatacagcttaaagtactaggaaacagaattattcattaaaaaataaaaaaggattttgcccccaagtgcttaccttgaatgaatgaccaaaataatcatttgaataaaagataaaaacttaaagattagtacaatatcagttgtctttccaaataagacagataattggaagctttaaaaatggagaagtatgtctgtattccaggggaagtaagagggatagtgttggcttaaacaggatattattgataatcttaattggaaaggaaaaagagaagttaacaaatactctcctcatcgctgttcacttttggaaaatattagccaggtgaaaaatgagccactgccagaaaacagaggtaacatcttgatgttaattgagggtcaggccaggcgtggtggctcacgcctgtaatcccagcacattgagaggctgaggcaggtggatcacttgaggtcgggagtttcagaccagcctggccaacatggtgaagccccatctctactaaaaatacaaaaattagcctggtgtggtagtgtgtgcctatagttccagctactcaggaggctgaggcaggaggatcacttgagcccgggaggtgtaggttgtagtgagtgagccaagagcacaccactgcactccagcctgggcgatgggagtgaaaccctgtctcaaaaaaaaaaaaaaaaaaaaaaactatttgagtgtctaagaaaatagatttttagtgccattcaattatgttctcaatatcattgtgaaagtcctggtaatagtttttcttttttgactattaaaagatagattttgaagattgaaattttattttagtcactaatcagtaatatcacagtctattcttccatatttctaaccacaaatatctttattctttaaactgtttttataccttccctaaatgaatttacatattactaaaattttaattgaagagaaaattttacataatggtgaaaaatatagagtataccatattacctttgagcatttttattacagtaaaaggcaaaagaagtagtctgtcgtttcagaaataactgaactaaagacttcacaataagagttaaaccctatagagagaatacttaatttttctgttttaatgaatatattaccctaaaactaggtagcaataatttatagcaagtttattcaatattctcttgacaaattttgctttgagatgtctctcgttacgtttatcctttgcagaacctgatgatttggaaacagaaattctacaagagccaagtggaacaaacaaagatgagagcttgccatgcactattactgatgtgtggattagtgaggaaaaagaaacaaaggaaactcagtatgtacatcttttcctgacattttaaaacccaggtcccttttgtaataacttttaagaaaatactataataagcta

SEQ ID NO: 33011 - DNA, 2300 bp, Homo sapien
cattatgttgcattctattgactattttgatttgctgctttgaaaattgcctgtttatattctctgcccttttttatatttcattgctttttgctatgttttaagaatttttatctagtatagctatccagccgggtgtggtagctcatgcctgtaatcccagcactttgggaggctgaggcaggtcatttcaggtcaggagtttgaggccagcctagccaacatggcgaaatgctgtctctactaaaaatataaaaaattagccaggcatagtgccgtgcgcctgtaatcccagctactagggaggctgaggcaggagaattgcttgaacccgggaggtggaggttgcagtgagctgagatcacgccaccgcactgggtgacagagcaaaactcaggtctctaacaaaaaaaaaaaaaaaaaaaaagataccctaacctcctcctcttccttcccctatttctttctatatatagatagaaaattttatatctggacgctgtactgattatttttactaaatctattaagctttcttccttgagatattagatgttccaaatgtgcagatttatcatcagtgacaagaaatagatttttatcctatattttgattatttcctattcttctgttagaacccactaaagcaatctttaataataataataatgcgatatggtatcctgattcctggtgttaatagacatgattttattgcagaatggtagggctgaaggaggaaaaacacagatgtgatctctgctacagtcagtttgttttggcaagcagtttgttgaagtacagtgcagggaaatgattctgaaacatttgcaacactatagttttgttctctgttgactagaaagaagtaaagagtaaaacaacttataaatacttgatgaacaacttttttgctctggaaattaactgagctaaggacagttcctgctagcccagtgttataaaaggactgcagccaacacaaagggcctacttggctttagaaacaatgaatttaaattgagaccaatgagcaaggatttctgtttttcttcaaccattttaaccctgtgtatgcagatatagtaggcagagaattgaatttatgcaaaattggggttttgccacttgaatacaataagttgaggatgcacaagagaatgactatattatggaatttctgtgaattttaatggagatgacagaaaatgtagcagaatcagtgcattgtaggtactttcagggtaaaatttttttagagttggagttgtagaggcggagaagtggaaaatgagtgttagagattagagggtggaatacttaacactggaaatttaaagaggctataattaatgacaagttctctaagatatgaccattggagtgctggagataggatgaagactgaggtagagtgaagtgcaacaaaccaagaggcctaccttttggaaggattattgatacaaatatagaaatcacctaaattagttatgacagagttagtgttggggagcttgtaacctggaaagtaaaatcttcaacggattaataggagtgagaaggtggtaaataactgcattaagctattctgaggtagtttttttttctttttattcttttttgaacctgtctcaggatgttctgaggtaaacctcctctctccttagtgtggagaatttcagagcaattagaagtaactaggagttacttcatataaacagaatcaactagttaataatttaaaaaatagtattctaatacacatattaattttaccaaaagcagaaagaaggtaaaccattttgaccaccatagaaattattatgtacaattgaaatgaaatttgactttcatatactgtagtcacttattaacttctaatatgtaacagagcttaactagtaattgcctgttgcagtaatgcagctttttgaactttgcccccaatgccattacagataaaatgcatcattttgagaactagcatgattttttattttttgttttcacagagatttctcccgaaggggaaaagtacaaacccttaattactggagaaaaaaaagtacaatgtatttcacatgaaataaacccatcagctattgttgattctcctgttgagacaaaaagtcccgagttcagtgaggcatctccacagatgtcattgaaactggaaggaaatttagaaggtatgttctaatgagtcaaaatgagctatatttgatttagtaaaaacttaaatttcacaagctttataaacagattatcaaaatttgtatatgtttgggtaattatctca

SEQ ID NO: 33012 - DNA, 2300 bp, Homo sapien
cagagttttcagggcaagaagtccaagatcagtgtgtcagcagggttgtgtccttctgggggctttgagggagaatctgttccatgcctccttcctaccttttggttattggatggcaatttttgaccttccttggtgtatattatcagcatcctgatctctgccttcatcttcatgttgtgttcttgctgtgtgtgagtctgtcttcaaattttccctttttatagggacaccagtcctactgaattaggacctattctgatgacctcattttaacttgtgaaacatcctatctctaaataaggttaattctgaggtactagggtttgagacttcaacatatgaatttatgaggggcacagttcaacatagcaatctcttagtctttccaacaatcctgtgtaactgtgtcaaactttgatgtgctagtcatgttatagagtatgttgcagtgtaaaaaccttagctatcaaaaagtagtttctgcccaggtccaaaaagaatggcatagactcacttttccctgttccttccctctaaatataactaaataccctggaaattatttagcatacaattataattggattataaatgccagaaagaaggtgagctggctagagacctcgggacttgagaaataacaccagggttctctgggttttctgtctcccgtatatcttggactgggtattagagaggcctgcaacccagatccactagacaaaaaacaatattaaacaagaaaagcctgctcttactcaccaaaggactggaaaaggggaatcccaacaaagatagggaacctcaacattttcctgacaccagggacctgatgagtgattcaagctcaggacagtggtgaagcctcaggctatccctgccccactccacaacttattcatggtacctccaccatggaagtctcccagcaacagccggtagcccagagaagcaacttccattctcacaagacagcagcagcagtgattgaacaggagctctggaagcaccagaagaatgaatcagaccagaagagtatcacaagttttcagaaaaccgaactgcaattgaaactaaagcccacaaaagtaggctagaagccgattgctaaactttgacaggctacttcctgcataaaatagattaagcaggactatgagtcttttaacataataacttgtcaaaccaagctgaatgcagcaaaaacacaatttgtgtgagaaatgacattgatttgacattcatatcaagatgaatcagatgtaggaattacctgacaagggtttgaaagttgctgtgatagaaatgcttcaacaatcaattatcttaaattatcttaaaatgataaaaagggaaaacctcagcaaacaaatagaagttttaaggaagaattaaatggaaattatagaactgaaaaacacaataatcaaaattaagattcacagattagactcagtagtacagtggagatgatgacagaagatagaatcaatgaacttgaagacataccagttcagttctctatctgaacaacagagagtaaaaatactgaaattatcagtcccaagaatttataggacaatacaaaaatttaacattgtatcttcaaagcttaaaggacaggagaaagtatgtgaccgaaaaatgaagaaataatgactgaaaatttctcacctatagatttaagaggctgagcaaatcctacaataagataaactcgaatccacactaagaaatgtttttaaaaagacaaatctgaaaaatgggagagagaaatgacacattccatatgaaagtacaccaatttgaataacagcaggtttctcatctgaaaccatggagtttagaaggaagtggtacaacatttttcaggtgctgaaagaagaaaaagtactatcaatctttaattctatatctgaccaaaactgtccttttggaatgaagtagaaataaagacactctcaaatgcaggaaactaaaagaatttgtttgtaatagagcaaaattaagttactaaggacaaagagataaaaagagacaaggtaacaaaagaatcatgcactaagaagttattgcagggggaggaaccaagatggccgaataggaacagctccggtctacagctcccagcgtgagcgacgcagaagacgggtgatttctgcatttccatctgaggtaccgggttcatctcactagggagtgccagacagtgggcgcaggccagtgtgtgtgcgcaccgtgcgcgagccgaagcagggcgagcattgcctcacctgggaagcgcaaggggtcaggga

SEQ ID NO: 33013 - DNA, 2300 bp, Homo sapien
tttcagagtctgaattagagctaaagttactacattcccagatgaactctgtgtctactataagtctcttctacttttataaaaatgtgattcaattaatacattatgtcacaaggtactgtattttttatgctggcagtgaaatgaagatttatatttcatgtgaaagagtacaaaattaaccaactcttccttttcaggaccttgaattttcctttatctttctcctggcatctatcctttagtttctttttttgttgttgttaacaaaattttaatatttcaagttaaaaggttttgagcaaatattccagcagatgttttggatttatattgactgcttcacatagaaacatctgtgtgattcaaaaggggtagcgtattttaaaaataaggctttattatttctcttagttttagaagaatacatgctagcatcaaacataaatgatagcatagtatatgtaattttttgctttttgttatgctacatacattataacatctatatacatataaatagtgaattatagttttcaggagtttttttcacattataatttctcacatgtatatttggatgatctttccaggtcaatcataaaaagtcatacagattcttaattagctttatcatatagattcttatcccagtggcacattacaaacagtagatcaaaagaagatatgtgcaccacgagtgacaagaatgtcaccacaaagtataagaaataaatactcctggaggctggatgcggtggctcacaattgtaatttcagcaacttcgggaggctgaggtgggaggatctcttgagcccaggaatttgagatcagcctgggaaacatagggtgtttgtagaccccatctctacaaaaatttaaaaaattagccaggtgtggtggtgtgtgcctgcggttccacctactctggaagctaaggtgggaggtttgcttgagctcgggaggtcgaggctacagtgagccatcatcgtgccattgcactctaacctggaccctgtctcaaaagaaaaaaaaaatactgctggaaataaggccatagcacagtcagtgaaagaagtgagaactaggaaaactgttctttgagttgtgatagtctcagtactatgtagtgattcagaaaatgttaaaagtgatattggccactcttccttacttaagaagtaagggatggaaagaatcatcaaagtgttcttctaagctggacacagtagcatgggcttgtagtcctagctattggggaggctgaggcgagaggttcccttgagcccaggagctcaaggtcagcatgagcaaaatattgagacactttttcttaaaagaaaaaaaaaagcctaaataaaaaaaagaagtattcttgtagtcctttctatccataggaagaagcacagaagtacctttctttgtggaccgagacataaaggtggatggggcagtgcccatcttcatgtttgttcacaaatcatatgcaattttttaaaaagtgcataaaattaaggaaagctcaaagagggtggaaacagtgtatcctatacactgttgaatcctcagagtttatcacaacacttattattttatttatttaataagtaagtgattaaagtggataaaacaaagcagagaattaatggccagtcagaaaactaagataacccatctctgatgtgatatattggtggaaaaacatgattttatgtgtgacatttaaggaattgtatttattgaatgaaatcaagtatgtctgcattttgtttatatttcagagatgtttaggtcaatgcaaacagcactattcaataaaatagtgtatttttaatagaaatcattaatgatggagttttctgttaacctaagtcattatacaatctttgtgaccggtataccttgactttgtgccctaattcttttgagtatggtcctgttttttgttcagcagctgctttttagtaagcttttaagtacttttaatttagccatgcttttgatgtacgtttttaaaagtggactgtaatgtttatattttgtagaaaatggctctctctacatagtaatggattactgtgagggaggggatctgtttaagcgaataaatgctcagaaaggcgttttgtttcaagaggatcaggtaagtttgcatttaggaaattgactcttactctattattgagaagtagttcaaaatttgtttatgtgtgtatttgtttttaactacaaatgctaatcaaaattactagggaagtttagtatatcaatagtttactcatatttacctctaattagc

SEQ ID NO: 33014 - DNA, 2300 bp, Homo sapien
ttcatatactattaaatttaaaaatgtacgttgcaaaataatatgtatactatagtcccggctaggcacagtggctcacgcctgtaatcccagcactttgggaggccaaagcaggcagaattacttgagctcaggagttcaaaaccagcctgagcaacatggtagaacccatctctacaaaacacacacacaagaagcctgggcaacatggcaaaaaccctatctctacaaaaaaaataccgaaattagccaggtgtgatggcacgcacccatggtcccagctgctcgggaggctgaagtgggagaatcacttgagcctggaaggcggaggttgcagggagctaagatcgcgccactgcactccagcttgggaaacagaatgagaccctgtctccaaaataaataagtaaataaaagactaagactaatatataaaatataaaaatgcatgcttatgtttttaggaacttagagaaaaatgtagatgatattaattaactgttaacattggtttcgtggaggacagcacagaagagctctgggaaggagacgataggctttatctttgtgtacttgtgttactggcttgttgcaagaagcaaaaacttttttgtttgaaagaaaagtccaataaaatatttaaagaaaaagaaaccccaaagcactcttgtttaaaaataaaaaaaaaaatcaattgtacaggggtatataaaccagaaagggaaatcaggtaatcttcttaggtaacctgctttatttactcatcaatatatcaatggtatctttgtatgtcaataaagtagatcttgattactcttttaaatggctttagagtatttcattgtttggatatattataatttaatcaattctttattgttatacatttacagtatttctagtttttctggttataaacaataacggttatccttgtatataaatcattgctcacttgttccagaagttaaattgctgagtcaaaggatatgcatactgctagcataccttctagaaagactgtagcagtttgtagtcctaccaatagtttatgacatgagcctaaagaattatctaaggaggttagctgactagccattcttcctgtaagcagcaaaaagaatttgcttagattagtaattggcaacatttcacttcactttgatgtacaaaaggatgtgggtagaactacaattgtgcattcagacatgataattcctactaactgggggtaggagggcccacaggagtgtagactagaagtagaaagaatgaggaaaataagtcttttgtagctgtatggcgattgaagaggagataaaacaaactctccagcttttcaggttgggtgacttgcagcgccatcgtctggcaaagccgccaaaatctttcaatgtccctaggaataaagttgccctgagtagggccactcaggatgacgccagatgatatcccttattatagttttaggggaatctcttcctaccttcgccagtcctgcagtgaaaaaatgtacttagactgctgtacatttccaaacccttcaacatacagacaagtaatttatacatacattagatgtaaaggtgtagaaaaccccatacagctttttaaaaatatctcaagacttaaacattcttctgtttcaaccatccaagatataataggaaaagacttgctttttaaagcaaaattgctctttaaaatgtggcatccctaagtagtgcgctttcatgtaaaataaaaaagtccctttctcggtgtagtagctgtgggaaaattttatatgctttatattccaaattggtttcaactagtgagttctctcccgcatctctgcatgactcttaacagctttacactctctccatccttttcatctctcccgtctcgtcctttctgtcttcccgcctgcagagcccgcccctcccgtcccttcgcacagcaccccgcccgccccttcgcacagcaccccgcccgaccctacggttctagcccagcctcactgctccttcccagccgcctccgctgcgtgccgccttccacgcgctgacgtcacacgccagcgccggtgacgcgccggccgctctcccttagtccgcattcgctccagggttttgggaccctaggttgcggagtccttaccctaccctggcctctcgagcagttgtccccataactcggaatctagagccgctgttgcgaggcaggagcacgtggcagtcaagtagcttcccagtcccgaacgccgcccgtccccaccccgccgtggccactagcaacgacctctgtgaagttgg

SEQ ID NO: 33015 - DNA, 2300 bp, Homo sapien
ctatggtgcttaccctgtgtttcctcccaccagtctgttgaacaggaagttcaacatcaccagattctctgacaaaaacaccagaggaattacagagaacgttttttcccagatgcgatctattgttttatcaccaagcaatcacataccacattgtttaaatatattgccccatatgtaacacagtgtttctgactgagcaccttggatcaactgggaagagttaaacacaggaatgcttaggtccaacattgaaacaattaagacaggatttctgggagtgggacctaagcaaggatatttttctgaagctccctagatggctctgatgcaaagtgaagattgagaactactggtgcgatgattatgtatgccagagaccatgactttaagttcttataaaggaataaggtagtacataatagggataatattacaaaaaaccaaacgtacaaatagacttgttcttgcacacttaagagagatccttggaacaatcctccattaagaaactacgacactaccatgaaataatttttcatccttatagaaagcaggtaagattgactaatagaccacaactactgtctacattctcaaaatccatgtgcctttccaaaattagctacgtaactacagtgagagagaaaaaaaaatgtgagtaaatgtcttgtgaaaaattccacttggtttggaaaaatttttgcctgcttttccacattttctaagaagaatctaaagatcttggccaacagtgtcccaggtaagagaaaatcgtgcttgggtatttccatagttctacaaactctacctggataaaagtaatgaaagaggtcctaagaagcttgaccgcactgtgatcaccaccatgggcactataccagctctgaagcccagaactgtctttgagaatattcaatgctgccctagaagaaataggagaacaaaactcacgtgttcctagcctgcaaaacagtcggtggagcacgtatatgtaaaaatagaaaaggctggcaagaccaggtcatatttaatattcatgaggcacaagatatacaacacgcacttaatattcattaatcagtatatattcataatatactaaatatacaggagatattaaacgttcacgggtcttaattctgccacccagtggagacactcaaaagtgatctcgccaaagaaatgcaaaacctgtacctgcccaccaggctattagcatgctactgctgtggccaccattctttcactgcatcgccctgccctgcatcggaatatagcaccttgaacacgggatcaggtttactgaattctgtgacccacgctgggagctcaataaatgtttgctaaacggaaatgaacccaattcagaccgtgtagaaaccccagattatatcttttctccaaacattcaatttccaagcagtatttttgaaaatgcgtgatggctaaattcgagttatcctttttgtatgtatgttaggcacacaaccggcgatgacatacaaggcgaggtgacaccactgcactcccagcccgcacgtcacctataagcacagggggcttttggtgctggtttatttttgaaggctggtacttctcttcgatctaagttttaggaacctgtgctcgtcgacggctgccaatactttttattttcaaggctgacgctcgccagagtttcacaagctgctcccggacgctgtggtctctcgctagagtggatccgaactctgcgtgacgctgggaacggccagcgtctgttgcctcacgaaaacatctcccacaaggtggccgcctcgcgcgaggtcagcagcagggcaaacagggatgcgtgagtgactgacgtgagctaatcgctaatgacaggcttcacagccccggcggccctcagagccaggcacctcgcacccctcctcctcctcgagacccagtcccggcccgcccaccgttcccacgccgcccaataggcgccgacgctactcagcgagtggccggaggaggaggtgttgggacggccggacgctgaacggccgttcacgtcaacgtagtgacgtcacgcgtcgacgctggggcgtacctttcgggctcctgactcctgccgcttctcttccccttccgtgggtcagggccggtccggtccggaacctgcagcccctttcccagtgttctagttcgcccgtgacccggaataatgagcaaggagggtgtggtgggttgaaagccatcctactttactcccgagttagagcatggattcagttttagtcttaagggggaagtgagattggagattttta

SEQ ID NO: 33016 - DNA, 2300 bp, Homo sapien
aaattgtgattggacttaacctgtgtactgattcttttactttaagaaagtggcagttgtggaccccataaacacaagagatgtgtttacttctgaagttttaaagatttttaggtttattattacaaaagtaatatatttgtttaaacagtgtggaattatataaacactgaatgtactcctcaacctctctaccttatgtctcagtgataacaattgctaagggcttgatgtgttttattctaaacttaattctatacaaatataattatatagatatatattatatatacacacaattgtttatctttaaaaataattcaaatatggctacaaaacttttacaatatgaagcattgtcagtatttattttaccgggaggatttcccccatcagtgagtgctgactgtcattttcattctttatgatcaagttgtagatcaggaaaaacaagttaagagagtgcctacaaataccgggaaaacttgtggatagattttcattttttatgtaaagacatataagaacatgaatggtataaaaacaaaatcctttataaatgccatacaattatatatttagaaaaattatatggtggtaaaacatataaaagaaccacacactcccaaatttacattgagctaatttagtacagttagcctttgtcaaagctttccttgtttaaaaaaactattggctcagtgtgcaggaaggagcataggagaaaaaattgccaagaatatttgaaaaatacagaaaataaagaaaaaaatcacctactatcctatcaaaaattttaatagctagaatcaggataagatagaatattcctgtggcagtaattctagtctatattcctttcctggaaccctgtctcccaaatttcaggtgagattttataagaagctctgtttatctgagatttaaaatataaaaacttgatttaacctatacagttttttaaaaagaccctaaataagtaaaatttagtactccacaaattgaagagaatttctctcttctctttactgccctctgagttttctctttccttctctcacctccaattttcatgtaaacactttcagttcgagtggaccttagagattgtctcattcaatactttaggaaaacaaattttatagaacccttgagttctgtggaattgcttctaatgaacaacaccttttgttgttgttgttgtttagtgacactgtgtaacaggcatttcaggaggagaatctcccagtctagaggaatcctctcagaggtagctataaaatattgaactctgatcttcaataagcattgtgcggtttttgtttttgtttttaatgacagttttaaacaagaaagttgctttatttctgaacttcataaaaatttctattaaagagacaatttctgaattttataacaatttctagaacagttgagtacctcactttgagacacatttttgctaaaagttaaaaacacaaaacccttatgagataaaataggaagctagtagagataggaaagccctctgcttagtaaacctcttttttgcgtagtttagacacatacaatagtaaagttacttagtacgttgatagttttctttctcctcaaaagctacaatgtcttactagctagttccttcaagaaaggaaacaagaagccgctggaggagattggtgagtgggataaaacactattcaactcttcagttattcggtttttaaatcctcaatgaaaggctgctgtattatagagtattttttttttatttttaatagacttagaaccaagtttcttgagaaacctttggcatattgtagtttttttatggctatgactcacatgacattactgtataaaactagtacattctctcgtaaaaccacacaaacttactagagtgctgctctcatttttctacattagaaatgaaaaagggcattgtctgcattcaaaatttcctttttacatctctgtattactttttcccctttatatttatcttaaaaccaaaagaaataatgtttctattgttttactgtagttaccactgatgctaccgaagctgtattgtgagtgtttcaaaattctcaaaccagttttgtgtgttgtacttggagcttagtcattgtcatacgtagcaggacctgattaagaaggctgtgccgcctctaagccttgctagattgtagccactagcaaccaggctgcaataatttccctttgatgacatcatccactgtggaagaacccagttgcttcagcgagtcgaactacagttttaacctcatcaaata

SEQ ID NO: 33017 - DNA, 2300 bp, Homo sapien
tcttacaccttgtccagcagtaaacaagccttgcctatgtccccaaagcacctttttagagcctcatttttacatataaattgacagcaaggatcaccacacaagatgaagaatgcctctagcagaaacaacaggaaccaaatgtaaacaaacaaacaaccaaaaaagactcaaaagaatcaaagtcaatgcagagttacgtagaaagcatttttaaaaacgctataattgacatcttcagagataaaaggagctatattcatgaaaaataatgtaatgctataaaagaacagagaataaaaagagcactgagaaataaaggtataatacagaaattaagtaattaatctttattaagtataataaagaaattaagtaattgtccaattaagttgagaaagtcacagagaaagtagaataaaaatatgaagacatagaaaataggacagacaggtaagaaaaaacatcagccaagaaggtccacgatctaaataacaaatttcaaaaaagaagagatacgatggggggtgggggggaagaaatgatcaaataaataataccagaagaattcccataactgaagaacatgtgtttcaggattgaaaaactggtcgataggaatgagaaaagacccataaccaagacactcaatagtgttttagaacactgggaataggccggacgcggtggctcacacccgtcatcccagcactttgggaggccgaggagggcggatcacgaggtcaggagatcgagaccatcctggctaacacggtgaaaccccgtctctactaaaaatacaaaaaaaaaaaaaattagctgggcgtggtggcgggcgcctgtagtcccagctactccggaggctgaggtaggagaacggtgtgaacccgggaggtggagcttgcagtgagctgaggtggcaccactgcactccagcctgggcaacagagcgagactccgtctcaaaaaaaacaaaacaaaacaaaacaaaacaaaaaacactggaaacagagaaaagatcctaaagcttcttgagacaaaacaaaacagaaaggaaagcaggttacatatcaagaaatttagtgacctgtgaaggagaaggaaatataacgacatagtttcttaacaattctggaagctaaaatattgcggagcaagccctccaatattccgagtgaaagttattttcaacctagaactgtgctcagccagaataaaaacatttccagacatgcacactctgtgggaaaaaagacctggcagcaacctctctcaaggaactattggcggatatgttccacaacatgagggtatataatcaagaaaaaggaacacccagattgaggaaatagagaactcatctcaggaatgaggaataagaccttcccaggatggatgtgaaggaggtccaaggacatcagttgagagttgtgccttccaaattttatgtgcataggaattaccaggggatcttgttgcgatgcagatattgattcagtaagtctgggtaaggcctgagatttggcgttttaacaaattccctcaggatgctgaggccgctggttcagggactacactttgcatatcagcggtgtagaggaaaaacagtccaaattgtaccaagaagacgacggtacagagacagagaccgacagacatttatttccttcttggagacaatcgggaatgaattagtgtaagccaataaccgtacagtagggtagggagagggatggaggagaaggagaaaaggattaatattttaagtaaatataaatgaagaaaaaacaaggaaggggctgtattgagaacagccgcatacatccaaccttgcctctagtagacacctgaagaggaaggttggaccactctaaggattcagattcagtagtctggggggtctctggagcgaccctggaagatgctccagaaagcctagatgcagactacgctgacagaagacgctccttgcacgcgcccagcacgggagtgggcggggcctcaacgcgtccggtgccaggtctcagggggcggggaatgggcggagcctttcccctaaattggcgagcccgggcggcgctgaaattcggcttggaggcttttgaacccggaagcggttggcggcgctcggaagcggccgcggatcggggaattctgctggcgctgcagctgcagaatggtcggcggtggcgggaagcgcaggcccggcggagaggggccgcaggtactgccggaaaggctgtgcgggctacgcggggcgctttgggtgacagccagggcaccaggaggcagcgcttttc

SEQ ID NO: 33018 - DNA, 2300 bp, Homo sapien
taataattgcacatattcatgggggtaccatagtgatgttttaatacatataatgtgctgtgatcagatcaaggtaactagcatatccattgtctcaaacatttatctttttttttgtttgttttttggagatggagtctcactcttttgcccaggctggagtgcagtggtgcgatctcggatcactgcaacctccgccctccaggttcaagcgattctcctgcctcagccttctgagtagctgggattacaggcacccaccaccgcaccccactaatttttgtatttttaatagagacagggtttcaccatgttggccaggctggtttcaaactcctgacctgaggtgatccacccatctcagcctcccaaagtgctgggattacaggcgtgagccactgcgcctggccatttatcatttctttgtgttgggaacattcaatatcccccttccagctatttgaaaatatgtaaaaataattgttaactttagtcatcctataatggtatagaacactggaacttattcctcctatttagctgtaatttagtatccttttatcaaatatatccctatctctcccttacctccttcgtcttccctctcttcctcttcccagcctctagtctcctctgtagcacttattacttctatgagatcagctcttttagcttccacatgtgagtgagaacatgcactgtttaccgttctgttcctggattatttcacttaacataacatggatggaactggagaactatattcctggtcttcatatgcctccctgtcttggtcttcttatggggaaaggctggaccagatccctggctttgtcctcagcctccagggggtaatgaattcctttgttttccttctgtcttaaagttagccagatactcacagataggccagtgcttaaatttacacaggcaattgctgatatcctccaggaaatattggcttttactggttctcatatttctgccacagttatctctggtcacctccagacattcttggtcaccatatgcaccccctaacacacataaaaaatgtccaaacatccgttttcaatgctgtgagttaatgtttccacatgttttatagggggctttgaaggataagccagtgtatctccttaattccacctctctttccaaacttcaaggtgatcaggcctaatttatctccactcacctgactccttcttattgtccggattgctggacctcatagctcattttaactttcccctttctgagcctccactgacctgcaccccgctgctgtcaccaccatgagaacactgcctttgttcacccttgttcttcaggacaagtaaactcatctcagaggcctcaagctattgggccctgaactgcttccctatgtgacagactgcttacacacccatgtgcccccttcccaccacacctgcacgtgttcatgtgtgcacgtgcacacacttcacacactttcaacccagcacttcgctggcagccagaggcaggtaaggaggagaaaaaagtgctaacaggtttgtgattcattatgattattctcggaaacagtcactatgtcaagagggctgatcttacaatggcagaaccacatcagcctatgacacacatgaaatctccctatcccgtctcacgtcctgcatggcacagcaagtggacagaaacaccctctcaaccaaagacagttctttgtcttggttctgacattcctctcctctgcttaagtttaatgacattctagaggcagtagtgagggtgggattcagagccagattcaaaacttatttctgctaggggccatctgccgccactctgtcacactctcctaaatggctgaactctataatcgctgcaccaggagtctgagaggggccttggatccctgagctcctggctgacctggcatctggcagtgtgcgtggctcagtggctgctttcttatgtaacatcagccccgcccaacctcgctgtaaatcctctttcccagcatttgcagggtcacaagagtctggactctaggtattatttaactaaatggtagaaatccttttgaactctctgtgtaaatcacttctttctacttacttgctgtgcttctctgagtgcctcgtggcctctttatcaccacctgttgaaggaaatgttagatccagatatggatggaaggtaggctcagttgttttttacttttatgagaatattgtgcaaataaaatcttccttgttcttactaaatactcaggaatttaatttcaccaattatgaaagtgcttactttgt

SEQ ID NO: 33019 - DNA, 2300 bp, Homo sapien
tgaagagccatctgactgtgtgctttctaccttctgtgccctttttaatcctagtatccactctagccaccgctaagagtgtgactaacagcactttaaatggcactaacgtggtcttgggctctgtgcccgtaatcattgccagaactgaccatatcatagtcaaggaagggaacagtgccttgattaactgtagtgtttatggcatccctgacccacagttcaagtggtataattccattggcaagctgctgaaagaagaagaggatgagaaggagagaggaggaggtaggctttaaagttgtatcaaatgtcataataaaatataaacaggagctttggagccagcacccgtgatgttagttcttctcatgcaaatgatttaaagatctcatcttgtcttgtttttctaaggcaggagagaatatatatccttaaggattcaaagaagcaattaattcatttttttccctcattgacacagaagacaaaggacaaacacagaagtctttttaaaggcttcttggaattttgtaatataatacatccaatacattatagagacaaatgtaaaatggattttcctaaataatatattcaatttttaagggagttttgttttctttcatggagatggctggaataaacaatatagccattgtttatcattaaatgtccatttaattcattggccgtggatttaaagaccacacttctgaaagaaacctcagtgcaagtctcagccactggctgggattcctggagacctggctgcagtttctaggctgaggcagggagggagggaggatgcaataacaaggaaggatgtgggacaacaggagactgcttggtttttaataaatgcatttctgaccaaaaagtgtgagtcacctcactccgggaaagactagccagagagaggattgggtcttcgggaatcggtgcatttcttgttttagatgcgagaagtaattgtctgaaaacccaatcctggtcagattgaccagaaggagttaatctgctttcctaggcatttactgtgtgaagtagaggggttggggtgggggagtgaaaagaacattgttctaaagtagcagcttattagtttcttccattcacattgccctcctgttccacaattctttaaccaatgagcaatccccaaaagagtttctgctccaggaaaacctacattttaaatctctttccctcattttatcttaattgccctgaaaaaagaatagaggctaatgctgtatatctccttaggagctaagtgaatggagttttcttgcagttgcctacttctggttcacagctgtgttccgaatggttgaggctgctagccgtctaattggccaggatgtggggtttgctgtagtgctgtcacttacattgcttttggttagccagtcaaggttgtagagcattataaagcttcttcctttaagtcaaaatattacatattatgaatcgcgtttaacctaggagagtcgaacttttacccaccaagaggaattgtgggaccatagcaaagttaaattagaactcacattgaagacattatagttcaaatacccatttactgaaatttgcccaaagtcctgctattattaagtggctatgactaggcctgtaatcccagcactttgggaggccaaggcaggcagatcacctgagatccagagtttgagaccagcctggccaacatggtaaaaccccatctctactaaaaatacaaaaattagccggacatggtggcacgtgcctgtaattccagctactcaggaggccgaggcagaataatctcttgaacccaggaggcaggcgttgcagtgagcagagatcacgccactgcactacagcctgggcgacagagtgagactctgtctcaattttaaaaagtggctataacaagaaccttcactactgacagtggaaaggtgagggaacacaacccctagcccacactggttttggttcctacagccacttcctccaggacaagtcagaaggcagtgatgtcacacttgtgaatggagggcaatagccatggtaacaaagacactgcaggccaggtaccttagcaggtctttctgcagggctgagctatcgctagggaacccacggtgactgaatcaaagggaagaaagacccaagacctggatctcccttttacatggaccctaaagcaaaggttatccctgggtattaaaaagctgggttggggcactgaactcctcagtcctagagaggaagagaactgtgggaatagcatagcactggggcctgaatttcag

SEQ ID NO: 33020 - DNA, 2300 bp, Homo sapien
ttattaaaatataatagcacagcagtatccccttctctttactctgctagcacaatgtgtttgaacgtagaaagccaaatgtggagagcctctgtttgaaaacagctcttgagatacacactttaaaattcagtttgattttccatttgtggcattttctttaactggggggaaaagttatatttaccacccatatttattagaacccatctcccaacctgccttgtctctgattctcccctgtggtatttagccaggcatctgctatggctcgggcaccagggagtcaataatgagtgacccagcccctgccctcaacatgctcaccacagaatacacctaagggggcagctcatgcattctcagacttgagcccctgcaaaggacccagtgctgaaagtcatttataattatttataatttataataacgttttaagcaaaactcaagatctggcttttagaagacataaaaatagattggagaagcatcatttcaataaaggatgctttatacattgtgctaataattcttgtttatcaaggcagcagtacataggtgtttggtatacatttgattgtgaatccttataattgtcttgtacttgcccaagacacacagccagcgaaggtggttatgtccagaatcctggcctggtctctctcaaacctgaggccatgctcttcacagctattctgtatcgaataggtcagctttccaaccacaaaggaaaccacaagtttagccaagtaaagaaagacatttgcaaagtcatggcagggtgtctatcatgccattgcagtctgtgctatctcccttcgccacagggtttcagctggtggcgtaatgtgttggcttcctagggcaggaaagcactccagtttagtggggtttatggaaatctatggcaaaacaaaactcttttctttcctactgaaaaaaaatatgatctgaagctaatttatcatcaccaggtaccccttcagtgttgttgtaggcagaattgaaataataacttctgcctttgaagaaggcatggctatagaattagaatgaaatggaggatagaggactaggtgaaggttagatctttggacatagaagtgccgccaaccgtaatgtctggtgatgttccccagcctgtgggaggcagatgagattgaaaccagggtgtacatgagtgacctggagcccgtaagtaacagtaacacagagcagagagcgctagatgaggtggagctcagaggagcatgggaagttgaatgagacagtaaggagcattctggaagctataatgggtagttaggagaatgccagagtgattctgatgcagtccttccaaatgccggcagagcccaagctgtgaccagtgacgcagactggaagtcccgtttactgggagagaagaggttaaggaacacccaggtgaacaattaggtcctccacaatgaagacaggtaatgtggaggaaagagagcttgtcatggtaagtgaaagcagcctgaatccatttttgcgctctatgaagcaatatataaatttaatataagaaatatttgttcctataaaatctatatgttttgatagcaaaaaacaaaattatgatttctgtgaaaaatataattcacatccggaacatcttatggttgtgttttgtttaaaaagtatgtaggtttggccgggtgcggtggctcacgcctgtaatcccagcactttgagaggccgaggtgggtggatcacctgaggtcaggagttcgagaccagcctggccaacacggtgaaacctcatctctactaaaaatacaaaaattagccagacatgttggtgggtgcctgtaatcccagctacttggtaggctgaggcaggagaatcacttaaacctaggaggtgaaggttgcagtgagccaagatcgccccactgcactctagcctgggcaacagagcaagactccctctcaaaaaaaaaaaaaaagtatgttgatgtttgtattttagctgcattgctaaccgtttatagtgttttgaatggatgaatgctaatgtttatgtgtatatatttttgttttcttaaaaacaggttcttgctcaagtaccaactctatggacccaggacaggtttgtcccatgacctgctgtgaacagtgtgttgtctgatagaagattcggttggcaaaccatctctctattgccttacagagcaagcaaagaagatggatcgattgaagagccatctgactgtgtgctttctaccttctgtgccctttttaatcctagtatccactctagccaccgctaagag

SEQ ID NO: 33021 - DNA, 2300 bp, Homo sapien
ctgcctgcccatcctcctcctccttagacagaaaacagcgaattccattcgcctttctgctctcaatgaaaggctctctttgggttctttactaatctacaatctgtaaaagtactttccctgtgacttttctccatttcagtactgtcttctctaaatgagaattaaaagcaagttccccacaccgacctcaagtggtttctaagatagcaagagtgcattttgcaggttgtctgagaatttaaaagagatgggggaggggaggaaatagagtcagagtgaatgcagaaatgctggagaagaaaacgggatataatactgcggaatattttaatagtggggacacaaatgtcataattaataaagcaggtggaaagttcgcgctgtggtgcaattgtaaagaatgcttattaaatacttaaaaacaaagaaaatttacgtttctcaaaaggacagctgaaaaattccttgagctaaaatgtgttgctattcaagatgccataaaactaatgttaaaatatgatatctcatttcaatctttttgggggaaaaaatcaggctttgactcactcatacgacagatcccacgcacccacccaccaacatggcccttggcatgggcgacctgcccacgtgtcgatgcaatcgtgcctctctagagccctgcttccatccgtttcccgagcttcgatgtcgtgacgagagaccgcggctacatcaaccttgggcaaccagatgcagccgcgtgcggcagcctggcactgcccggagcatgctcagtcgggtcctgacccacttctgcaggtccgacctcggggcgtggggtcagaggcactactttgccagtttgccaggaacagagaggagcagagagactgagagttgctaaagctcctctcttggcacagcaatgcctgacccggcggcggaacatgcccagtctggctgccggagccgccgggagcgtcaatgtggaaagtccacctttccgggttttcgcagcaacccaccgggaagagggcggtacgggagtaaaaaggccggagtggggtgtggccaagagggcgggcactaaaaagccgggggaaggagcctggtcccgccccagaaattgagagtctctgttctcttttaaaattaaaaaaaaaaaaaaaaaaagggagataaggaggagaagaagccactaacattgcaggatcgtgtagcgaaacttctgtaggtacttaataattttagagtactctactttttaattaaaaaatcaacttatggttcattagaaaaaacgtggaaattacaaataatatttttaaagaaaatgaaaaaaaaattcctggaaccccaccactcagaaagtcaccagggaacggcccgctgggtttttttccagactcttccatctgtggactttgctttaagagacgtttaagacttacagcgcagtcgcccgggaaggcctgagaagctttcggaagcaaggtggtttgctcgtgattgcatttgattgcaaggagacagggtaggcttgggggtgggttgactggttcccatttagcgccccaggatgggaccctaagaagccttttcctgggtgtccttgaacacgcgtgcgatgcgacgcccacagaagttgcggtggaagccccgggcgggagagagagcggagtgagagtcccgcgctgccgcggaggccctgggcctgcgggtgtggggctctgggggccgccgaggcccggcccagaggctgagcggactgaatgcgggactccccggcaactacagcctccggtggctcctccgcggggccgctccgcagcaccgactggctcgcgccgcaccgcccgccccgctgcccccgcccgcggctgccgcgaaaacccggcggctacacccgcgcctccgcgccgcccggcgagccgcactgggcatgctcggccccggccggcccaggctcctgtaggtgggaagctccgcgctcccggcagccggcggcgcagctcgcaacgctgtgaggcgccggcggaggcggctcgcccgcagtaggcgctaccgggcgtccggcgcagagtgcggcgcagcggccgctgtcgggctggccatggcgaggggtgcacggcggccacctgagtggcgcggcggtgtcaggttagcgggggcccccggcgggccggggcggaggggcacgggtgggagccagccccgcaccgggtcggcggccgagtcggcgccggggccgccgaactttcgggtgtttgggctggctgagactgcggcggaggctgcgctgcgagacgccgcag

SEQ ID NO: 33022 - DNA, 2300 bp, Homo sapien
gagaagatacgggtacccgctaaccaagctagtaaatacaagcagaagagcaattgcaggtcatcctgtttcttctcatcctcctcctccagattctcatcctttgcaccgccccattgtaggtgttctgtggtctcttcttcctgagagctgtcatcctctctgatgattgccgctgtcaaaggggtgttagctggtatgttctcacatggccatgcgaggtgttcatttctggaatcctttctggttgatcaggcagttgttctgataggtcagcgtcttccctttatccatactatttgtgtgtgtgtgtgtgtatatatatatatttattatttttgagatggagtctgactctgttgctcaggctgaagtgcagtggcgcaatctctgctcactacaacgtctgcctcccagattcaagcgcttctcttgcctcagcctcccaagtagctgggactacaggcacacaccactatgcctggctaattgttttgtatttttagtagagactaaaaatctctgtgaaagatttttgaaagattaatgtcatgacagactcaggaacagaaagcttcagatggatggaagtggcagtacagactgttgaaaagacatcttgtccacctttgtaaggctagactatttgtggtgtggatgtcaaggggtacctgggcaagttcaagggcactgctcagggcataccagcaacaatggattctcaaagcacaggaggaggatgaaggggacactccagcacaagctaggattccatggtggaagcagctaagtaaatgtattcttccaggagtgaccttccatagagatagtgtctctgaccacgctgaagctgaactggagctgggcaaggcagagaggttcaaatgaagggtgactcccactatcacaccaagccccactgggcagctgacctgcctgcccatcctcctcctccttagacagaaaacagcgaattccattcgcctttctgctctcaatgaaaggctctctttgggttctttactaatctacaatctgtaaaagtactttccctgtgacttttctccatttcagtactgtcttctctaaatgagaattaaaagcaagttccccacaccgacctcaagtggtttctaagatagcaagagtgcattttgcaggttgtctgagaatttaaaagagatgggggaggggaggaaatagagtcagagtgaatgcagaaatgctggagaagaaaacgggatataatactgcggaatattttaatagtggggacacaaatgtcataattaataaagcaggtggaaagttcgcgctgtggtgcaattgtaaagaatgcttattaaatacttaaaaacaaagaaaatttacgtttctcaaaaggacagctgaaaaattccttgagctaaaatgtgttgctattcaagatgccataaaactaatgttaaaatatgatatctcatttcaatctttttgggggaaaaaatcaggctttgactcactcatacgacagatcccacgcacccacccaccaacatggcccttggcatgggcgacctgcccacgtgtcgatgcaatcgtgcctctctagagccctgcttccatccgtttcccgagcttcgatgtcgtgacgagagaccgcggctacatcaaccttgggcaaccagatgcagccgcgtgcggcagcctggcactgcccggagcatgctcagtcgggtcctgacccacttctgcaggtccgacctcggggcgtggggtcagaggcactactttgccagtttgccaggaacagagaggagcagagagactgagagttgctaaagctcctctcttggcacagcaatgcctgacccggcggcggaacatgcccagtctggctgccggagccgccgggagcgtcaatgtggaaagtccacctttccgggttttcgcagcaacccaccgggaagagggcggtacgggagtaaaaaggccggagtggggtgtggccaagagggcgggcactaaaaagccgggggaaggagcctggtcccgccccagaaattgagagtctctgttctcttttaaaattaaaaaaaaaaaaaaaaaaagggagataaggaggagaagaagccactaacattgcaggatcgtgtagcgaaacttctgtaggtacttaataattttagagtactctactttttaattaaaaaatcaacttatggttcattagaaaaaacgtggaaattacaaataatatttttaaagaaaatgaaaaaaaaattcctggaaccccaccactcagaaagtcaccagggaac

SEQ ID NO: 33023 - DNA, 2300 bp, Homo sapien
ttaacacttaaatgtaggttgatctcacagataaactaatggtatattcatggtgagtcaaagagccagagatccttgaattatgtaacttatgtgttcctgacttgtgtatcatatcttatgtctaatgccttaggttagacaacaactgctatttaaagcaaacctatgcctgagccagcgtcttataggaaataatcaaccatttatgcctgtagcctttgaaaactgtcctggaagtcaggctgacaggaaggccgttggaggctacaacgtggcttacatctgagaagtcttttggatgcttctagaaatggttttggttcctcattttcccataagtcttcccataacattatgaaagagggcaaataatgctctcaagaaaaataagtagcagagagtaaatgtgagcaaaaacaagaggtagagacagaaaaccagattaagacatttagaacctgaagcttccaagtaccaaaacaagtaggcagtcaatgcacaaacaagtccaagctgtaaaatgagtgtaaggcagggtggaggaacatgattgtcctgtgatgacaattttggtactcttttgtaatactgacctttttagagctgtctttggttctcccgcttttctggtgccctcagaacagggagctggcgctaggcgaatcacaggctggttaatggctaagtgataaccaacagttgtgctcagagtaaactcattacctaccttgtctcttatgggcaataagctatagttgacttttaatataattaaatataatattcatgtaacagcccaagtttcctaaaggcatctggcaattccctttttaatcttagtccattttcagtaattagtactacaggccaaaagcacatacacacacagcagtatacatcactgaaatcaatcacattgacagagatctgcagggtccttttatactccactttctctctctccccgtcactgctaacccacatcaatatgcttatttgcaattcttagctgcccttcttaccctacgctccatacttctgagcagcaagttgtaatttctattcattttaggaaactgtcccagttcattcacaaacacaatgacaacattcttcaaatgttagggatggttcatttcaacatgcttttaaaattcctattaaagcagcaaggaagtctcattggaactagcagcgaggaaggctcattggaactagcagcaaggagggttcattggatttagcagcaaggaagactctttggaattagcagaagaaatgcccacctatgatgagacagcccataaaccatgatgctgaaaaaacagccgctgcttcaaggtcatccatacatttggccatacattcatcatggattaatcaattttgtctttttgctggctgactgaagtcagggagaaacatgttggtaacagatctgaaacatgtcaccagagagaaaagcagaatcaataccaaatagacttaaggccaaagtctgaatgatatttcagaccaaccaactggactgatggttgcctgtattttaaaatgccttcctccaggattctccagcatgaggttcttcctgcaacttccagcagataattcaacaaaatgtattggcatctcttgtgtgccagaaactttactagattagaccaaaaagacttctaaagaaaagctgcagagcttataaatgcctgaatatcataaaagaaacataatttcttaagaaattaggtccaaataaagaaacctacttcctcagctggataactgcagttatgacatatgttccacataatacataaataaagaaaagctattgaggagcatatttatccatgatcgagaacaaaacaaaccagccaatcattcctggaatgaaggatagaaataatatttattatttggggaagacagagccagcatcatactgaaggtgacagcatttggcctcttatcatggggaataaaaaaggtccaatttgttaggaacttcatttctggggttgaatcaagtcaaaattgtgacatcatctaaagtagactttagtgtcaaacacactttcccattgtgacaatctacttgcacatggcctgggcctttgggctccccactgtgaggcctctcacggtgggacccaggctttgggtagctggctccatgctctagcaaagcctcacttagcagtggggaggtcccaagaagagaagcgagatacccatataaagcaagcctgcttagccttccagggtccttcaaatcttaccaaatgaaagccagcttgctc

SEQ ID NO: 33024 - DNA, 2300 bp, Homo sapien
tctccacggcctcaggagagaaactgcacaccttcgcggtgagtgttacaactcataaaagcaatgtggacccaaagagtcagcagcagcaagatttattgcaaactgcgagaaaacaaaaccaccacacgctgcaaaagtatccaagcgggttaccgctggtggctgaggcagcctgcttttattctcttatctggccccatccacatcctgctgattggtccattttacagagagccaattggcctgtttttcagagctgattggtccattttgacagggtgctgattggtgcgtttacaatccctgagctacacacaaaagttctccaagtccccactagattagttagatacagagtgctaattggtgtatttacaaaccctgagctagatacagagtgttgattggtgcatttacaaaccatgagttagatacagagtgctgattggtgtattcacaatcccttagctagacataaagattctccaagtccccatcagattagctagatacagagtgcccattggtgcatccacaaaccctgagctagacacagggtgctgattggtgtgttcacaatcccttagctagacataaaggttctccaagtctcctctagactcaggagcccagctggcttcccccagtggagccggcactggggccacaggtggagctgcctgccagtcccgggctgtgagcccgcactcctcagcccttgggcggtaaatgggaccgggtgctgtggagcagggggcggcactcgtcagggaggctcgggcagcgcaggagcccacgggtgggtggtggggaggctcaggcatggctggctgcgggtccgagtcccaccccgctgggaggcagctgaggcctggcgagaattcgaaggtagcgccggtgagccggcattgctgggagactgggcacaccctccgcagctgctggcccgggtgctaagcccctcactacccgggtctggcggagccggcccgccgctctgagtgccggcccgccaagcccacgcccacccggaactctagctggctcgcaagcgcccgcacagccctggttcccgcccgtgcctctccctacacacctccccgcaggctgagggagccggctccggcctccgctatcccaggaaggggctcccacagtgcagcggcgggctgaagggcccctcaagcgcggtcagagtgagcgctgaggccgaggaggcgccaagagtgagcgagggctgcgagggctgccagcaggctgtcacctctcaatacttcctttttgttatttagctgctagcacaaagattttactgggttatctcagccttttgctgccaggacctagataaaagcagtggctccttgaccaacctattaggtaaacttaaaagagagccatttggcagtgagtcaataatcatctaggaagtactcagtaaatttgtgctgaatgaatgaatctgttcattcattttaataaccattaaagaattttttaaagtcaaagagaggttgtctgaaacccttccctcattaagtgctcacattaaaccttgtacattccattttggtgattcaggaaggagaaattgcagaaaagttgagggaggtggggagtaagaagggttattttgtaagaaaaaaaaaggcaaggtgctagacccaaaaagatccggatattcacttccaacataattcttatttaacgaaaggtcagaaattcaatgtgagggtagacactaaaattgaagagactcagagtgatttttcaaaaatttttgtcagaactccatcgtcactccaaaatgctgagatcttcgagaaagtgatgttgaaattcgtcttggtcgccgggatgcttcccaggagagtgcccagagtttcactaacgaaagatgggtatttagcatagccatggtctgagcgggcaaaatgcacagtcccagtgactgagaggaggccagcggagcgcgcgggaacgagggtggggccgctcccggctgggcgcagctcgggagccccctgcagtggacccaagtcgccgccagatggttcccgaggattaggatcacgggcacttccggtcccctcggtcagcccctgggctagcctctgggccggcgcctaggccggccaacgcggacgccgggttgcggtgattcccagcggcgaggtcaagagtcattggcctggggctgcaagcgcctcgcgcctgggctaccccgcgccctgcgctctgagggcgatgatccgggacggggaggcgcgcgccgcgggcggccataggccacggcg

SEQ ID NO: 33025 - DNA, 2300 bp, Homo sapien
acctggtcaccaagagctctgatgaagatgtacaagtaggtgaatgttgtttttatgcctactaacacaacatctattctgtagcccatggatcaaggcatcattttgagtttcaagtcttattatataataaatacaattcatatggctgttgctcccaaagatagtgattcctctgatggacctgggtaaagtaaattgaaaatcttctggaaaggatttacgattctagatgccataaagaatatttgagattcataggagcaggtcaaaacataaatattaactgaagaaattgattccaaccctcattgatgaccttgacaggttcaagactttagtagaagaagtaactgcagatgtgatggaaatatcaagagaactagaattaggagagactgaggatgtgactgaatcattgcaatctcatgattgaacgtgaatagatgaggagctgcttcttatggatgagcaaagaaagtggttttttgagatggaatccacttttggtgaagatgccgtgaatatcattaaaatgacaccaaaggtttagaatattacataaatttagttgacaaagcaacagcaagttttgagagaactgactccaattttgagagaggttttaccgtgcataaaatgcatcaaagagcactgcatgctacagaaaaatcttttgcaaaaggaggagtcaatgtgtcaagcttcattgttgtcttattttaagaaattgccacagccaccccaatcttcagcagtcaccaaccagatttgtaagcagccatcaacatcaaggcaagatcctccaccagcaaaaagattatgactccctgaaggctcagacaattgttagcattctttaggaaaaatatatttttaattaaggtatgtacattgttttttagacataatagcattatgtcttaataaactacaatatagtatgacataacttttatatgcactgggaaaacaaaaaaaaaaatgtgtgtgtgacttgctttaatgcaatggtcactttactgtagtggtttagaaccaaacctgcaatatttcttaggtatgccaacatcctattaataatagtttgcttatatgctacactcctctcagggctcacatgcactacacgtatttccctggctaaaaagggtcttgggggacagaagagtgtggaggctgaaattcaggccatgctttttgacaagcccaatgccctattagaagtttgggtccttgttcatctttgttatttttgttaataacaaacacactgaggcatttcatcttctccaaggtcactatatcagaaatggatttttttttcttttaactcatctgtatctgttacaactttaagcagaatgtgactcaagcactacatttccatccacaagactgggtctgagttatttttgaacagctttatgatatgcttaggtaggcttataacttttctcctccaaataatacttttctttggaaaacaagccctgtggagaattccttccatcaagttgcttcagtttaacctatttctagaggactagtacatgcagaattggcaactacaggggatgaaaagttcaaaaagtaggtcctacaagatgtaacaaataattttctaaacatcaaaaaaagagaaagaatccgaagacaaacctgaaattgaagatgttggttctgctgaggaagaagaagaaaagaaggatggtgacaagcagaagaagaagaagattaggaaaagtacattgatcaagaagaactcaacaaaacaaagcccatctggaccagaaatccagatgatattactaatgaggagtacagagaattctacaagagcttgactaatgactgggaagatcacttgtcagtgaagcatttttcagttgaaggacagttggaatacagagcccttctattttcccatgatgtgctccttttgacctgtttgaaaacagaaagaaaaagaacaatatcaaattgtatgtatgcagagttttcatcacggataactgtgaggagctaatccctgaatacctgaacttcattagagtgctggtagactcggaggatctccctctaaatatttcccataagatgttacaacaaagcaaaattttgaaagttatcaggaagaatttggtcaaaaaatgcttagaactctttactgaactggcagaagataaagagaactacaagaagttctatgagcagttctctgaaaacataaagcttggaatacatgaagactctcaaaatcagaagaagctttcagagctgttaaggtactacacatc

SEQ ID NO: 33026 - DNA, 2300 bp, Homo sapien
taaatcttttcttcaaaatatttcaggcgataaagtggattgagataatttgtatggaagactgcataaaataaaacaattgcagttattaatgccaaatgagtacagcatgtaaaaagggtaataattgttatgcctttttatatcttgaaagtgttgggaagttcccaaatctgattgtaaaatgaaaagattaatttgacaaaatgtaacaaagcataagcatgtttttcacatggttttatcacaagaatatgtcatgtttttctatgcctcctttaaatgtttctcaattggagtaccttctggatcctggaagacattgttttcactcactgcctttttgtatcaattctatagaacactgatctcattagaataaaactgtgtatgttaatggtataattacactgtacatgcagatggaggcaatgttaacattcaaagatctcactaaattttataaagggatgattttgactaatttcatgagtgctcttaccttgaccatccttctgttttctgttgtgaaaaatctagaatttccagaaacatcagaatatcatagattaacgagaggcaagatttttcataaagctatcttcatactcaagaggaatcaatgagaaaaattaatctaaatcaattcattattttaaaaattgggaaagtgatgggcatggtggctcatacctgtcacctcagcactttgggaggtcatggctggaggatcacttatgtccaggaattcaagaccaatctgggcaacagagtgatactcttttccaaaaagcaaaacaaaacaaagacaaacacttttttctttcattaaggcactctattcacatgtacagttgttgtttttttctttctaaatttttaaagtgtgggtttgaatattcactgtgggttgagacaaaatttagaaacctgacttcttactcacctgcaaatacagtattttctgccagaacctttccttagtatttggaagcagatctgagcaatagataggaacagaactaaacaaattatttgctttagaatggcccagatttccttcaggggattaaagagagaaatgaacaacataagaaggaaaggaagaaagaacaaaggccaaatgactgggatttcctggagtgagaggaaagaagcaaagagagaagtttgaggaagtatctgccgttcatatgaaggttatttatagtgactggagcaaaaacaatgatttaaaatatacttcaatgtattaggaacacatggcctactctttgaaaaatgtgtcacagatgttgataaaattttgaataaatattcattgctattgtttgctgaaccgtgttgcattgaatacacctttgtacagcattgaatcatgtgggcgccaattgtataaatctttcttctgtatgcaggtgtgtatttagctgactattgtggattagcagtaggaccttttgcagttatttatacgaggtaaaaagaaataaggagaaagaaaagaaaatttgcagctactttgcaataaaaaagaaataaaagacatcaaacaagaaatacatgaatatgtgaatctcagtaagatatctggaaatacaggtttaataatttattggcctatacttttctaaatttcacccttaattctgccattaattcctcaacttcgttcccagatcaggatctgtactgttacaggaggtagttagtcagacatgagcagggcaggagagagccctcggccaccaccaggaatatctggtgatggccaaacagttgttaagctggctgtctaaaatattaattggtcacagctggagcgagggaaaggcggtctccaaatagacaaaaacacctgaaactggtaaacagctgcttccgaataagatctcagaggttgggtaagtgcgttcaagcaggcaccctaaaaggcaaaatgatggcgcttaactagtatttgaccttcctctgcaaacatccgactgataagggaaaaacgcctcaagtgagcatgcgcacaacttccgtaaacacactgtgcatgtggcccctcccaagtgctggcaggccactgcacgtgcggacagcccaacccaaggaaaaatcagtggggaagaaaaaggggagaaggaatgcaacaccccggaaacatgccaacatataaaaccgtaagtcaaaggtcaaaccatgcactagagtctctcaagttatccatttgcccctcttccgagtgtactttacttcctttcattcctgcttcaaagctttcttatgaaatgttcactcctgctctaaag

SEQ ID NO: 33027 - DNA, 2300 bp, Homo sapien
ctctttttaatccaactctgaagagtttggtaatatttcatccaaatgctttgtataattaatcagcaaaactatctttgcctataggattctttgtgggaagattttaaactataagctattatttgttgaatgagatttggttacatgtgacttttaagcaatgtgttcattttatctaagatgctgaatttatttgtatatattattcataatgttattttattttccttttaacatctataaaatctgcagcgctgttaactctttcattactgacattggtgatttttgtctttgtcttgatgaatctggtttgcagtttatcaaatgtattgatcttttaaaataatcagcttttgatttcattgattttatcttcttattgtgctttctattttattttactcacatttatttctttctgctgcttgcgtttcattttaaacttattctaaaaatccaaggtgaaaatttaagccactggtttttgtttcccacttaatccttaagtgctataatttcccatctaagtactaatttaacttcattccttcactataagaaatgcaatgactttaatttaaataataggtcttaagaatcaaactgggaggaaaatctgttgcccacagttttgtttatacaggcattaaggtaatagcccaactcctcttgcttttccaaatgttgcccttgtcataattaccttgctggttttccttgacttaattatgattttctaattcacttgatcttgaagtttttcagtactttcttgagaaacacacacacattcacacacatacataacacacaacttatagcttggactcagttggcggtcatcactttgggataagatctgttttatctacccttttgcagatattatggactaaggcaggtttgaccatgtggaagtcttgtccttggaagagcagagatctctatcacttcatggtcagtctacttggaagacatacaagtcaggctctggtgattcttcccaaatttatcattcagtgaaagaactccaacacttttttggtagaatgagtaaaagggtaaagagaggccagcagttgcatattattgggcttgtttaaacatcaaaaagaagcatcaagaatggtgaaaaatattttttcaagatttcccagtttttttctttttcattttcttaatttacctgttgagattgaacattaagcctatgattagccagagttttggctctctgtggcataggaggcaatttgttctgctctcacattccttaatccacactgccaaaaccagtaagttcttctgtattttagtgggattctgtcaattcaattagaatttgcctggaaaaaaactctcaagtgcatctgaatagaatatttattctattaatcaaaaagtatttcatttcaaacctgaaacatcattttcttttgtatttttcaactcatgttctgccacataatgcaatctgcttattgaaggttaaacaataatattaaatgatattataacttttttaacatcatataattgttaaacaaaaaaaatctaggaaaattgcataatgacacattagtaacataataacaacagctaaaagatgccacaaaatcctaaggtgaaatcaaagcttcagaagcaaatctttgcaagttaaaatctcagtatcaaagaaagtaaattcttaaatcaaaacttctcctttatgagttacaaacattgacctctcttgctactatctccttattcctcagtttcatttgtaaaagttctgagtttcaatcccaatttgagcctggattgcaatgaactaggacttctatgggtgtcactgttctttccagatagctagctttgcatgaactaaatgtcaaatttcgaatggctggatctctactctaaaggctccaaataaacatcaaaacatatgcaatatcaaagcactgaaaacccgcaatagccaactttaaaaaataggtacatctcaacccttagaatttctatccagtaaagttctatttcaagaacatcataatgttaccaaagactattacaaaaactcaaaggttactaagtgctaatagaaaatcttctgtgcttagcttcactggagtgtcaacacttaatactagttatgtagaattacaactttatatttattacagtaaatacacaggcatgtaaggaaaaattctagaacagtttttcttagtatggtaaaaattttaatcaccatttcacttttgaagatcattctctcttgcacagagcactaaattcagtacgag

SEQ ID NO: 33028 - DNA, 2300 bp, Homo sapien
ttccttaatcaaatagagttaaaagaaaatatgaaaagggaataaagattgtagtgaaacataacttttaaaatctttggagtaaacacttatcatatcactattctgaaacagaatgtttacatatttccagttcagcagtcctttaggtaagtgatgacattcaaaactgaaattcaaatttgaattctagatgcaagtccacaggattcccaatggacaaactgaattaactctcacaattccttcaagctttgctggctaaggagatgtagtaagtctaaaatacataattatctggtattcataaatatagcaaatggggtctattatatatttagaacctagatctttaaagaaccagctatataccaaggaagcataaaaatcacaatcatttttcatcagttcattcagtcccatgtaactagttcttgttctgctttatcttgggttaactacttgatgaactgattagtttctctattgtagttctagaagtctgtacagtctagtggtgtgttctcagagttatttcagcaatgccatcagaagcctgtattccagattaactgtcatagttctgtctgtggtttctgagacagtcacattttgttaaaaatgaagcactttggctagtagttaattacaagaacttttagggaaaaatcagaataaaattaaaattatttcttgatgacaaatagctttaaatcgccatggttaaagatctgatgagaatttaacaaaatatttggtttatgacatcacaggttatatttccagttatttttgtggcataacaattgaaattattagtggtaacattatactattgtgtccggaattggtgggttcttggtctcactgacctcaagaatgaagctgcggaccctcgcggtgagtgttacagttcttaaaggcggcgtgtccggagtttgttcccactgatgttcggatgtgttcggagtttcttccttctggtgggttcgtggtctcgctggctcaggagtgaagctgcagaccttggcttggcggtgagtgttacagctcttaaggtggtgcgtctgcagttgtttgttcctcccggtgggctggtggtctcgctggcttcaggagtgaagctgcagaccttcgcagtgagtgctacagctcataaaggcagtgtggacccaaagagtgagcagcagcaagatttattgcaaaaagtaaaagaacaaaccttccacagtgtggaagggcaccctagagggttgccactgctagctaggcagcctgcttttattctcttatcttgccccacccacatcctgctgattggtagagcccagtggtctgttttgacagggcactgattggtgcatttacaatccctgagctagacacaaaggttctccacgtgcccaccagattagctagatacagagtgtggacacaaaggttctccaagtccccaccagagtagctagatacagcgtccattggtgcattcacaaaccctgagctagacacagggtgctgattggtgtgtttacaaaccttgagctagatacagagtgccgattggtgtatttacaatcctttagctagacataaaggttctccacgtccccaccagactcaggagcccagctggcttcacccagtggatcccgcaccggggttgcaggtggagttgcctgccagtcccgagccatgcgcctgcactcctcagcccttgggtggtccatgggactgggcgccgccgtggagcagggggcggcgctcgtcgcggaggctggggccgcacaggagcccgcagaggcggagcggggaggctcaggcatggcgggctgcaggtccggagccctgccccgcgagaaggcagctgaggcctggcgagaaatcgaccgcagcgccggtgggccagcactgctggcggacccagtacaccctccgcagctgccggcccgggtgctaagcccctcatttcctggggctggcagggccggcctgctgctccgagtgcggggcccgccaagcccacgcccacccggaactccagctggcccgcaagcgccgcgcgcagccgcggttcccgctcgcgcctctcgctccacacctccctgcaagctgagggagccggctccggctctggccttggccagcccataaaggggctcccacagtgcagcggtgggctgaagggctcctcaagtgccgccaaagtgggagcccaggcagaggaggcgccaagagcaagtgagggctgtgaggactgccagcacgctgtcactatgatgtgtcatggctaggtatag

SEQ ID NO: 33029 - DNA, 2300 bp, Homo sapien
gtctttcactatctttgtagcaattgaactattctactgaacccaatatatgaaaacctttccctactgctcccctcatctggtttctaatctagttaggccttctttataactccctacttctgtgcctttgaatatctaaagtggattaagaatggccacacattctccgtcaaacttttcagtgagatgttcattttatcccctacctccacctcatccttgaatctgggcttgtccagtgtctgctccctaagagaggctgtgccagttccggacttagcttttaagaggacttgacagtttttgttttctccctcttggaacacaggttcttgggttgctctctcttggatactagctaccatggtatgagaagctcaggccacatgcaggggccatatggagggaagctgaggcactccagttgacagccccatgaccccccagctgacagtcactgccaactgtcagccatgtaaagtagccatcttggctcagcccattcaacctcctcggcctcagcctgcgtcacaggaagtgtaaccacccagctgagcctattcaatgcacagaatcataagagagatagcaaaataatttgttttaagtcgctacattttgaagtagagagataactaaagcaataaccttctgcttccttaaatatagggcttaaatttggctcaatttaaggttagtaccaagcacctttggtaatttatttctattgtctttatgttgcattttcaactagagtgtaagttattcaaggtcactgaatattgctgttttctttccaatgtgtccctatagttattagtacattattagcagcatgggactctgataatctgaggttgccagttgaatcctaacagaatggaagtgcaaatagggcatagaatgggtgactttctatgtaagtcaaaatgtagaagaccatgtccatgtgtattctatatataatatacacatatattatacatataatatatattatatataatatatatgatatacacatatatacatacaacatccacacacatttatattggcatttaatctggattatctgagcaaaaaaattaactgtcgtctgaagttttttgtttgtaaactcaacctaaaatacccattttagctagacacattgtcatctgttggtaatttacatgaggaattgtgaaagaataccagactgaagggaaaagagaaattatgctctgaatcaaaaataaataaataaattatacagaaaaggagaaaaagctaaagttatggtctggaactatgctataaaacagaagtaaacatagtaattttctcctttcagtttctaccatgtattctgcgtgtacttgattggggaagtaatagtaattaacgattttctctgaatgggtgctgtatgcaagaccatttgctagtttaacaacagtgaagcatgtttcaactcaacaccctggattcaacaaatagaatgctagtatgtctattcctgatccaagactattttttaaggtattaaaaaacaggtattgtttaaaatgtgagagattttacttttttaattccaagtgcacttttgagttattttactttgaaaattaataactgtatcagtacttaaaaatatatccaatataattaaatgattctccaaatttatttccttgagcacctgacaatattcccaggaaacctctccctgctatgttgcttcccagaattcacatttctgtgtttcaaaactgcacttccttagagagaaaaaggttagaaaataacgcagactacaaaaggcatagtgtatgtgtgggggtgggggtgaggaattaagtcccttgcactctagattaagttgcatttatataaaatctaaaggtaattggtctttatataaaggacacattcaacaacatttattaaatatatttttagactattttaaaattcaagtgattcacaaaaacaaatattacagcatagcgctttattcatgccatcatacagtcgatctgtattcttcaagtacattttgaatttataatgagaacagtttaaggcataactcttcccactcaaatctaggtctttctcaagtgagacactagagagagtagaaagggaggaagagatagggcgagaagaaaaggagggagggacagagatgaggacgagaaagaagaaaaaagggaaagagaaaataccgtctgaagtccacaggcttatctatcccaagcatgtctaccccacgcatgtgggcatcatatccaggttgtaacaaagaggtg

SEQ ID NO: 33030 - DNA, 2300 bp, Homo sapien
agtaaacatagtaattttctcctttcagtttctaccatgtattctgcgtgtacttgattggggaagtaatagtaattaacgattttctctgaatgggtgctgtatgcaagaccatttgctagtttaacaacagtgaagcatgtttcaactcaacaccctggattcaacaaatagaatgctagtatgtctattcctgatccaagactattttttaaggtattaaaaaacaggtattgtttaaaatgtgagagattttacttttttaattccaagtgcacttttgagttattttactttgaaaattaataactgtatcagtacttaaaaatatatccaatataattaaatgattctccaaatttatttccttgagcacctgacaatattcccaggaaacctctccctgctatgttgcttcccagaattcacatttctgtgtttcaaaactgcacttccttagagagaaaaaggttagaaaataacgcagactacaaaaggcatagtgtatgtgtgggggtgggggtgaggaattaagtcccttgcactctagattaagttgcatttatataaaatctaaaggtaattggtctttatataaaggacacattcaacaacatttattaaatatatttttagactattttaaaattcaagtgattcacaaaaacaaatattacagcatagcgctttattcatgccatcatacagtcgatctgtattcttcaagtacattttgaatttataatgagaacagtttaaggcataactcttcccactcaaatctaggtctttctcaagtgagacactagagagagtagaaagggaggaagagatagggcgagaagaaaaggagggagggacagagatgaggacgagaaagaagaaaaaagggaaagagaaaataccgtctgaagtccacaggcttatctatcccaagcatgtctaccccacgcatgtgggcatcatatccaggttgtaacaaagaggtgaccatggcgtttatttttggctccagacaggcggattcagcctgcattgcatgcatgcatgtctgtcacctcatctaagtccccattccttccggagttgtgagctccagatccaagagtgcccagtgcacggtgctgggcacgctgtcccttggcgaggctgccacaggttcctgagtgtgcggtcaggggcgttggtgcattgatacgttaggcggagggaggagtaccatctgccagagtcttatctcgagtcccacgttttctggccatcgcggaggagtgtgcgaggacaggtagccctcgcagtgacaaggcgcgcggagtgcggtcgtgcaaggcgggggaggagcggggtggccctgccgaatcttaaccggggccccgggtgtttgcagacccaaataaagccgccttgggtctccacggtgtcctccagaagctgctgcctgagaactctgagcctcagctctgtcttgcttcgggatcctcttcctcctccttccccaccccctacctggcctgaacggcggaacgcgcggctcgggggatcccctctccctgggaccggccctgtcccgggtcgcctccacctcccgcagccgccgcgccccggctcgccgcgctcccgccggcaccatggaggaattcctgggacaaccgcctgcagccggcgacttttccccaggaatctctggcctggcgccctttgggtgagatgacggggtgctggcatccctgtcggtcccagattacccggaaaagccctggcaggtaaagagaggacccgcgcaggctgggagctcccactcctcctccagcgtcacgctcgccctccgccgctgcctcgcgtccgggtctgtttatatagcgtctggaggccgggaggcattgcccacccccgccaggcggcccgccctcccctcctgggctccgggctgccgcacgtggcagacaccagcgacgtctccgcggaaggcaggcgccggggagtggggcgcgggcgaccgtgtgcagccgcggcgcatctccgccttccgctcctcctcgcagcgccctcgtccgcttccaagcccagcacagacttcggtttctccgcctccatcccctttacgagaagaggagatcaaaaaatattgccctttaggtgctcgtgatggtcctgtgggttcgttcagttgccagaaaagaatggtaacatgaacagcggagcgtgagagcgtcaccgggggaagggacgagattgatgggcagagcgctcacttctcagaggatcgcattccgaggaccgcgcgaggaagggacgtcgcg

SEQ ID NO: 33031 - DNA, 2300 bp, Homo sapien
agctgggggggtgtggatttctcagtctatgcaggaaatataaacaggaatccaactaagacagagataaagaaggcctgggaatgtgaatatcaaggaagacaacttttgtcccaacaatatccaagaataagaccaacaaatacgtaggaagatattttattcaccttctccttttctcagaaatgttcactctatatgggtcttaacttcatgcagtaatctcatttctacttccattttcttgagcctgatgtctcatatgctgtttaaaacttatctacacattacccaaccaccctaacaataactacagaagcttctcagtttcctcatatttgtcccttagggttttggcaacattaaaactaacattttggtaacattttaaataaggttggcataatatattccaaatatatatatatatatatttatacttatatttatatatttatatattatatttatatttaaataaggttggcataatatatgccaaatatatatatatatatatatatatatatatatatatatttggcatatatatacacatataatatatttggcatatattatatgtgtatatacgtataagtgtgtatgtatgtatgtgtatatatatatataattggaacagttttcatattatctagtctgatatatggcttcacatcatttatacagaatgatgtttatctatcccagtaattataataatagaaataatttacctgtattcatgagctttatcctaactatctactggatatactagctatctcacttttctttttcttcttttttttttcttgaaaagctgcatagttttcttggctttgtcaaatttatacagtgcaaccacaaaagagatggaggctacaactctgattatcacctaaaatttagttgcagtgtccaaacagaagaataatgccaaaaagctggtattgttgttagtgataattcttacttattgtttcttgagaataagaaaatgctacttttaggggttttcaaaaaataaataaataaaaacaatttcttaagcaccttgctggtcctgaaaggtgcttcaatttgctacaattttaatagttgagaaggggatggtaatctaagctggatttcaaggcgcaaccgtgagtctggaattggttatcaacagagatgagggcaaaccagagacgtattacaaagtaaggttacaaaatagtcatggaatttgacaagcaattaaccctccatgttatgttgcttattgagtcaataactattccaaaagagaagggagccttgtaataacaactccaagttagcttccagctttcaaatttgcctgagagcctaaggtaaaaaatgaaagactagacaaagcatttcattgggttgtcagtctacgacatcaatcaaaatattaaagattcatcatgtacaaaatattgagtacagtttgcaggtaggttaggaattcatcttcaggttctcttggttcactcaattgatctaagacctaagaaagaaagctcttattgtcaccaatcagaaatctttatgatatattatctaagattcataatctgtagaagctcttccaaagaaagagatctcctttttcccaaaccgtgaacaaagatacaaatacttagtgttcttatgcataatagcatacaaaagcagatattttagaataaaatgggaaattttccttcttttgtttataaagaacaactattatatagattaatcaaacatagtatattaatctcttgttctccgataagaggatattagagtatattggagactgttgtgatttacagctcaaaactggaaaaaaaaagtttgatatataaagaaacctaaagcttatatattcttgcatattattctccacattaaaatttattttctgctgtttctcattcatggctacactttatgatcattttcaagaacttaacaaatagtgaaaaactgcgtactgctccacttcagaatgttaagtcagaacttctgagagtggagcccaagaattggaatgattataaaagttccatcagataattttactatgtaactagattaagaactagggagaacttactgtggttgtgagctggacaccacagccctgaagcctgagcaggagcagtgaaaggagggggtttaccatatcatcgcaagctgagaggaaggctgttgggggatacatgcagctggaggaagaatgcttagggcatacgtgtagcttgtttgttctttacaaagcatttgggagatttgccctgaggtaa

SEQ ID NO: 33032 - DNA, 2300 bp, Homo sapien
gactccattttgattctgataactttcatgctccatttcaagatccaaacaaaccatcattcatgtgaatgcaaaggaaagttatatttggacacgcaaagattcagaaacaccattcaccatgtactagttctgaaaaatttttttttgaagtattatagtcaaacaatgaatgtatcaaaataaagagctcaagaaaattggaggaaacattgatagacaatgagggcatagaacttatagttaaatctaattatggttaattttgtacatgcaaatttaaaataatattaagaatgatttctaaaaattgaagaatcataatgtgaaataaagttagtaaaaatctagataaaaaattccagatcagcaaaataaaaataaagaaaagcagaatatgtaagaaggggacagaggtaaaaaagttttctgtttaaatacttagcatagtctaggaggtgaaagggtacaggcactatttaattttcattctttatggtgatgaggaataaaaggttcaaatgtttgtaaaaaaataacaaaaatcattagtagaatgaacatagaaacaagtaacatagaaataatgacattagtttatttattcattaatataataaatagttgagttcattccattccttgtgctctatcttatgataggcaaaatagtcatagtccctgccctttactataagtatgaatgcatataatgattattatgtgaaaggtaatgttagaggaagataatatttatgcatatgcatgaaacaaagtgaaaatatttttaccatcccctaatggaggctatttttgtggaatgggactgcaggtgtggtagctattagcaaccatcatcaattcttttttacttcctcttccaggggaaagtaaaccatggctacctttaagtaaaccactataccttgaagttaaccatggctgtgtgccttaatttggcaaataaaatgtgtcattttcaggcagaagatttgaggcagtgcacaatttgctaagttcattttttccttgttatgatgctcatggaagcttgcaatggcatgaaatatccatcagtgtggttctagagagattgataagcagaggcccgcagcatgccctagcctaatccgatggatacagctgttggtaccaagaaatggaggtgttgccttaaaacaacctaaaatgtgtggctttggcttaatgattagtaggtggcaagggaagtttggaagtaagaaggaggttagctcgtgttattctgggatgagagcttagttggtggtaggttaacctgggaggtatatatttgtacttctaggtaagtacgtggcaaacattttctgtaaagagaaagacagtaaggattttaggcttttcaaactgtatgagtctctgttgcacattcttcattgcttgtttgtacaatctttagttccccttttacacaatcaggttgttgtctggatttggactacaggattgccaaaccctgttctagggaagtgcttagtttttaaagtgcatttgaagttgattttggttattgttgactgcatttgtcagggtgctaataagacaataacgagcttacaaaagaaccggccaatttgtatgtaggaagaaagagagtctagtttggaggatttgcagtaaggaatcttacccttttaaaagatgaagctgagaaggtctttgagaattactcttgcagcaagtatgaattctaggtatgactgtcacacctattgttaaaatctttgactcagatccatgacctagtaaaggcgtggtgcctaaatctttttaattggacaaaatggctctctcacctaaactggatagtccaacataccttagttatgtccagaggaaaagagacaagagatttgggtgttataaagcaaaagtagcaaatagaagtatgtttggaaaagaaatgtaggtattgaagaaattaagtaaggtcttcagagaactgtactgtcaaatgaatcacaagctgaaacttaaagggacagaggctgtttgaaattttaaaataaagaattatgaatgagtagatgttgaagtgcatgatcctttaatatacattccagattgaaggacagaagaaactcaaaggaagaacatcttagaggatggagtcaagaattttggaaaactggacaagagaacccttccaagacataagaactgcaatttaatacgggaacattctctgtgcctaaggtagtaaaccttcacaatcactgcctagattccagaattgctatcaaatgtctgccatgtagccg

SEQ ID NO: 33033 - DNA, 2300 bp, Homo sapien
catcatcttcaatcatcagagatatgcaaatcaaaaccacaatgagatatctcaccccagttaaaatggcttgtatcaaaaagacaggcaacaacagatgttggcaaggatgtggagaaagggcaaccttcatacgctaagtgggaatgtaaattagtatagccacttggaggacattatggaatctcctcaaaaacctacaagtagaactttcatattgtctagcaattctactacggtgtatatatctgagagaaaggtaatcagtatatcaaagagatatttgcacttccatgtttattgcagcactattcataaaacccaaatattatgatattcacaatacccaaatcactattcacaatagccaaaatatggaatcaacctaagtgcccatcagtagatgaatggataaagaaaatgtaatatatatacacacatatatatttcattgtatatgtacatatatatttcattgtatatgtacatatacaatgaaatataattcagccataacaaagcatgaaatcctgtctttttcagcaatgtggatggaactggagcctattatggtaagtgaaataagccaaacacaaaaaggcaaacattgcatattctcactcctatgtgagaactaaaaaaagtggatctcatgaagattgacagtagactggtggttatcggaggccaggaaggtaaaatggagtaatataagagaaaaggaagaaggatataaatgtatttattaccactgaattgtacacataaaaatagtaaagattgggccgggcttggtggctgacgcctgtaatcccagcactttgggaggccaaggtcaggaaatcaagaccatcctggccaacacagtgaaaccccatctctactaaagatacaaaaaattagccaggcgtggtggcaggtgcctatagtcccagctagtcgggaggctgaggcaggagaatcgcttgaacccaggaggcggaggttgcagtgagctgagatcccgccactgcactccagcctgggtgatacagcgagactctgtctcaaaaagaaaaaagaaaacaatagcaaagatggtattttttacctcaataaaaaaacaataaaaagaagaaaaatatttttaatattaaaataatttaaatattaaaaagaaaaatatttaaaaacattttaatgcttaaataatgtgctagaattaagagttttcttattgtttgacatttaaattatttctgttcttattaatacacataatggtgttaataacatcttcatgcatatgcttctgttcaaaattaggatacaacacaacaaattgagttacttgttcaaaacatatgaaaaaattaatagcatgtgacacactttgttagatttattccttaaaggccaattaacactgacatcagcaatatgggattaccaattttcctgctttcttgatagtattgggaattatctttataaaaacaggatttgtttggctaatttattagattaaatacatatctcatgcctcattgttttaatttgaatttatttgctcattagtgaatctgagcatttttctatgattatttactgaattcgtttatagtttgtgagtaattatccttcctttagatttggcagctcttgaaaaaatgagactagaatgggagaaagttgtgtggtgtaaagtatatgactttctgcagatgaatttagagaggtaagacttctggatgactacagcgttatttcttaaaacagtagagtggccaggtttttctatgggcacacaaggagcttgggtcaagtcataaattgtgttgacacaaaatgacaactgagagaaaagaattttactatcaattttattaactttaatattaaggtagaaaaatattcattgttatttaaatacttttaacctcatttacacattttatagttttccagtttattaagtttttaatctgaatgccagtgggatgtctttcgcctttgagagtcacttatatttgattcctgaaagttaatctattttcacagagatccttaacaataatcattaatgaagatgacctgacatttgatcacttgaaatggtggttaagctcacagaagcagggactattagagagagaatagggacctcatacaccaggtaagaaacatgttctgacaacttctgagttccttctttttgatcatttctgtatttcaagctcctagaacactatctgatatatgataggctctcaatcaatatgtgttgaattggatggatcatgataagcttccattatttt

SEQ ID NO: 33034 - DNA, 2300 bp, Homo sapien
tacttgtgtgaatttatggggaacatgagaaattccattacatgcatataaagcatagtgaccaagtcagggtatttacggtgtccatctcccaaacacaatacatttttatgaagtatagtcatgccactctgttatcaaacattgaatttactccctctatcttactgcatgtttgtactctttaatccacatctcttcacccttccccctgcccccactcacccttcccagtctattatcacaaaatagaaagttttaagttaaggatctctggccaaaaacaagttgattttcacaaatagacacagagagaaattcatataaataagctactctactaccttttggggttaggataagcaactcttttctgctagaaggaaaataaattaaggttcttactgaactggatgctttcacgggcatcatttcacttcctcatctgcactctcgccatgctgtgttttcattcacgtttgcaactgaggctccgagaaagtaggtggtttgtccagtactatccaaccagcagacagcaggcaggattcgcacccatgtctaattcctagacctgggctctttttaccaagcaaatggtaatggttataactaattcactggaaaaaatgtcattttaggcgttaaatctgtggcaactgctttactgagctcaaggaaacacatggaaattaaagaaggctgtgagtccttgggtttagaaaagaagtgatcctagtcaaaaataggattggagtctggtacagatagagacactgaagtggagttagaaagaaaatcactttaacactcggggctgccaagggatggagacatgacaatgaagtcttcaaaatacaagactgaagaagaagacctggttacccatgagtggcttgactctaggggaggctgcggtggcacaagaaaaggcaccatggagtagcaataggagcaaacatctcctaacctttgcaagaggctctagattttaaacctggacttaaaaaaatccatttctgaaaggaaaagttagaaaatggcagaagagtggtgacttcatcctgactcatacagttcactggaaagtagctcgtcttgtgatcaacagccaggggtacatcactctacttggttctgcctgagtgcaagtttattcctgccctctcatatcatctttgaagattagaaagctttgctagcttggacttactctttgtaaacagagcatatggaacaatttgtgtttttctgatcacatgagaatgagagccctccgaaactattaattcttcttttaagttaaaaaaagttttaactttattttaggttcaggggtccatgtgcaggtttgtcatataggtaaacttgtgtcatgggggtttgttgtacagattattttgtcacccagataccaagcctagtatttaatagttatttttcctgatctctccttcctcccaccctccaccctcccatagcccccggtgtgtgctgttcccctctatgcatccatgtgttctcatcatttagctcccacttgtaagtgagaacatgtaatatttgattttctgttcctgcgttagtttgctaaggataacggcctccagcttcatccatgtccctgcaaaggacatgatctcattttttttatggttgcatagtattccatggtgtgtgtgtgtgtgtgtgtgtgtgtcacattttctttatccaatctgtcactgatggacatttagatagattccatgtctttgctattgtgaatagtgctgcaatgaacatatcatgcatttgtcctattactgggtatgtatccaaaggaatataaatcattctaccacagttaaatttttttcttaggtttttgtgctgtgatttcataaagtcaaggaaagaagtgttttgttatagattctctcatgagtgccctgttggaacagaggcgtggtcaggtgaggaaataaccaaaagccagcttggctgaccaagggtttttgaaaactcaggtgacaatgttatgttttgaaatgagttattcaaatatttgttatgagacaaaagagcatggcatgtcagaaacatgaaagcaggcatttaaaacagttataagaagtaacttaggagatgaacaagtttactttagctcttctttttctccctacaatttacaaaactcagataagtaaattaagggtgcacaagaggagagaaaatgagatctgatagaaaacttcaccgtgagacttcaagaatatctgcagagaaactcatcaaaaggataactgaaaatcctgaaa

SEQ ID NO: 33035 - DNA, 2300 bp, Homo sapien
caggagattcctgggtcccaacgctgacctgaatcatcaccaagaaatggtgcattcgcttttcatatcacattacccagcagattcatacttcgtgaattacacactctagatctctgtcacacaaaaaaaatggtcttaggcaaaatctctcatcttctacttaaaacaactggttttaacctaaggggctgatataaatgctaagtcaagcagtgatttgtgtttaacacttgacagtccctcttccaggtactctatatagtggacttttatacaatatgatgtacagtccttcagccaaccaataatacacctaactacaatccattctacatttccggaaccatgctgttcatgaggatatcacttcagatattttgtggaaattttgaaattatggcatctacagaactccctgatatactagctattgtaagccaagccaaaaagcacatgaaggtagtttggtataattctttatctatcttgataattgaaattgtttcactgtaaaactttacataactgagctttgttttaaagcaaaaaacttgcagatgtgagacagtacgagaaaaaagaatcagctgttaccatcttaaaacttaggatagcctaggtgtggtggctcacagctgtaatcctagcactttgggagtacgaggcagattgcctgagctcaggagttcgagaccagcctgggcaacaccgtgaaacctcgtctctactaaaatacaaaaaaaaaaaaaattagctgggcgtggcggtgtgcacttgtagtcccagctacgggggaggctgaggcaggagaattgcttgaacccgagaggtggaggttgaggtgagccaagatcgcaccactgcactctactccagcctgggtgacagagtgagagactccgtctcaaaaaaaaaaaaaaaaaaaaaaaaaaaaaaaaaaaaaaaagaaaagaaaaaaaaccccaaaaaacttaggataaaatcttaaaacgttttgttcgacttaaatttaaattagcagtttaggatatagtacactgataatgtaattacatacattctgctataaaggcatagacatctttattgggagatatgggcagaaaaattatttcctcagggtggggcatttggctaaacacttgccaatatcctttactgtgtaatttaggtaacacaggcagaaaaggcgtttgaaaagcagaaatcaagtggcaaatatcagatctgagggacgcaatgagggtggagttgaaatccgtggtccttggatttgaaacttaccagcccgtgaacaaggttggtattgcttttggcataagacgacagcctttcttttcattagctcaggaggaatactggctttccaagtgagctcctccaatccagtgatatttgcacatctcacctgggcctttcggttacaaattcaccaccttaaggagccgtgtgaaaaagcaagaacaatcaataagaaggaaaaaaaaaaacccttcagctataaatcagccacgtggagctgctgcagcagcagcggtagtcccacttcctggttggcttcctgaaagcctctcgacaaggggctcagggaagtgggtctaagggagaggtgcagacgagagcgactccaggtccaacggagggggcggcgggccacgggatcccggagggcacaggcgttaaggacggagttattgtccataattacaataaaagtttggggatctgaaagctttaaggagctgagctgcagggcaaaggctaagaaccggactcgggaaaagtgcaagttagttacaaggtagcagggactgtgaagggggctcgcgtggagagcaggggactgcggatctggaagggggcaggtagagaggaaggcagcctggcagagcgaggcacacgggtcagtcggagctctgcggtggccgccagaggggagggggccacggggaggagcggagggaagagcccggggaaaggtgtagccgaggggagttccggatctggagctggaaagggcaggcagcggagagggcggcagccgtagcggtaggggtgggggaaagagggggaggagagccggaggagggggaaggagggaggggagagcggtggcggcggctgcgccgggctgtgagtctctcgccgccggaggaagatgaggctgaagattgggttcatcttacgcagtttgctggtggtgggaagcttcctggggctagtggtcctctggtcttccctgaccccgcggccggacgacccaagcccgctgagcaggatgagggtgagtgacccgc

SEQ ID NO: 33036 - DNA, 2300 bp, Homo sapien
tcaaaaatgttcaaataaatcaatatttaaaatcacacaacagaatatgatcggaaatgtaaggtcatttttcacatcattcacttcagagaaagggcaagaggcccagagatgggaaggaaataagaaacatgtttcttttgtcttgactccacaggtggacagacctaaaacaaggaaatagtgcagatgagaaaggaccatcccaagttgtcaaggctgtaacagaatttagtgtatgacatattcatagttcaagacaaaaagtggcacagggtgaatggagccacaggtacaagcttgctggagtagaggcagaacccatacctggtaaactggatcgttcaggctatttaaagggatccaaaaaagtccatgtgtagatcagcattaaagagaagcagagatctcaccatgggtggaatatatgcaatagtcatcgaagtaaaagaaccacaagggggaggagaaactcaggagtcagaatcctccctacaggatttgtccttctagcactgtaccttaaaagctcctaggttagtctttattaaaggaaggcaataatcccttatttatgctcttattatttataagctacactttaaattgcttgtattactatttacctgggaagccaataaaagggtctttcttgctcttctgatacctaagcattcctcttaatgttaattatgttaagtctttaaaatctaccttttgtttttgacaaatgacagaaattacactggatccactgagaaactttatcaagtacactgaaacaaacaaaaaatcaagatatcatcaccttctttatcatcaccatatagtactgaaatgggcattatggcccatcctttgtttgcactaataaaatattccacgagttggcaagtgatgctgatgttccgccacctctttaaaagatcatcagaagggcgggacattctgaacctagctagttttgtcagtttttcgtcagtttctctaccagaaaatagggggttaaacatttctagctacatgtaaaaagccatttgatgacttaaaacaaatatcctcaattgcaatattcagttatcctttgtcaataagtcatattgagagcaaaattataaaaagatcaccatcactccatgagctgagaagcttaaaaccgcaaatgtactgaaaaggaaaactgatactttttattaccatcaatttagatgacttagatgggaatctatcccagatattacaaagggattccactgctgtagagacttcaaatactaaaacttccagattacatctaatctcatgatataggcgaagagctgataatgggatctcctcctaggattcttactcttgaaaggacgccacaagcctttttgcccaacttcttgatgctaactttccagaaggaaagttaaataaacatgacatagaagcgatgctcatcacacttgcaaaaagcactttacaacagagagagcgactcgactcctcctgcagccccgccgcctcggcggtcgtgagcccctcataccctctcctacccccactggcagccggcccagttggctgtcccagcggggaggaggaagcaggtggtgcaacggttcatccggggggaagcaggtcagggtcgggggcgaggccggtgcgcgccgcccgctgccgggtcagggaagccgcagtgcccgcggtcccttccccgcgcggcgcggctccgggtaactaatgttccgaggcgcctgactaaaccctccaaatccaaggaatgtcagcgctaacactcgcgccctgggcggcagacaaatgcgtcccagcggagccgccgcgagctccgcgccgccgctcccctcggcgtcggcctgagctagccggcagccggcgcggggcggccgggcgccgacacaagttagttttccggcccaagcagccctgccgcagccaaggaagaggaactgctcctcttcccccggatagcgcccgagcactgccacagcaggggcttccccaggcgctgagggctgggggcggcgggcaggcggggcggggacgcccctccgccatctccggccaaccgcccctccctcgcccagggacgcgagggggaccggcggtccgggcgaggcctcggccgcgcatcgcaccccggctccccgccgccggagttgagggggaggcgcgctctccgtaagagccggaggcggggcgccatcgccctcccactccccggcgggcgggccgggggagcccggggctgcgaacacccccagacgggcggctgcgggaggggaggctggacc

SEQ ID NO: 33037 - DNA, 2300 bp, Homo sapien
agattttcttagctaaatttctacttagaatcagtgagtaagtgacatatgttaattttcagtgctagtttaataataactttttcataagatttggtttcacacacacataaagtctttataaagccatttgtttcctttaatttcaagacccaaaatattaatttggaattaatattgagtgttttgctcctgatgaagtgtccttaaacaagtctgtcatattgtttgaacttttatttctacttcctcatcttcaagtatttgtgactatttctcatgttgctaaatttagttatttctgaaaaagtaccaaatgacctataaacgcaggaagaacagtcttccaaagcctgaagggggctctgagtgactgactggctctgggcctaggctactttgaagtgcaattcacgtttgaaacagttctcggagtctaatgcccttccattcagaagacctgtaaatgcttgagttgtttctccatcttctctaaagaaaacctgactgtgtaatttctctaggatcttagggtcatgctgcaaaggaacaaaggtgacattaaaaaacactgtacttcctagttgccaataatacctgagtataaccccaaaacatatttcttctctaggaacactagatcctgaaggtaatctctcaaagtaggagcagagttgtccttacctggctaatcttcttggacaatctgtgattactgtcaagaacttctgttccattccatgcttacagtgaaatcagataagatgatgacttccatgagacaggtaaaggaatttacacttggtttactcagatgcatagtctcttagttaagacagtagatctggcatttgggatttaatagtgaggacaaagagagtgcacacacatatcactatgtggtttctattaacaatttaaaacctaaaactaaaacatgcctcttattaatgttgtacagtcaaaagaatagctgccttcaagttaacatggacatgactaataacttcagctgcttactttacttgctttcagatgtggaagagatacttactcgcaaattcctaattaataggggaaaaaaatctaacagttggacaatacaaaattacataacaattttctagttcatattttaatacagaagggagttttaagttggaatttttttttttttttgagacagagtctcgctctgtcgcccaggctggagtgcaatggcacaatcttggctcactgcaacctccacctcctaggttcaagtcattctcttgcctcagcctcccaagtagctgggattacaggcgcctgccaccatgcctggctaatttttgtatttttaatagagacggggtttcgctatgttggccaggctggtctcaaactcctgacctcaggtgatctacccgcctcagcatcccaaagtgctgggattacaggtgtgagccaccaagcccggcccagaatgtattttaagctgtttaaaatggaagcattttatatattctataagaccttctaaaaagaacttggaatttggagcagggataaggcactgttatttggtaacgtgaagttttttttcttcaacttttaagttccgggttgcatgtgcaggatgtacaggtttgttatataggtaaacgtgtgccatggtggtttgctgcacatatcaacccatcacctaggtattaagcccagcattcattagctattcttcctgatgctttccctgtccccacagacaggccccagtgtgcgttgttacccaccatgcgtccatgtgttctcatcattcagctcccacttataaatgacaacatgtgatgtttggttttctgggtaacatgaagatgttgttgtcatgaaaacaggtttgatgactatagtgtaatagtgtaataagggcctaacctcagagacactttcacatttggatttttctttgcttcctagatgttatctttattcctgttgcttaaagaaccagtttaatgcatatagaatttgggttctttgcccagacacccagaggtacatttgataggtacctgattcagagaaggtgaaaattttagattctctatctctctctctcccttttttttttttttttttttgacaggtaaacagaagtaactatcatttggggttgtcaagatatgggtagtagatacctaattccatgaatgccttctctgtgcaagtgctggaaagtaacctcagacttccagactcatcactgagattctttttcttaagcaaaatagtgacgctctgcaggatttctataactgaag

SEQ ID NO: 33038 - DNA, 2300 bp, Homo sapien
ttaaccagatttgcatctatttgtaaattctttgcaatattcttgatgtttatgtttgtcctttggatttatttttgaaccagttgtaatatcttacaggttccttttttaatgagttagttaaaatttatgtcccatcttcaaaaaaaattatcttgttatatatacacatgtatgtttatacatgcatatcacatctgtagaaaaattcacaagaagttggtagctgtaattacccctgcagaaggaaaggcaggaaagcttgcttttcactacatgcccttttggatgttttgaattttgtgttgtatgcctatgttacctaaacaaatagaaaatttttaaaaatttctttttgaactcttgaaaatcaagacttagcgatcccttgactactaatttcacgtctgaaataactgactttctataaaggtttttgcctctaaataaactactaatagagagcagcctacacatcaacatcatacttagagacttacttttgtattttttaaggcaaactagtaaactttacttttcaaggtagctctaaccctgtagaaagattttggtcgggtggtgctaattctatgactactctgttggggaatcacacagttttagtgtagagggaagtggcagacccatcagcctattttgcatttattctgtatgcaccttgcctcttcaccagctgtgtcctctataatccccttgtctaattataacgagcagccctcccattaagccagtgattctcaggcttagatgtatattaaatcaccaggagtgcttttaaaaatcgaaatgcttagaccaattgaatcacaatgtctgagggtaagacacagacattggcattttttaaagtgatcaaggtgatgccaatgttgagaaacagtgtcttgtgcgaagaatggtactggcttaggaaaaaacttaacaaataatacctcagaagcaaaagcactcaggatatctgactggaagatctgcataggtgatgaagacggcccaaacagaaaagagaggcaccctttactgtgaatgaatatccttgtacaaagaatctgttttgacccatgctgcttctggaatggggcaaactagatatgggggagtggtttaaaagcccgagctgacttagttacagatattagctttttttatacttctgatttcagataaactctcagtgagtaaaaaataccaaatcgggactctgcatatccccgccttgttcctctgccatttggggcactgagccagcctgctgacagtgacatccatctaataccactgccaccatatggttgtgctaccgacaaaaggttatatttatcacacacggtacaactgggaaaaccacatactgtacaaacatgacctattaagcatctgttttaatcaaagattctagaacttctttgctctaacccttaaaaatatgctttattaagaggtctttgatagagaagtagatttgtaaagggagaagtaaaaatgcatcctttcattaattttgaaatagtaaggcgaggagatagcctatttcttggtatttcttctctaccctgaaagatatctcctaatgggaagtcctgattaatggcccgcttgtattccaaactgttttattgttgcctcagcctttttcaaaacctgaaaattggtctcatgagctctactgtggtggtttgccttcatgtactcattgtatatcccctcccttttgtataggaagacagagatgtcaatgaccccatgcccaaccgaggcggcaatggactagctcctggggaggacagattcaaacctgtggtaccatggcctcatgttgaaggagtagaagtggacttagagtctattagaagaataaacaaggccaaaaatgaacaagagcaccatgctggaggagattcccagaaagatatcatgcagaggcagtatctcacatttaagcctcagacattcacctaccatgatcctgtgcttcgcccagggatcctcggtaactttgaacccaaagaacctgagcctcctggagtggttggtggccctggagagaaagccaagccattggttttgggaccagaattcaaacaagcaattcaagccagcattaaagagtttggatttaacatggtggcaagtgacatgatctcactggaccgcagcgtcaatgacttacgccaagaagagtaagcacacatcctcttctttctaaaaatggggcaactgttgttttcataggtttttaggtttagttagattgttagaatgaagaaataattattgat

SEQ ID NO: 33039 - DNA, 2300 bp, Homo sapien
catgcaatacttgtctttcggtgcctggcttatttttaacataatgtcccccatgctcatccatgttgccgaaaatggcaggattttattatttttatatctgttctcttattaatagtataacttcttacaacttagatttaagcagaggcccttctacatataattggaattttatatgtccacatttaaaaagagttaccttgggattgataacatacttcttttgctcctaagtaaaaatttttattactataaaatgtttcacaaatgtatcaaaaatactacaattaaaactactgctctgatcaacacactttcgtgctcttttgtctggtatagtgaaaggtcggtcctagaagacctggattcattcttctcagccacttaatttaatcctggatgatcacatactgtttatacttgggattccttatccacaaagtgagggatctctcacagtaccaaggaacccctctggcccccttcagttctaaaattcttttcttttctttttctttttcctttttgagacagagtcttgctttgttgcccaggctggagtacagtggtgctatctcagctcactgcaacgtccgcctctcgggttcaaacaattcttgtgcctcagcctcctaagtagctgggatcatggccgcacgccactaggcccagctaatttttttgtatttgtagtagagacagggtttcgccatgttggccaggctggtctcgaaatcctggcctcaagtgatccatttgcttcatccttccaaggtgctgggattacaggcatgagccattgagcctggccagttctaaaattctatgacacatttaatatattatgagcaaggttcttgaagcgtccaagccattccctttaaaagctaccatgtgactcccaaagtgcaatcttatgcactgggctcccatccattctgataagcagtttatctgggccatttgaagactgagatgaaagcaaagcgctagactcagaaaaaagaaatgaaaaaggtaaaaactctgaaaagacatgtggaagaaattcaagacaatcccatattgcttcagagaaggaagaagggagagagacagggtggggggtgggggagggagggagattggggggaatgagggggtcttgggggtggagagacagagacagagagagagagagagagagagagagagagagatgcttacgccaccatcactgctagtaaaacagctagcatgtacttgctgcttaccatgtgctaggtggtgagctaaacatgtcacaaacctgaggtcatgtagagaaggctggtaagggtaaaggataaggaaatatacgggatgataagcttttagaacaaaaaataagttttctatgttctaaaagtcatgaatgtatatacagagatatggggaaagaccatgacaactattcaccaaacagtagctggctctggaaaggtcacttcttagtatgtcaggcaaaatgggtttcctccacccctggagctggcacaaacaaaggctaatagaggaagacattctcataacaggattatatcctggaaatgctagcatggttgagcttggcaatataaaatggctgactgtcctccagctaatccatctggtcccctgcctgctcctggggaaaccgaagaagggcaagcctggtatcctggctgcgtctgatgctctccttgccaggatgggcacagtgttgagtggcttgtacatgaagcgcaagttttgccaaacagtgcaagttgctaaagtgctgggatcaaagcagcatttgcttctgcaccaatactaggtagccaagtaaatagatgccacatctatcattattttccaaaaagagctgtcgcacctggcagtggcccaagggctgtgaagccactcccccctccaggatgcaggaagaggcaataccacaaaagaaagcatgccacaaagttcaggctcgagtgataacagctgcacaccagctgcttgctggctggttctattcagcttttttatctagagaaacaattgtggaacacccaggggagaatgtagaaacacagaaaaacttaattttaaaatgagagagacctgggaaaacatctaggtctcaggtttccaaacttgttggaggagcccacggatttaaagaaggtgccaagaacaaaagcatagagttgcctaggaagtcacttgaaaaaggattctggggcttcttgtggttaaaacaagttagaaaaattgacgactccctctttttcagataagaaaattgagactcagaggat

SEQ ID NO: 33040 - DNA, 2300 bp, Homo sapien
tgtacaatactttttacttaaatacacatgatattttaatccttggcagatgacatattagagtcattaacttgcatttgttgtttaattaaatgccaggtcctgttgaaatgaatttgttatgtgtaggccattttcatgtgtctaatataggctgtttatgatatgacatttgtatttttataacgatatatatatatatattttttttttacagaattatgttagagttgtggaggtttggtgggatgaatataaagactacttctatgctagtcgtcctgaatcgcaggcattaccatatggggatatatcggagctgaaaaaatttcgagaagatcacaactgcaaaagttttaagtggttcatggaagaaatagcttatgatatcacctcacactaccctttgccacccaaaaatgttgactggggagaagtaagtagtcacatctcaaaatgtatgtgtttgtagactgagtttgggagaaggcagagagaggtggaaatatgtaagagggaagtattcttggggaaaagttggggtaaaaactgtctgataggatctaccacctttccactaaacagctatagctgccagaccagctggccaccatgctgtctcctggcagcctttgctcattggccccctagcctgcaagacatccactcttcactccagctcctggcgcctccatgcctcttactccaactcccttccttaactaatttcaatttatcttactgctctcaacttagagatcaccaatactgaaaagcccttcttactattccccacttcatcaaaaagatgcagttctatgttctttccaggggttctcacaacacccaaaatcacctatctcccaaccagtctgagtgcttcaggaccttgatcacttgtgtccaggtggactgatgcagggacccatatacagtagatactccaacaatgcttttcaaatgaattaaaaataattaaaatcagacaaaagcactttgacaatcagacattgtcatttctttgtttattcaaacttgtcttcagactcacttctgattgctccctgcagccccgctgtatgcctcacaggtacactaaacctgccatgaacgttcaagtctacatccctctgcttaattatgttcagcaaatattggttgagggcctactatgtgccagtcactcttctagacagaaaaccagagaagcaaagtcgtttttctcagggaactggcatgctacctggggagagagaccaaaaaagtctgagaaaacaaaaatgataatgacagatggtgataaatgataatgacacataatactgtcaagaggacttaagggcagggtaaggaaagcctctctgaggaggtgacattcgctctcagatctgaatgataaagagtcagccaatcagagagtggagatgaagggaagctgaccaactgcggaagcatagttcatctgggagtggattccttatgggttggtgtgtgaagggataagggccagaatgacatcgaggttgttttgagtagctgattaggtggctgctgagattgggaagatagtaggggagtgaatggagggggcaaggcttctgttggtgttctgggcatgtgaagtacctgctaggcgtccaggtagagccattaaggcctactgatcatagattgtaggttgtatgatgccaaagtccagaagagaggccactctggagatgtgcatttggggccatcagcaggtaggtcgtttcatgggactgaatgaggtccccgagggagaaaacacagatagagaagagaagactagacccatccgtcagaaacgccagcatttagagttcaggaatagaaggaaaaaccaacagaggacactcatgctgctctctctgtacttcttgctttaatatactttttccctatactcttattttacctgtcctattacagcaaattatgtttaactccaactagaccataagcctttcaacacacagatctctctctgagggcccagacaagtatatccaactgtatgcttaacatcaggacttgaatgtgtaacaggcatttcaaactcgacatagcctaaattgaacttcctatctcctccccccaacccatctttgctgatttcttggtcaaaaactttggagtcttccatgaatcctgtctttgtctcgcacttcatatctagttccagaatctgatcccttgttgcctggtctaagccaccatcatctctcactgagactaacttgttgactctcctacagcctatttcaaatacagcagtcaga

SEQ ID NO: 33041 - DNA, 2300 bp, Homo sapien
gttttcctacttccctacacagtctttaggtgactgtcttatgctctcattaatgaacaattttaactaatgttgtactgtttcctatttttgtccctctaaatttttgaggtcacaggctatgacttttcatctttgtatctcgactgccaagctcaatgcttggcatattcaatacacagttcttgaataaaggcccagtttttatataagcacagcttactttatgccataatttaaaaaaatctaaacagaaacttaaaaatacgttttaaaagtgtaatgcattagtgatctcactgctaattgctatttgaataaagtactatgaattacttggttaatttggatttttgggtgcttttataacacccttgtaactaattttgtaggtattacaacttaaggcagaaaagagaatgttataaactaaggtttttgattaacaaaattctgggacccttaaataaaaggaaatacatttttttctgtttgaaaaactgccactttatttttttgtggtaaaacatacataacataaaagttaccattttacccattcctaagtgtacaattcactggcattaagtacattcacaatgttggacaaccattatccatttcctaggaaaatacattttttttaagatcttttttattagtaaacctagataaacaactgctggttttcaaatactattatgacaaccatatacaaaccaaagagcatagtcttaacatgtgccaacgaacttactgaaaaattaagacaaaatatttaaatttcttgaaacagtcacgcaacctatattccaataatggggggaatccctcaaaactaaataccacagaaatagcacaccaggatgtcaattaaagtcctctaccttgggaaaagcagcttgtgacgctggtaagcagtaaggtaaggtagctttggcgcgctctccctatactaacacggaggttcttaacccaagcttggaggagcctgtaacgtggctgtatgccgtttggagaatatacgcaattgggagtgggatagggagcatgcattgcttttatgcgattctcaatttttaaaaactatcacactagtaggacgagacagtgaatgcccaggcgaaggccaggccagccaaagacagggcagccgccggctccgagctcccggcgcaccgctgcagggtgcggcgtgggggccgagacactcggggcttggaattccggacccggtaggagggggcggggccgggggagaaggcgccgcctccgccccttcgggacccggagggtgcccttgtttacctcccagtatttgtcacccgagacaaagagggaaggaaggaggagccttctgagggaaactccctcggcgggaagcatcttactttcagaacgttttttaacaccctacgggacgcgggaacggttccctcccggccccccgcgccctttccgaggttccctgccttgacttccccgagttctacgacaacctcagcgacagcgggaggagctgggcaatcggttttgcagggcaaactccaggctctcctcatttattattctctgggcggcgcacgggagaccctgcagggcaacagagcagagcgactacagctcccaggagccaacgctgcagggctgagccgacgcgggggacagacaggacctaaatggtggtcggaggaagggcaaggcagacctcttctgttaccttagcgccagcaaaccgagccgccgccgtcgccaagccaggagaccaacccccagtctcccgactaagtatttttaaatctggcggggctttccttcccgagccaaccactcccaccgtttacagccccaaccagtcagcgtgaggcccgccatttttcaaaccctcttcccgccgccaatcaggatcgagcagtacattcctctcctgaccggttctaacgggtctgggagttaacgacctgggcgacccaccgaacctgctaggctggggcgtggagggcgggtctggtaagacactgaccaatcgttagcctccgtggcaagggggcggggactatctgggtttgaataatcgtcagaaccaatcagattagtggggatgtggcccgtggcctagctcgtcaagttgccgtggcgcggagaactctgcaaaacaagaggctgaggattgcgttagagataaaccagttcacgccggagccccgtgagggaagcgtctccgttgggtccggccgctctgcgggactctgaggaaaagctcgcaccaggcaagaataccctccaataccctcgggttc

SEQ ID NO: 33042 - DNA, 2300 bp, Homo sapien
ctacactccaaaaaaaaaaaaaacctttatgaaaaatagtaccccaaatccaatcaattgctagtttaagtgatggaatagaaagaaaagagatctaagaatcattcttagaaaacagatgtgctagaatagaatgtaaaattcagttagtggctctgattttggatgtgaataaattcactatttgcattacagtgacattaaaaaaagcaggttgtgaaaccatcttattaaattatacaaataatgcaaaattcctcaagtgaagtaaaactttagtgaacattaaaaagttgattaacttgtagtgagagattattaatgtaaataagtgactcacatctattaccattgcccctctgactagtttcggactcatagaaaagaatgaacacagtgaattgatttctaactttacctcatttataccacgccatcaacactgctatctaatgtggaaacctaattatttcattttccccggttttccactggggagataaagactaaattcctctataagctgcaggttgagtatcatcatcattaagttcctgtaatacagaactactactagttgatccccaaacaagcaaagctctctcaaaggcctttctgttttttgtttccccctgcttgacgttctccaatccacctctactcaaatgctactttcatagaagagttttcctacttccctacacagtctttaggtgactgtcttatgctctcattaatgaacaattttaactaatgttgtactgtttcctatttttgtccctctaaatttttgaggtcacaggctatgacttttcatctttgtatctcgactgccaagctcaatgcttggcatattcaatacacagttcttgaataaaggcccagtttttatataagcacagcttactttatgccataatttaaaaaaatctaaacagaaacttaaaaatacgttttaaaagtgtaatgcattagtgatctcactgctaattgctatttgaataaagtactatgaattacttggttaatttggatttttgggtgcttttataacacccttgtaactaattttgtaggtattacaacttaaggcagaaaagagaatgttataaactaaggtttttgattaacaaaattctgggacccttaaataaaaggaaatacatttttttctgtttgaaaaactgccactttatttttttgtggtaaaacatacataacataaaagttaccattttacccattcctaagtgtacaattcactggcattaagtacattcacaatgttggacaaccattatccatttcctaggaaaatacattttttttaagatcttttttattagtaaacctagataaacaactgctggttttcaaatactattatgacaaccatatacaaaccaaagagcatagtcttaacatgtgccaacgaacttactgaaaaattaagacaaaatatttaaatttcttgaaacagtcacgcaacctatattccaataatggggggaatccctcaaaactaaataccacagaaatagcacaccaggatgtcaattaaagtcctctaccttgggaaaagcagcttgtgacgctggtaagcagtaaggtaaggtagctttggcgcgctctccctatactaacacggaggttcttaacccaagcttggaggagcctgtaacgtggctgtatgccgtttggagaatatacgcaattgggagtgggatagggagcatgcattgcttttatgcgattctcaatttttaaaaactatcacactagtaggacgagacagtgaatgcccaggcgaaggccaggccagccaaagacagggcagccgccggctccgagctcccggcgcaccgctgcagggtgcggcgtgggggccgagacactcggggcttggaattccggacccggtaggagggggcggggccgggggagaaggcgccgcctccgccccttcgggacccggagggtgcccttgtttacctcccagtatttgtcacccgagacaaagagggaaggaaggaggagccttctgagggaaactccctcggcgggaagcatcttactttcagaacgttttttaacaccctacgggacgcgggaacggttccctcccggccccccgcgccctttccgaggttccctgccttgacttccccgagttctacgacaacctcagcgacagcgggaggagctgggcaatcggttttgcagggcaaactccaggctctcctcatttattattctctgggcggcgcacgggagaccctgcagggcaacagagcagagcg

SEQ ID NO: 33043 - DNA, 2300 bp, Homo sapien
gtgctgggattacaggcgtgagccaccacgccctactgtgttgtaatactttaagccagtgttatctaatgcaacaggtacaatttattgtaatattttgtttaacccattacatccaaaacatttaaacatatataaaaatttttaatgtgcacttcaatattctttttgaaaatttcttgtagtaagtccagaaataaaaaaaaagtccagctgatatatacttacagcacatctcaattcatatgctaaagttagagttcataaaatttaagttggaaaaacagattcatatatctgagttgttgcaaacacacttaaaagtattccaacaattgaatcgagcatcaggtttttggtttttgtttaattcaaattcaattaacgattcagtttttccgtctcaaccacatttcaagtgctgagtagccacatatggctagaggacagcctactggacagcacagcttaaggaggtacacaatgtacttatcagtcatcatctttctttttcctactgaatttacgtaatatttaaattgtttttctttgtcatatcctagaactcaaacgcacagatacaatggatacctttgattttctgcgtcgatggcattttgcatttaaaaagatcatctgggtggggtggcgcgcgtctgtaatcccagctactcgggaggctgaggcaggagaatcgcttgaactcgagaggcggaggttgcaggatcgcgccactgcactgcactccatcctgggcgacagagcaaactgtctcaaaagaaaaaaaaatcatttatcactaaatttactcaccaaaagaacttgcaaaaaaaaaacccaaaaccctactgcctaaaatatattttaaaacgtatttgtgtttaagcagcatatatcttttgataaataatgacgcatggtagctaactagtaaagatgcagctttcatattagccacgcccatccctctctccgccctccacaagcacgtccccgcaagcgcgcaggaacatacacgcgtacgcgcgcacacacacgtacacacgcgcgcgcccgcgaacacatacatacaagcaggcgcgcccaaacgccggcagcacacaggcgcgcacgcgcttttcaggactcaggaaatgcgctttctgctccccgcgcccggtagagctaatgcagggaagtttctgggaacattcgaccagcgtttgtattggtgaggttccaagtttcctttaaaatgatatgactccgcccttctccaaaaccgtttgaggagaaatggaaaaggttgggcgtggaggtgaaaaggagccctgttgtcaactggtccgtactccacctcaggaggcggccaacttggtgcgcccaagaataaaaacatttcccttgtaagaacatgcaagtgtttagaaacgcccccccacccccccgcaaggcgtttgtgagggggacctgtcacagttgagaagtcaggatgggcgttttcctcccaggaggtgccctattaatttgcggcctcgatagttggtcaagccgggatgttagctgcggaacctccaggaccgaagagcgccaattctcctgagttctccttggtttgggtttcccacaaaagagtggtcacaccaaaaactctgtctccacaaatgcgaaacgggctcgaaacttttttttccccacacgatcacttcccacaccactcccatccctttatgtttcgcctcaggagtcgaggaacttctctgaaaaccaattctacgatattccagcagctaaacacagcccgaattccctagaaacagagagagcgagagaaaacactgtaaaccccaatcacacgctcctgttttcccggtactgaaaaaaaaaaaaaaaaaaaaaagtgggtccgtggccgcgctatgcatgctaggattagtagttcctccgtccctcatggcgcggggtcagggcggagctcaggttgactctgcagcagagaactacaattcccatggggccgcgcggcagaaagaaaggggcgggacgggagggggcgcgtcgcgcttgcgcaggtcccggggccggagggaggcggaggcgtagcggtccaactgctgaagtccccatgtgacagtgagcggggtccccgctccaggagacgctcgagtctgcgtcccggccctcagcactgtccactgtttcggtgccagcagagaccagcaggcccgggacagttggtgtttggccgtgccgctgtctaacttggtgtgcagagtgaattgccgctgccggagcggagagaggcggagcggccaggagag

SEQ ID NO: 33044 - DNA, 2300 bp, Homo sapien
acacaaggagacaaaataagcaacacaataagggaaatttagacagaattagacacacagggaaataagagtaaaacagagtaaagagaggatccatctacagggaatgttgatttgccttggcaccatacctctgtttagatctacctgaggtaaacaggacggatagctcttaaagtggaataaaggctagtttccattttcctcctcatattcacatatttatatacatttaaatcatgcaaacaaattaactccatctgtgtatggcatcatctttatttagtaagaatcacagcagacttgtttataaatatgcaaaggaaatgtgcagtccattgcgcacacacctctcatctcccttcctgaggtccatgccacttgctccagtttcagcgaaatggagaccaagcagagatttgatctctgtcagggctggaactgcttctggttgtattgaccttctctttgctctgcctaccttcatatcagggtgtgcacgtgttgttctcccagcactgctgtcattagcagccttccattcacctccattctcttgaaatactcttcctttaacttccatgatgacactctcctaattttcccctacttctttggctacctcttctcagtttccttcccagttctctgcccattccttgaataattctgctctcagtcgtatcatgaactttataatctattctaaggggcagtacagcataatggtgggaaacaaagacactagaaacacactgccagggtctcgccattttctggctgtgtgtgtgatttggggcaggttacctgacatctctgatgttcccctcgtttataaaatgggactaataatagtacctacttcatagggttggaaggagagtgaacgagttcagacgtatgaaatgcctggcacacagtaagagcacagtaacttcttagtggtacaaccatgacttcggctatcatttagttgaatacctgcattagttatttagttgagattatttgatattgagttgattggttgatgaactaattctctagaccaggctttttcctaagctctaggtctatttaaccaactgcctactaaacattctcaactgtatttagggttccttaaactcaacgttcaccaactaactcatttctattttcccactcctcctccagccaaaacttttgtattctttttcctagatgaataacagttattccttttatatcctttttctagatgattaacagtatcatcgtccaaaggcccaagcctttgaaagttaataaaatttcctatctctatgctaaacataaacacttaagtggtcatcaggtcttttcagttttccttcctatcttcccttctggactacagcaaaagccggtattttctgtctttagtctcctttcctcccaggaaaccatccttctttcacactgcagtcaggcttttcatcctttttaatatgttttcatcatctttccattcatcttcacgataaaaacaatttttttagcatggcatatgaggtaattcatcaatttgctgcttcttgtctctcaaatttcatctcctaccacctttggttttagccaaatgaaaccacctataatctccgaagttgtcaccctctttttcaccttcatgcctttgtaattcaacctggaatgcccttgcctcaattgtctgtctagataattccaactccattacaatataatatctctaattcccaaaacactactcctaatcgaattttttaaaaacctaaacaacagttaacagatgctagaattccagtatagtttgctgaaaacagaataaaatttcttttgtgcttttatttctaaggcacagaatacatttctttttagtcatcattttagctttccattgactactaatgagtctttgggtgagaaatggaaggtgaattggaacgtatcttctaccaggattttgtaacagatctagatggctaggaaaactgtgaaaggggaagaggtgcgcagctagccattccccactttcctcttctctctctctctctctctcacacacagacacacaaacacacacacacacacacacacacacttttcttaagggaaaaatcactctgtgttcttttaaaatccctcaggttttatgttttattgctaccagagtctgcctccctgaggttcttgtatagactagttatttccctctgtaaagaagctgttctattcgttctcgcctggtttggaacaaactgaacacttccaaaggaggcagtccttgcagccttgtctcc

SEQ ID NO: 33045 - DNA, 2300 bp, Homo sapien
cacttgagccatactggaccaatcaacacgagtcactaacatagagtgtggaagcatagtaaaaattctgtaaggtagtaacaatccaggggcaatttttgttaattcacccccaaagaaggaggcttatttagaatattagtattaaaggcaaagattaatttgatcaaattgtcatttgatagaagacagtgttatagaaaggtgtgggtttttttcgtagaattgttgctatgctttaaactttcagtggacataggtgactctctaacacatacccaatcctctggaataacaagttatatttcatcaggattatactgtatgtaatatatttcatgtgtttagagattaaatatccagagaaaatatcatcattgcctatttcctggcatttcatgtgtcctatctgatatgtatacacataaagggagcaagttttagttatctaatactgtgttgtatttattatttcagtttgaaaatgcttttatttagatttccaaatatgtaatttttaatgttttattagtaaaggagcaataaaggaacaattttatagcaaatttaacacctataaatttccctgtttgcagtgtaaaagaaacagcttccatagaccacaggtctgctcaaatttcaaagaatgttaaatgaaatactgctaaactgccctaaagttatcttattccataaaataattgcaggttcattgtttacacttttatacaaaatggtgtctgattctgaatggatttattatatgaatgtgtttattatttttaaaatagctatatttgagaagctgcataaaggctagattattacaaataatgattttaattgacctgaaaaataaatgttaaaaagatattgaaaactatgtccacacaaaacgtgcatacaaatatttatagcacctctactctctttttttcgtttttaaatgaagtctcactctgttgcccaggctggagtacagtggcgctatctcggctcactgcaacttccacctcccaagttcaagtgattcttctgcctcagcctctccagtagctgggactacagggcgctggccaccatgtgcggctaatttttttttttaatgtatttttgtatttttagtacagatggagtttcaccatgttggtcaggctggtctcaaactcctgacctcaggtgacctgcccacctcggcctcctaaagtgctgggattacaagcgtgagccaccgcatccagccccagcacctctatttttttttttttttgagatggatctcgctctgtcgcccaggctggaatacagtggcatgatctcagctcactgcaacttctgcctcccaggttcaaacaattctcctgtctcagcctcctgagcagctaggatcacaggcatgtgcccccatgcctggctaattttttgtatttttagtagagacagggtttcaccatgttggccaggctggtctcaaactcctgacctcagatgatccacccatctcggccccccaaagtgctgagattacaggcgtgagccaccatgcccagcgcgcacctctgttcttaatttccaaaactgtacgcaaccaagatgtcctccaacaagtgaaagtataaacaaactggtatatctatacaatggaatattattcagtgataaaaagaaattatcaagccatgaaaatacatagatgaatcttaaatgtatattgctaagtgaaaaaagccagtatgtaatggctacatactacatgattccaattatatgacattctagaaggggtaaaactatagagatggtaaaaagatcaatggctgccaggagttcagggtaggagggaggggagggttgaataggtaaaccacaggagatattttagggcagagagactattctgtatcataatgtaatggtatgtacaagacactatgtgcttgtcaaaacccacagaccttttcagcacaaagactgaaccttaatacatgcaaattactaacaattatttaggaggttggacaatcccaggataaaaacagaatgtgacaaaacaatctaactttattactcatgtatgaaacaacctcactgaaaggcgtagtgagggggaagttgcagacctatgtaactttggaaatgagtagagtctgtcaaactaaaggtaaaagacaccgtatataaacactgtactccagctgataaaattgtttaccatgaggtatgtgccaacaattccgatgctgctatacatgtatactggaaatgaacaattaaataagtggctgatagtaggagttagg

SEQ ID NO: 33046 - DNA, 2300 bp, Homo sapien
aaggcaagtgtctgtaaacacagccccgcgcccaccaggtcggcccagcgccggctgacccaaggggagaaagttcagatcgctttggccgagttgttctaacccctcgccctcgcgttgtcagccgcccgcagaagtccgcagagcctctagcttgtctctccctgggcacttctgaattcgcccacgccgggtctgattcggcctgctgcaggcagaggggtcatagtggacaccagctaggcgtgggaacccttgggacatcgcgggagggtctgtgcccgaggccaagttgcgaacatcaccctgaggatgggttccaggatggaaaccctctggcaagcctctccaacaccagatttatatacgcggcgttccatgaaacaaaccactttttaatacggttcacctttctcctcctcccacccccttccaaaatccctcccagcctcctccccccttcccgcagcctgcacaggcactttagtttctccggtttctagagctgagattcaagcttccgccaaggctgcaggcaaaggaggccgctgggactttcttctgggacgagctgggactcagggagcccaaagacccaacagggagagatcccgggtcccgtgctgccggtagtcccggaagggtgtcgcttgtttcgctgggctgcggccgggaagacttcagacaccgcacagttaatattgagttccctgtaactccttgtaaatctaacccgcccctcgcccctctttaaatccgtggtcttgttcacgatttcttacttgacgtaaaattccttgttacctaatcatggactttttcgaaactccctccacccccctttcccgcctgctcagatgagaagcccccgtatagaatacaagcaaaatcctctcctctcttttctttttccttttttttttcttggatgaaagccccatagtttgaattaaacaccccagactagttcccgttgcagcaataatgccggggttctcctcacaactcctccaccagaaacactctccaaacaaaaactgacggcctcaagaaatggcttctgattgacttcaggaaagcaagagcacctttacaccttctgagcgaactgccggactgggttctccagcccagatcttccttctagagactactcagcgttctccagctgggggaagagggaaggagacaccacaccgacaaaccccagaccatttgcaggatttgtaacaaggacacttctctttaagagcacctcctcctcctgcgtaggccgcaggtcagggtgactggttggaaccactgagtctttaaaataaagttagaggcaatcatgataatttagtttacttctgaatattttaaatattacgaaaacaagtataacagctttgttttcaaaactcttttgaggtatcagccattaaaagattaaggtttttgtaaaaaaaaaacacagtggtttattgaatacttacaacgtttacaccttcaatattaattaaattccatttagttttagaggacggaagtgcacaaaacaagtggctgttggaaacatcttcaaagagggaacgaccacagatgaatggatagcactagataccgaccccaacggaaatgttagcggccctgttttctgctttgaaataaaactttataatacccaggaatatttatatccaaaggccaagtattaaagatacacttcacaaacgcactagtgcccactgtctttatctggaaggggttgagtaggttggcggggggcaacgctggtgtctacacagccaagagggaacattcacgcacacagaatctatgagacgacgggatcccttaccacacgggagtgtcctcttcgtattaaaatatggaatgcttttcttcaaatatccactttttttttggagggggagacggggagcagatgcctcaaagggggtcaaagagaggggaaggaaattgcacataaataaaccggatgattccaaatgcaaggagtcctcagagcggagcgcggacggcttttccggagtcctgggtctgcatctggcgccttggcccctgctcactcgcgctctcctcctcctccttctcctcctcctcactgcttgagctccagggcccagacgtgctgcggccagcccgtccggcctttggttttcttgtcgttgctgctcactgtgcttttcaagatttcgttctggacagaggaaaggcgagggcgagaaaagtggaaagagaaattcagagaggatacctggttccacaccaacccggagcttcctgcgccggag

SEQ ID NO: 33047 - DNA, 2300 bp, Homo sapien
agcaagattggattggaggccaaaagaagggtctaacagagacggggtgaggcatccagaccagtgcgatcgcgatcgatcgcgacccagagttttcaaggtccgtcctaagtactaggggagcagcgataacccggaggtaagatcaccagcgcaaagcatccctaaccttctcctcctcctgctgacaccctcccctcaactctctgcttatgccggaagccatccttacacaacctggtgcaaacaaccttgaagcgggacgcagccaaagaacacgagatgccatttctcagcccaattggaaagaggccgggagcaccagttccctgaccccctcagccccaccgcctgccgccccctggtactgaccagctccttcttcctcttctcctctttcacgtcggtcttcttgatctctgccttgaaggcctccgcctcgccattctggtcgtccttggccagcaggtccatgaggtaggcgatgtagctggtggccaggcgcagggtcttgattttggagagtttggtgtcggcgggtacgttggggatgcactcgcgcagttcggcgaaggcgctgttgatgctctgagtcctgcgccgctccttgcggttggcggtgcctcggcgcttcaccgggcgcggcccccccaggcccgggggcccggcgcccggcggcacccccccgtaatgggagtggtccaggccggcggcgccgctggcatactcggggctgtaggacagggccatgctgtagtcggggggcgacatctcggggtggccgatgagccagccatggaagtaggggttctcctcatggctgcagcggctggcggcggcggcggcagctgcggcggcggcggcggcaaacgggtagccctcgtggtgcaccaccgggtggtggggaaaaccacctaccagactcatttcgccctccgcgcccctccacgcgccccagcgtgcgcgcagccccgccgcgccctcggcccgggcccctgcctcagcgctcggcgtcctcccccaccccccaccccccagcccccgggcgcccgggcccgcccggcagccgcagagggggctgctgcagcccgggccccgtccccccgcctggccagccgggcccgcctcagcagcgctgcggccgccggctccccatggggcgcggcgagctggtcctggcaccgtgcgcccctggccgccgccgccgccgcctccggttcccgccttgctccacggcccgcgcttcggctcctgcttcccgggctgctgcgcggaggcagaatcctctcgtgctcatacaaaggtgccggggctcccgcgaggctggtacgcggagtctcgggaatccaagcccgggccgcggtcctggcaccgaagctaacccggaatccaggggcgagtctgagccgcggctggaggagccggtccagctgtgccggggggcggcggggtcgactgctcactgcaaagctacctccgtgcgaccctccccttcccgcctcttcccctccccccaccagcccgatctgggttcttgggcgcttattgttttaatgaaatttttggttgttgttgttttggtccttaaatgtgattttagctgcgagtaacgtgtcctcgctcctctcgcgctctctcggagggttttcagagaggtctcagtgcatccattttctcagatcctctcctttcggggcaaggatctggggccctgaatgagccttggagctcgaagaccgcggctcgggctctcggagggctctgcgcggtggccgaggaagctccggggtgacggcggtggttctcctgggctggacgacgtgaggggagcaagcggattttcccagcaagatctccatgtacagctacatctttagggccgctcgggttaatatatgtcgtcagaggctcctcacgccaatcccggggcggcaggggcggcgcctcgagctctcggcaataaaactttttgatgttcacgttgctaattgccgaggtcctcttccaggattggctacctcctcataaccataagataattaaaacttggcggggggggggggcagggttaaaaaaactttttttatcagtcagaggataatgcaagtgtttaacagatgcttcactattaaaatattttccccccaagtctcaaatattgaagaatctctaaccaggtacagtatcactctgctctcttttctggttgaaaagaaagaaagaaagaaaacgcaggtattgcttttcgaagtgctttgtaggtaatcgaggtaagaaaatatacgcaggcagcctcttac

SEQ ID NO: 33048 - DNA, 2300 bp, Homo sapien
ttgacaccgttttccacaccgaactccttcgggtggaatctgcatatacacatcagcctcccctctcggcttggggccaagcctggggtgatttcagctcctgccatttaccacccgccctcgccgcacgtgagccttctcaagaagctcatgccacacgggcgctgcggcccgggtgccccgcggcccggtgacttacaagtggagatccattttccgttataatgcgttcaagatcaccaaggccagcagtctcaacatccacgagccgtcctcccggcctgcctcttaaactggcgtttaatggttcccctccgataactaaacctgctttccacagatgcccgcttttatgagggaggcaggaatgcagagatatatttatatgtttgttcataaaaactggaaaataagctctgaacacgccgtaaaaaatattcagttacttaccaaacaggctagttaaaccaggggaacaccgataccagccacactacagattcggggaatcgaggtgcccgcacttcaaaatcgcccaaggtcttcgtagggactggtgtccctgaaggatgtggaaataacagcatttacaatcggcttgacatgttcgcccggaggactcagccgtcatctccaaagtttgccgcaataacgtgagccaccccaaacagctctaaccggggtaacttggtgggtaactcaatagccactgagaccggcgtttcgagcctgtaaacgggtcaaagaaacacccttctccagccgctcctcgtccctgctggggcaaagagcgccagctcccagccgcgcctttgtgggggcccccaccgcccgtcacgaggctcccggcgcccctgcataaaattgtaagaggctgcctgcgtatattttcttacctcgattacctacaaagcacttcgaaaagcaatacctgcgttttctttctttctttcttttcaaccagaaaagagagcagagtgatactgtacctggttagagattcttcaatatttgagacttggggggaaaatattttaatagtgaagcatctgttaaacacttgcattatcctctgactgataaaaaaagtttttttaaccctgccccccccccccgccaagttttaattatcttatggttatgaggaggtagccaatcctggaagaggacctcggcaattagcaacgtgaacatcaaaaagttttattgccgagagctcgaggcgccgcccctgccgccccgggattggcgtgaggagcctctgacgacatatattaacccgagcggccctaaagatgtagctgtacatggagatcttgctgggaaaatccgcttgctcccctcacgtcgtccagcccaggagaaccaccgccgtcaccccggagcttcctcggccaccgcgcagagccctccgagagcccgagccgcggtcttcgagctccaaggctcattcagggccccagatccttgccccgaaaggagaggatctgagaaaatggatgcactgagacctctctgaaaaccctccgagagagcgcgagaggagcgaggacacgttactcgcagctaaaatcacatttaaggaccaaaacaacaacaaccaaaaatttcattaaaacaataagcgcccaagaacccagatcgggctggtggggggaggggaagaggcgggaaggggagggtcgcacggaggtagctttgcagtgagcagtcgaccccgccgccccccggcacagctggaccggctcctccagccgcggctcagactcgcccctggattccgggttagcttcggtgccaggaccgcggcccgggcttggattcccgagactccgcgtaccagcctcgcgggagccccggcacctttgtatgagcacgagaggattctgcctccgcgcagcagcccgggaagcaggagccgaagcgcgggccgtggagcaaggcgggaaccggaggcggcggcggcggcggccaggggcgcacggtgccaggaccagctcgccgcgccccatggggagccggcggccgcagcgctgctgaggcgggcccggctggccaggcggggggacggggcccgggctgcagcagccccctctgcggctgccgggcgggcccgggcgcccgggggctggggggtggggggtgggggaggacgccgagcgctgaggcaggggcccgggccgagggcgcggcggggctgcgcgcacgctggggcgcgtggaggggcgcggagggcgaaatgagtctggtaggtggttttccccaccacccggtggtgcaccacgagggctacccgtttg

SEQ ID NO: 33049 - DNA, 2300 bp, Homo sapien
aaatgtgtttttataaacagacttttcaaaaacgtatcaaatgtcagagaattgaactaccagtatttacacattcggggtttgcctccgggtgaaaatgtaaacagaacccccaaccacactacctgcattctttccttgaagaaccaggtctttaaaaggctctccttgtgctaaaaaattgcagacccacgcaagttgggggtttagagcagtaggtcactattttgttccgagctcaactgcaagcccctggcgcttaccaacgagcctagtttcagttaatccctattctaggttcaatgctttaagacgcttgtctggggacgttcaaggatgttaacccctttcctagaaaaagaatgggccctgcaccgactctaatcctgggcttttaagtccctgtctcctaccgcccagccgcggcaaacctgaaatatatatatttctcaatcctgctgcccaagactctagggctagtggagggcagagcccgagcacagagtcaactgcaacaccgaagttgggcgccctccattcgcactgacctcgccttcctgccccaaccactttgtcggcggtgagcaaggaaaggactgtccttgtggagtccttcgggtggggatcgctttgtggcctgcggccggactctgcccgcctccaaagggcgatgctcaaggtggagtctttggtctcccttgggctaacctggcctgaccagcggcgagccccaggccgccctgtcccgcgctggcgccgcaggccctcgcctccctctaatttacagcccgcgggctcctgttgacaccgttttccacaccgaactccttcgggtggaatctgcatatacacatcagcctcccctctcggcttggggccaagcctggggtgatttcagctcctgccatttaccacccgccctcgccgcacgtgagccttctcaagaagctcatgccacacgggcgctgcggcccgggtgccccgcggcccggtgacttacaagtggagatccattttccgttataatgcgttcaagatcaccaaggccagcagtctcaacatccacgagccgtcctcccggcctgcctcttaaactggcgtttaatggttcccctccgataactaaacctgctttccacagatgcccgcttttatgagggaggcaggaatgcagagatatatttatatgtttgttcataaaaactggaaaataagctctgaacacgccgtaaaaaatattcagttacttaccaaacaggctagttaaaccaggggaacaccgataccagccacactacagattcggggaatcgaggtgcccgcacttcaaaatcgcccaaggtcttcgtagggactggtgtccctgaaggatgtggaaataacagcatttacaatcggcttgacatgttcgcccggaggactcagccgtcatctccaaagtttgccgcaataacgtgagccaccccaaacagctctaaccggggtaacttggtgggtaactcaatagccactgagaccggcgtttcgagcctgtaaacgggtcaaagaaacacccttctccagccgctcctcgtccctgctggggcaaagagcgccagctcccagccgcgcctttgtgggggcccccaccgcccgtcacgaggctcccggcgcccctgcataaaattgtaagaggctgcctgcgtatattttcttacctcgattacctacaaagcacttcgaaaagcaatacctgcgttttctttctttctttcttttcaaccagaaaagagagcagagtgatactgtacctggttagagattcttcaatatttgagacttggggggaaaatattttaatagtgaagcatctgttaaacacttgcattatcctctgactgataaaaaaagtttttttaaccctgccccccccccccgccaagttttaattatcttatggttatgaggaggtagccaatcctggaagaggacctcggcaattagcaacgtgaacatcaaaaagttttattgccgagagctcgaggcgccgcccctgccgccccgggattggcgtgaggagcctctgacgacatatattaacccgagcggccctaaagatgtagctgtacatggagatcttgctgggaaaatccgcttgctcccctcacgtcgtccagcccaggagaaccaccgccgtcaccccggagcttcctcggccaccgcgcagagccctccgagagcccgagccgcggtcttcgagctccaaggctcattcagggccccagatccttgccccgaaaggagaggatctgagaaaatgg

SEQ ID NO: 33050 - DNA, 2300 bp, Homo sapien
acatggtgaaacccggtctctactaaaaatacaaaaaattagctgggcatggtggtgcgcccctgtaatctcagctacttgggagtctgaggtgggagacttgcttgaacccaggaggtggaggctgcagtgagctgagaccctgccactgcactccagcctgggccacagaacaataccccgtctcaaaaaaaaaaaaatcacatcttaccaatataagctaacacatcatcattttaaagaatattagaatcataaataagaaagcttgaaaatgttaagaatcaaataagcccattatctagaaataaatagaacttgctgtgtaattcaattaaatttgatagagcaaataattactggcacctgtagtaggcactgtggagtacgccaagctttccatgagacgctccctctaccctctgtacttgttagtgtattgcgaacctatgttctctgtactgaagaaacagagaatggagaatttcccatccttctctctagtctcaatttccaaaggcaaccttcctataatttcactctcttgcataggaaattcatacaaagtccatcagccctgtaattagtctagagcaagcggtgaaaaagtagggatgagaacaggcagatttagcaactcatgttgaagtatccaccttactccagaaactggtagtgactataatggatcttttcctctgctactcttttactttcatgcccagacttaacgttatcagtctagaatttctgatactccagaggaaacccgtatgagatactgcatgtggctctctgacctcattctccctgcccaaacttctgagatcccaccccaaggaaaggctgctgaattgcagcaagattatactcaaaaccatgtcctgtttctttccaggtcttttgtaggatgtattcattctggggaataaatagaaataggaaaatctccactactaccaccttagtccaagccattacaccattacatgtctcacctggttattgcaacacacacacacacacacacacacacacacacacacacacacacatatgtttagagacagagtcttgctgtgttgccaaggctggagtgcagtggtgcaatcacagcttactgtaaccttgaactcccatgctcaaactatccttctgcctcagcctccaagtaggtagaactacaggtgtgcctcaccatgcctggttaatcattttttagctttttagatagaggtggggtcttgctatgttgcccaggctagtcttgaactcctggcctcaaatgatccttccacctcagccctccaaaatgctaggattacagatgtgagcccctgcatcaggaatggctattgcaatattcttctaactggttaacctgtttctgttctagacattccaacacatcaggcatgctgtcacctcaggccatttgtacttgctcttccctctgtctggaccacatttcactctattttgggctctatcctgcagtgtctctgtactgaaatgtcaacatcctcagtgaggatttatctgggctactttatatgaaattgtaactcccaggccttatgtttcctaatcccattccaaattttatttttcactaagttatttattgtcatcgaatgtattgcatatttaaaatttttactctgtctattctctgtctctcactacatgatgtaaggtttgtgaaatatttttgtctgttttctcaccattgtgttcccggtgcctgaatggtactgccacatagtgtcacaaggtatagtttttattgtactttgcttcttctgcttcaataaagtacaaatacagtgcaagaattctgtcttaccattacaagctaatgtatcatcatcatatatttgatgacaaatatatgacaaactatatatatatataaattcatatatttactgcttcaacaaacatacatatacatatatttgtcgaaagaataaataaataaataaatgtataaaagaagggacttactcctaccttatacatattttttagaatactctagttccagtccaaaacttggttagaacaacacttagttttcacttgagcaaagagaaccaattccacatttgcacctggtgttttctttgttacagatcacaacattcagtgtttgaattttgtcttttctagcttaagagaagaatgttgagggcaagtttagtaatttctgacttttctcacatttttgaaagaggcacttgcattagaaagtaaaaaatctttacgctttccagaaataatccctttgaggaaacatc

SEQ ID NO: 33051 - DNA, 2300 bp, Homo sapien
ttaaatcatctcatttatctgcatttctttatttttcaatttgcatttgcaatgctttgggataaacaattttttaaggagtatattaaacaattgaaattttaaataattatttcaataatgtaataaatcacttttccagtaaagtcttgtattgtttctgaattttagtgaactctccctggaactctacgctgtcttgcgaatcacagccaaaattaaatactcatcaagaaatagactgttgtggacaaaggcaagaaatgttttttattttcattatgagagggaccaagttacagtttatcagttatgtacaaagtgttctgcagaaaacctagtttcctggcatcatatttattatttattctagtgatttatgtagctcagtgacctggacagattgcttcatttgcctattttttaatctagctcttcccacaaccctatttggctatgttttaaccatgacatgatgttcgtacatgcccacaaagtgagcctacttcctttgatcaacagaacaacatcaaatgaacctattttggctgacacgcaggaaatatatttttctcagatgaagtatgaattatagtgctatataatatgctattcaaagtaggaattccaatctttattattaaacaagtctttcattattgtttaaaagatatgtaaaacagctcttcattgctgtattcacttcctgttaagtatgaaatacgcatatttttccagaaggagattttaaacattatttttattattcttaattaataaccattgtggacctcaaagtgtgagacgtcttggctgtagcaacccagcaacttttcgcacataagcaacctcatgttctgcacagacaaaactaagagaataatcagcttttgccaaaacacagtgccctgtcacaggaaagaatcatctctgatcactgtctgatcttatttcagagcaccaggcattgcagattaccggagagatagtttattttttcccataagtcccattgctagaattttaaaacccaaattaaattattagaacatcacagcaaaatcctgttgttgtatattttgaaaggaaaaacaacagaaatagaaaaagcaaccaggaagagtgctgttaatttcctgaatatatattaaatattaatttacttagattcccactttgaaaaacaaagtaatgttagcctacagttatagcactaaaattatctgtaaacatttaagaaagtttttacttttgccccttcagctttgagaaaacacattatcagctatctaaatgcagacgatgttgtatcaccaacataaaaagcaacactctgccattggcatttagagttctgacctaggttatgggcttataacaccatctccttccaggaagattggctacatgccaccaagtatttagatacatattacaaaaacaggctatctgtacatctctccctggaactctgctcacttgtgaacaacagccatatctggagatatggcataatgtcaacaaaatatgcaaatacatgaataaatgattccttctttatctggctatttggtgttatttatcacaggccattgtagcatgagaaactccaagaaattctgtttggaatttcaaagttttcctaggttcagctaaggatggtgtgggattcccgctttggttccattttaatgacatttttgtgtctcaaaagtactgaaacaggaaggttttctgggaaggaaagtatttgaccaggagaatttgtcttttgctgtcacaatcttcagctaccattcagctaaatgttgtttggaataatacggccttaatgcccctatctcctgctgaattgctcagacgggtaggagattagagtgaaaagaggtgccggtattatctgtgcgaatgcgccaggggtcacgctacactaacagggccgccccagtcagggtgacagaacccagctgctggctccaggctccatcgtcagaaggttccacttactgcagaactctgtctccagagagcgtggattctaactagtttttttccacctctaaaaaagtggctagctcatcattattgtcctcattttttaggaaggaaccacatgtgaaaccacttacctgtttaaccctatgaacttgaagagaacatgtaatgccacttaaaatacctaagctcgggttctgccttcagcgactcctggtagtagtgcccttatgagccatttatcaagaaggtaaggtatttgattttttaaaaaatgtacacacattctccaccatcagatttga

SEQ ID NO: 33052 - DNA, 2300 bp, Homo sapien
gaattatactttctaaatagttatactgatccaaaataataatggaattaatttcaaatgtacatgtatatatcatgatatatacacaaatcaccatcttcataaatatcactctttaatatgtgaaatttttggtatttttatatatatagaccagttatacagtgacaggaggttgaccataagaaaaaaagactgaaattctttggctggaaagtgccgtaattacctttcccgtttcagagtctgtttcacattgtgtgactgctgtcatgttcaaaaataagtcccttataaagttagacactaggtggcaatagaaacccccctttgctgcctttgtccattaccttgcatttgaaatccactctctcttattgacttttaagtttcacataaaaatcaaaaacaggaaaacagccacatttctatcactcctctctcatcataatattccctttcttatgatgaaagattatgtttcaggtgaaccaaagtatttcatgtgcctatgatgcaggatttggaaaataagttcatcatgtttgttacatttgtcatttgcgtatttagcactgaagatggtacgtttgtttataaatgctaaacaatgtattaacattttattgaaccaaaataagttgtatgctttaatgcaagcatctgtgtatgatacatcaaattcaattcatgaaataccataatattgatgacttaggtacctttttagcactgcatttctaataaggattttctcctaaagtgaataacaagaggcgagcttattgccaataaagattaaagatgtgcttttcccaaaataatgtaaactgggaggaagagaagtattcagagaacgaacagaaatttaatatgatagtattcattagtattatccataaaaccactgtcagaatatgtttaaatttttatataaaatggcattgagggtttcagggggaaagaagggcagagtatttgaatagtgaagtatcagtcaaaatgaacatttattttgtcggctggctctactgtattgccagcacatttaccttgttgtactacacaaagtaggctgaccaccaattcaattcaaactgctgaacttgatgtatggggtttgtatggtttaagcccctggttactttcaagtttgcttctcttgttctttacctggccgaggtttacatgggttgaattgggaaggaattttttttccagtgaaatgattatagattttttttttaagtttggtatctggccaggtttctaagattgtcttcctgattatttgctgacagtattaattgatgatactctagagactgagtaattttgaaaataagcattttcactgtatcaaattaaaaactcattccagattaaaggagtcgaaagagacaaccaaattcactgtgtaattttttattggatcctggatcagaaacaataaagcattgaggaacaactgtctactagataatatgtttcttgggtatgttatattatggttttataggagaatattcttgttcttaaggtgatatatgctaaagtatttggggctaaaatgttatgttgactgcaactaactttcaagtgaataagcacaaaaaatatacatagagatgaagaaagaaaaaagcaaatgaagcaagttgttaaaaaaaggatgaccctaagatatgttggtgttcattatataattcttcacatctttcaaaataaaaaattgggaaaaaaatcaatcaactttatctctggaagtacacaatagaaaatatgtattactattcttttatttcctacttgtccagaatgaatctatcattttctctagatgaactgtactccagatattctaaggttaatatttacttgattttttgtggctgacaaaaattttgtcttaagggtaagataagaatgatatttgtttcttgaacagattgtaaggcatgaagaaggaaaaaaaccacttgtttttataagaaaatctgttccttcttctataatcccaactgtcccaagctgaatcactaggcattggatacacagtgtgctatcggaggctgagtcatccctgctgcaaatcgaaactgtggatctgaaaagaattttctcatctaaaccagagcttcagtctcccaggtgatgtagtttttatggtgttatcagtttaaaaaatttcctcatagaacgtatgcttataataatctaaattccagtaaataatatgacagaaaaagcatttggaaatatggaataggaattttgatgaccacgtcttgctatggaaa

SEQ ID NO: 33053 - DNA, 2300 bp, Homo sapien
ttgctctgcaataggcagtcacttttgcacaccttgccacctagtggataacctgaaacctacaggatttttccccttaatttccatgctctgcggaaaagttccccaactctaccaagggaaggttattttgtttgttttagtcattggtgctccgagaattgtagtaaacagtcaacaaatagttgttacattaataataaacattaagttgaggcatacttcatttaaaaactattgttatggggaatgtaatggaaaagatagacaatatgatgttggcaaaatgtgtttcctaactgaaatgaaagttttgaattatttcaaaagcaaatgctgggggatctatagtttcctgttagagatgtatctacatagcacatcaggaagaggagccgggcgcggtggctcaggcctctaatctctgcattttgggaggccaaggcaggcggatcacttgaagtcaggagttcaagaccagcctggccaaaatggtgaaacccctgtctctactagaaacaccaaaattagctggtgtggtggtgggcacctttaatcccagctactcagaaggctgaggcaggagaatctcttgaatccgtgaagtggaggctgcagtgagccgagatcatgccactgcactccagcccgggcaactccagtctggtcaacagagtgagactctgtctccaaacaaacaaacaaaaaacaaaacaaaagcaaacaacaacaaaaagagatgtcattattgctctgtgtagacaaatcatccagataatttaatttagccattgagagcctacccttctttcttccaagatatcccaaataaaactaactgtaaaagcaaatatccttgctcctttgtctagacaccattgctactttcattcttgctttgggctgtgatgcttgctactccctttttctgctgtcccaaattatgaagcccttttattcatttaaaaagaatacctatgcatatgtataaatatatatatatatttttcctttttctaaataacattttattcattttgaccatgtgactcattcgtatggtcaatgagcccaaggtgttgatgactcttaaacatgtttctcctagcataaatattggtggcaaaaagcagaataatgatcatagttttgaaatagagaataccattaatgtctttgatttttgaaaatgatattttaaaaaacaaacatgactatgtcgtgataccttaaaattcaggctgaaaacaatttattaggtaatccacttcaggtttcttttgcaggaggattattttccattttcttatggattattttccattttcttgctaaaatcagcaaaacatatatacatataacaatataccactagttcattaaaagaacttattctttttgttctcaaatcaagctcattttagattgacaatatcttaatgcattttaggaatatattgtcaagattaaaatcttactttttattagctgaagttgtatatattcattatataaaactgacttatgttgcatagaattaaaaccctccccagagttcatagttttaaacaaatatgcatacatatccaaatacatattaaatccaaagcaaacaataactttatgttgacagtgaaaaatgcaaccttacatacatagtctacaaaacaactgaaaaattttaaatgccagatatgaggaagccaaagaattttaacaatgagaaatatgttatgaattaaaatattcaatcttgaaaacctttaaaagtgaaagttgcactgtaactgctttctaaggtaatttttgccacttttaggaaaaaagatgtttacgtaacatttttaaaagtacaatcatttcttacatagctttatgattgaggataacattagtatgcacatacaacataacacacaaaagcaaagcttagaataacattttaattatgttttagtgtatgtgaaataatttgtttttctcaattatattcctgggtcaaggcctaaaacatttatttgaaccagctatatatcttattttcataagggtctcaggaggcagtagtcatatgttgttacttcagccctccacaaaggcaatacagtacagatctctgtactgtaaacgacaacaaggaccagtcacaatttcagttcttgttacattgataagactccttcaggtaagagattaaaacatgcctttattattataaggttagtgaccattttaatggaataaaaagattattcctgttgcattggagataggaaatttgggatgtgaatgtatgaggt

SEQ ID NO: 33054 - DNA, 2300 bp, Homo sapien
aaaacgaaaaagaaatagtgaacataaatttccagaaatagatgtatttcatttaaattgtttaaaaaattatttaagtaaaataattcaagaaaaagaaacagaaattaaatgcataattcttagactttagtattaatgattttgatgcattatcatgggtcagtcaatggaatagtgccagtttccaaatctgaatcaaaatgaggaaaaaattagttgtacattagcagttggttaaataataaaccataaagttacaaatctgaatgactaatttcaacacactgtgattaaagatttggtaattcaatgtttttatattgtaaaatgaggaagatatcttttaacctagcaacagtaaacacacaaaacattccccattaaagtgaccatatgtaataaattatgatcaatgttttggcttatctagaagttactataatattttgtggatggaagtaattgatccaagggccccaagtaatattagttaatttgctgtaacttattattaaatgaagttacgctgcaccctaattcctgatgtacagaaactgataatatttgttgttttaagctggggtaaatttgggggtaatttgttacccagcaatagacaactaatgaagtacctcatcagacatattgtcaggttaattggctaaagatgaatttctgacccaatatgaaaaaaataataaaacttatgcattctttattctgaaacctactctgtttcacatatcattttcgtgaagggtagagttgagaagtgtgtagagctcctacctcagaaatacattacttcaaacattaaaagaaggaagaggaaagctgaaatagaaaacataaattgtcttcactttaccgtaataaaaatcatgatatattcatttgtggatatacacctaggagccttgaaaatgaatattttacttgtaaaacaagtagaatcaattattttattagtaaattcatacagaacctaaaaataaaactaaaaaaattaaatgactgaggattgggatccatttatgtgattttgccaaataaatattgagaaccttctacgtaagagattagaacccagtcgctgagaaacaaataaaagacaagtttgacaagttttataacccaagtttgactactgtagcagctagcaatccatcgtgatcttaactatacttgtgtttgcattcatattactggaaagtggtaaagaaccaaaaactgtctaggaaccaaaataacactcgacccgaaaaccaacacttggacctgaagaaagtaacccttgtcatttctcaggtttatttcacaatgacgctgggttactacttggagtcctaaaccgaactacaccccaatggcctagaaacagaaggaacacacccagttccgcctcctgacagtgattcctcactttaatgagccaccactactgtcactcaagatgcttcgcactgtcattggtcgcaaactcttgctggtcggccagtttcggccaactggcaagcactggttgtctttattttcgagaaaagtgaaggtgaacagggaaaagagacaagagatctaaaatatctaggttgactcctgtacctgagcgacctgcgatctccaccgccgccgcgacgaattggcctctgggcggggacttttagccaaaaggaaaatggctcagccgggaactggtgcccaggccatggagaagctgattcaaactttacttgtccacaccggtagaggtgaccgcgatgagaataccagaaacagcactacgaccctcagaactcagggtacctccagctgcaggggccagaactgccgactatcccaattttgacgtttcctattgttgccggaagtgacgttaggctccgactcttaacggagacgcatttttatttctgttgtttacgattcgctatagattccttgtttctcacttcgtagcacgagccactctgaccatcaagatcagaaaaacttctcagctgcaagttagaagtggactggccattgaggaggctctcagcggagtcgctcttcacaggagtcttgaacgcggtgtggaatcggcagcgaggaatcctggagcacagagaagctcccagctttgaaggtcttgcggtggtgcgtggcgggcaggaacccacaattccaaatacaaacggtcggcgcgagaagcgcttctgggcgcaggcgcctggctgtagcgactggttgcgggaggctggactctggtgactgtgtatggttgcatatgctccgttttcctctccctgtcgtgctgg

SEQ ID NO: 33055 - DNA, 2300 bp, Homo sapien
tagtaggtctgagcttctttcgggttccagacccatctatcgtaacacaattcttctagggataccttcttcccagtaactttaatgtaaattctatgtctttccagacttcctttagtccttccagatgtatattccattttcccagtgcaagtaattctgttttacgtaacactttatgatatcttctcacctttcctttttctgacattttggaaaacatttcagtgtctcttacatgatttctacctctgataatggaatttctgacaacaaagttatgtctctcttcagtaccagtgaataaatattttgaagagtaatacaagcagagctcgtgaacgaggtaagtgataggagacagaaaaataaagggatttaaaattgggattatcacagaataaaattacagctactgctctacattctcacaaagggctttactaagtctactataaaattcaaaagccttaaaaacaagacattaaaagaagccaatctattacttatgtacattttaacaccttactttcattaatgaaaaatacttttaaaaatttaacattttcaacttatagcactgatcaaaggcaaactaaggaaaaaaggagataccactcagcttgcagcatagattcaataataaagaagctctcaatattcctttctagcttccttccttgtctacaagtcagatctgcgcaattgaacttgtgggagaggttgtgaaaatagtgtactctagcagtttaggattttcaacatcgctcaatctcattgctgttagaggtcattaaaacaatgcctcccaatagaatgtcactggaccagagtgatttttgtttagaatgaagcaactacactgactctaataacagtcaatggctaagagtttgtgacatagcacataatgctcgatattatctaaaaacacgtatcaaaaacaaaaaagtaaagatgagaaaaacagtttatgaaactgcaaaagatattagggaaatacttctctaagagataggagaaaggtctgagaaaggcaaagcatcgagaaagctgggcgggagtggggaggagtaagggacaagtaaagagttcaacgggactgctgtgttcacacataaaattaaaaggtctgcagataattcgggaaaaaaacagtctagcatggccataattccagagtaaaagagaataacaacttcaagattaacttgttacagtgagggaaaaatctgtagccttcaataaaggtggagaaatatttgaaaagctggggaaatgccaacaaggaaaacacgaactgctgtcctgtcttccttatagtcaggagccgtttgtatcctcaccccagaggatccaataggaatcagtaagcctataactttccaaccctaagtcacaacctaattctgataggatgagctaccacgatacttcccacttcgttgtgactaaaagcatatactagttgggtatataagcaaggctcccctcccgccatttgatttaaaagaatgaaaaggcggatctggtcattcgtctccgcccggggtctctgtaaggacggcggagagaggcgacctccgcccaataccaggcgcagccttgccgtctcctcggggctcaccaagcagccaccagcaaagaagccggtttcaaaggcccagcacgacagggagaggaaaacggagcatatgcaaccatacacagtcaccagagtccagcctcccgcaaccagtcgctacagccaggcgcctgcgcccagaagcgcttctcgcgccgaccgtttgtatttggaattgtgggttcctgcccgccacgcaccaccgcaagaccttcaaagctgggagcttctctgtgctccaggattcctcgctgccgattccacaccgcgttcaagactcctgtgaagagcgactccgctgagagcctcctcaatggccagtccacttctaacttgcagctgagaagtttttctgatcttgatggtcagagtggctcgtgctacgaagtgagaaacaaggaatctatagcgaatcgtaaacaacagaaataaaaatgcgtctccgttaagagtcggagcctaacgtcacttccggcaacaataggaaacgtcaaaattgggatagtcggcagttctggcccctgcagctggaggtaccctgagttctgagggtcgtagtgctgtttctggtattctcatcgcggtcacctctaccggtgtggacaagtaaagtttgaatcagcttctccatggcctgggcaccagttcccggctgagccattttccttttggctaa

SEQ ID NO: 33056 - DNA, 2300 bp, Homo sapien
ctccaattcgcattacccagctgtccaggatacaaatcatccctttacacaccgtttctctatctttaaataaggaaaggtaagaaggtcaccgatttacaaaatcctaaatttagtaagcttcctactttaagcccctcgccactcatttccacagccatttccccagggtagagcaactgctccctctttatgaacctacctttctgttcctagtctcctttatcaacatggtaggcaacagcttattgaatatactttatagacttgtgcatgcacattttagtcactatttttcagccaataaattacttcaactaaacatttacatttctagacagagataattttaggtactgtcaaatgggagataactagaaaaagagaaagtcatcctgaaatcacattatacaaaacactggccaagaaggtaaaccctatttaatatcctttagactgactgggggtagatggacacacggaagcctaaaagggatttcccaagataagcctttactttcctgaaaaacatgaagtgaggactactctggctttaaccgcaaaaaatgtattcttggattttgccactggccaatatagtaggtctgagcttctttcgggttccagacccatctatcgtaacacaattcttctagggataccttcttcccagtaactttaatgtaaattctatgtctttccagacttcctttagtccttccagatgtatattccattttcccagtgcaagtaattctgttttacgtaacactttatgatatcttctcacctttcctttttctgacattttggaaaacatttcagtgtctcttacatgatttctacctctgataatggaatttctgacaacaaagttatgtctctcttcagtaccagtgaataaatattttgaagagtaatacaagcagagctcgtgaacgaggtaagtgataggagacagaaaaataaagggatttaaaattgggattatcacagaataaaattacagctactgctctacattctcacaaagggctttactaagtctactataaaattcaaaagccttaaaaacaagacattaaaagaagccaatctattacttatgtacattttaacaccttactttcattaatgaaaaatacttttaaaaatttaacattttcaacttatagcactgatcaaaggcaaactaaggaaaaaaggagataccactcagcttgcagcatagattcaataataaagaagctctcaatattcctttctagcttccttccttgtctacaagtcagatctgcgcaattgaacttgtgggagaggttgtgaaaatagtgtactctagcagtttaggattttcaacatcgctcaatctcattgctgttagaggtcattaaaacaatgcctcccaatagaatgtcactggaccagagtgatttttgtttagaatgaagcaactacactgactctaataacagtcaatggctaagagtttgtgacatagcacataatgctcgatattatctaaaaacacgtatcaaaaacaaaaaagtaaagatgagaaaaacagtttatgaaactgcaaaagatattagggaaatacttctctaagagataggagaaaggtctgagaaaggcaaagcatcgagaaagctgggcgggagtggggaggagtaagggacaagtaaagagttcaacgggactgctgtgttcacacataaaattaaaaggtctgcagataattcgggaaaaaaacagtctagcatggccataattccagagtaaaagagaataacaacttcaagattaacttgttacagtgagggaaaaatctgtagccttcaataaaggtggagaaatatttgaaaagctggggaaatgccaacaaggaaaacacgaactgctgtcctgtcttccttatagtcaggagccgtttgtatcctcaccccagaggatccaataggaatcagtaagcctataactttccaaccctaagtcacaacctaattctgataggatgagctaccacgatacttcccacttcgttgtgactaaaagcatatactagttgggtatataagcaaggctcccctcccgccatttgatttaaaagaatgaaaaggcggatctggtcattcgtctccgcccggggtctctgtaaggacggcggagagaggcgacctccgcccaataccaggcgcagccttgccgtctcctcggggctcaccaagcagccaccagcaaagaagccggtttcaaaggcccagcacgacagggagaggaaaacggagcatatgcaacca

SEQ ID NO: 33057 - DNA, 2300 bp, Homo sapien
gagttgaagcaaattgcccaaggttacacagctggtcagtagcagacacaagatccaaacccggtttgtctgaatccagtgctgacgtccttgtgcctcacctatccgccaccgccaaactgcttcctgttcttccagttgtcactatccttgactcattgcactttgacctcaatcaatcttcttatcttttcttaaaagaaaaacatgtttgctgtctaatcttttcaactattatccagtccatttctctttccatgtaaccttggtcttcagtccatgacaatatctatcttctcacagatcatttcagctgttcagtttttgtgccttctaaatttactcacactaaatattgtcctgaaaaattcaaaatatttctccatcctttattccctggtgctcacctgagtattttgcattattaactacttctttcttcttgaaagtatttctcccacaagagctgcaaacctgtgttctcccagcatgttgccattttaccccagcagttccttttctgtcttttttgccagttccttcatcagaaacttctatgttctgtgcatgccattagaggagctgaagttttgtttggttccttgttttctttttgtcttctactattattccctttcaatatgacccctcaatttactcttcatattacaattttaattatcatcctagagtacaaatatctattttcctgttttaatttctcaagattttgtcaagacctaatttcaaattaatgttaaagacatttgcttagcggcttaccaacaacgcgacaagacacattttacacagtctcctcatacactccttccctgctgagccagccacctttcccagtaaagaaggtaaagaagatataaaaatgattcattctgctgttagtgtcagtcttttgctcaactcccatttcccccaagtatttagattttttttttctttaagaaaataaatgccagctgggcatagtggctcatgcctgtaatcttagcactctttgggagtccaaggtgggagggtcgcttgagccctggagattgaggttgcagcgagctgggattatgccactgcattctagccaaacagacagagcgagatcttgtctcaagattaaaaaaaaaaaaaaaaaaaaaaagccaaccacttacgtttacagaattaaaattgcagcctgccgctgacaacctgagaaaaagagacaaagtcagtggaatagcccttgttatttatgcaagtccgcatacagctagccctggagttcctggagagcaaggaacctctgtcccaaacttgactcagagcttccaaagttggtgtatttcaacaagtaagcattccattgagccaacaatttggtaggctaccagcggctctggagcgcctgttgatgatgacagtttttgtgggggcatctcaatatgacacacaattgacactgaccagaaacacagcgccaaggacactctagtcctagccatgaaatgttatgattccaggttttcaggacagagcagagtccacttctcatctccagtatccgtaaaaatttgtccaaaatgtaactaagaaaacacaatgatattagttacttctgctccccgtcaccctcaaccccactgattacgagatgggaactcacacaaaactttgagacaaaagagcaacaagtttgctttattgtttgcttgttttgttccggagtcggggccgggagggagtgcaggaggagggatccaagcttccaagcctctgctccgctctccttctatccagttggtctttagggcactgaaggaaactcttcttcagaaataaccttttaacttttcttctgtcagctgcctgccaatcacggagccagaggctgaggggaggctttgagccggtctgcgagtccggaaggcaaagatcgcgaagcttggcgctccagaacgctcagggggcaggtgacacagtcgtgggttccccggcgggcgctggcttgacagtttcctccccgcccactggcaggggagcgccccgccgggctgcacgcgcgcgcgcgcaggggggcataaaagccgcggccgcgcggagacgcggagctcgcccaccgcccgccccagcagtggctgcaccatgcacgtgaacggcaaagtggcgctggtgaccggcgcggctcagggcataggcagagcctttgcagaggcgctgctgcttaagggcgccaaggtaagcccggcgcccagccgcggaaatttctctgcccacacactccgagactcgccccgccgcccgaggtg

SEQ ID NO: 33058 - DNA, 2300 bp, Homo sapien
tcaccaacaccaagacaccacactcatttcaaaaatatttgtgagtcctttatctaatcataaatatttctcatatctatctacttccttccatcgtcatttttactacaatgtagtgtatgtttctgctaggcaactacaataacagtggtgagatctcggctcactgcaagctccacctcccgggttcacgccattctcctgcctcagtcttctgagtagctgggactacaggcgcccgccaccacactcgcctaattttttgtatttttagtagagatggggtttcaccgtgttagccaggatggtctcgatctcctgacctcgtgatccgcctgcctcggcctcccaaagtgctaggattacaggcatgagccactgctcccggcctacaataactttttaactggtattcctttgtccactcttgccatttacacccattcttccacagcagccagagtgattatttcaaaatcacactaaggcatatcatgccatttccttgcttagtaacttcccagcataaaatccctatgctagttaactgataacctattttaggaactacgtcttcttatctcctgtaatagtctctttcttttactatcatgggtatgaattttcaaacttaaaaataaacttgattttcaaaagggacaaaattttggtcaatatgtaatttgtactgcaatactctcaagaacatttttttaaaaaatgggaataaagagaatttaagactatgttcacatctaaatgttgtccaaaagcacttattcaacactcctaataaaccagagtacagaggccagttcaggagtcttaattgacaatcagcttatgtaattcttttctctaaaagatttccattttactattgtacttttttatcttttaaggcacaggtaggctagatttctttcaaagtgaaagtcgatttaaacctttaaaagtttgttttagttcttcagatttttttgtttctttaaacaccaccatgtggtcatggctgactaggttaggctgaatgaaaacagtgtggtgaaatatcattaattttgcggtcagaagacaggttcaaacccaaaatacatttattaattttaggaacttgggcaatttaattaagctttgtgagcctcagtttccacattaacatattatatgggcataataataataataataataatgactgcaaacaattgtgaggatttaatatataatacatgtaaatacagaaagccctacaagttaaatgccttcttcttaggtgaatcagaattaaaaacaattactctttaaattaaggaaactgtagaatttaccctctggtttttcagttccttaattatctttccaatttttattgttaaaaacaagcacacaaggtatgtaaagtgggtttattgaaataagctgttctttcatgttcatatctttgacagatctacacacttggagtccttgctaggatatctctatgcctctaatctgggaattgaaaaaataaatcgcaaaaatgtacacatgttatacacgtacttcaggtgacctcaaatgtggcattataaaatttaagaattggaatggctttcagaagcaatctcttttactaataattctgcaagcaactaatattggatgcttaatatgtcagacatcatgctaaacgctttacatgtagttctccatgtattaattactccaatacttttgtatacattattttttatcttccttgtatgcatgagggaactgacactctgaaaggtgaaataacttgcttaaattcactagtaagtagcagtgccagattctgaaaccaagttgattcactagttcaaagcccatagatttacccaccacattcttataactcattaatgaaaacactcattagaaaatgggcaagagatggtcatattcactggacaccgagtctggcttaaggtgatgagtgtgggaaggtatgtggggaggccttcttcctactgcaaagaggcaagtctgagggctggcgccacccagcaatgactctgcttctacttccggaacgccaagggagacaattccggttccgggatcccccttcttggtcacctgcaagtcccagctcgctccacctacagaaagagaagccatctcagtatgatctttatgaacatagccgacctttaatgacttctgagaggaatggagtttccttgatgagcctgagagctgtgccccgtgatgcagagaactttgcctatataacctcgccaggttgttggtgtggagcaaagggaaagcag

SEQ ID NO: 33059 - DNA, 2300 bp, Homo sapien
cacaaaaattactagatcatatcaagatgatttttattgaaaatactttggttaaaaatagttcaacttcttattttgggaaaaaatcaataatttcagaaataataaccatcacagtttctattatatataggcaaatgaaaataatataactttctataaggtagtttgagatacactattggtttttataaggtagcccaaagatgaaaaatcgacatagcaataaagaatatttaaatacttcaagtagaaatcagtatgcatataacttagttactctagttattggacttcaatcctcctttgaaaaccttgcaagccataaaaatggaaatcctatggtaattaattgtaacagtaaaattaaatttatattggtgggtcaaaattctatatgagcagtaccttatttttacacattcattaagaacggggtaaaattatctgatcctttgtctagctctcttatactctttaaattatttttttaagcctaccaaatatgacaggatcatgataagaaaatgacatgtcatagaacaatttcatagtttaatggctttgttataatattactttactcaagaagattattcctgacatagaacatatctaataatctatttatgattttgccttcatgtattacctgagctaggtcattagaaaatagtacttgcaaggcccttattttgattcatttaacttaacctctgaatatagcaacaacatttggagtttctctcatcagtaaatgactatggtctgtatttctgcattaaaaaaagtaatgtctcgtttctaaatactaaatgttttgtaactttcaaaaaaagagtaacacccaaattatataattcacttagaaaacgggaactttaaaagcaatttgagaaggaaaacgtaggcttttaaaataatttttttttctcagctgcaaataacgcaagatgccagttactaaaatgcactaatcaatgaaaaagcaaatgagtaggtctcagtagatagactgctaaataatttagacagaaaacaatacgattaaattgattgtttcaacaagtcaatatagaattgcaaatttcccggtctcatcaataacaagtggttgcaacgtaatgcacaggcttaatgagttctccgactgttaaatccaagcgaactcacctgagtaacagtgctgcttcccagaagtaaaatcccgaaactaatgtccgaaagtgtctcacgtgggccatgatacggagagatattcacgatcctgaaaatagtcttatccaaggcatggggaaccagaaagacagaatgaaaatgtacaatctaaccccgcatggtgttggtgtagactgatgcttgggaagcttcagcaccttagacagctccccgcagtatgcggaccccttctcagcattgagcagaagtggagagtcacagtgttataaatgtgcaggtgatttttacagtgaaattacaaaaatgagtgagatgaaatgtctgaagtgcctaggtgctgggcaacagttctctaaagctccagcagcaaaggaagaatgttcgttcttccctgactgagacccaggattggaggaagaagagcagcaacagccggaaagaggacgcctctccacctgctccaagcgccgcccgccggaatccagctctccaccttgggttaaaacccgagacccggagcgcggcaaagggaagcgggggtggggccggacaacccggtcctgtcgaccaatcacgaccgcacagcgggacggagtgacaggccacttacgacggtaggcggggcttagcgcttcaccctttaacaaaacccaaacaaaccaaacggcgactggagcgaggtgggcggaaaaagccacctgggaaagtcagcggttttgtggattaggtagtgtaaccccgcaggagggaccctttagtattcccttccgggaaaaggcacactttaggtcttctcggatgtgacactgtctgttacactctacaccgaaatacaagagtcagcagtaaacccagaccctggcggagggctggggaagagaagacaatgtggtgcgtgaacgcccgtggaacggaagaaccagctgcttctagaatcctctcaagcctggccagcttctggccaggaagcgttgttgactggatttaagttgggtttccttaagtaatagtaagggttctaaaaagatgaaggtgtgaagtctaaagagatggctgctagagacgcaaggcttcccaccattttttttttttttggtctttcccgttttacatcttcacag

SEQ ID NO: 33060 - DNA, 2300 bp, Homo sapien
aagaaacagagcaccacaatcactcaattttaaatatacctaattagtctagttcccaatgcactgtaacaacttccttcatttactaatagagaaaatacatattgtgtttccaatgtgataattaatgcacccaacgaatactgagtatctattatatgctaagtgttgtgctaaatagtggccattgtcctcactctagtgaaaaagtcaaacaaataaatgaggaggatgataacaaagagtgacaagtaatttgaagacaataattatggtgttatgaaaaatgagtattacgaggattccagccattctttcatatgaactttatatttaaaaaggattagatccatactaatttcatatccgtactaattttataaagtatatttctatgttttatgttaactacaagttgaaatagttaaaattatcctggcttttaagccattgtgtaatttaattttccagattactctaaagagagttttaatattatctattaatttactgacttaaacatacattgtctccatcaagccagagaataaatctgcaagatcatttaatctaattttctcaataaatatactttaaatatatatatatatataaagatattttttaaagaggataccttttctcaaagtacccagtcagtggttaagcagagcaaggaatccacgtattcttgaaataaagttttgaagttttttaatgcgtacgtttttaaacaattattactgctattcaaagaatcgccaactaaaaagcttttgtgcttagtgagatttcaaaagattcatcgtgaataattaagttgataaaaatggtatgaatcttctccaggtacaaatattcctgggcagaatcaatggtgtcccttatgaaacttctggcagtttatgatttaaatcagaaaaccactatgtgaaaagagacaagtataataaaaacatctagaaataaatccaggaaactctttattgtcactgaatgtaaataaaacttttttactaaagtgtagagagagagatttttcatatgagagggttggaaggtggtgacttatgctttccagttaaacagagaatttcaggaataaccaacgtgtcaagatgaggaatcatttttgacatgtcattagactaagttaagagatgaaagtagggatttcagaataaatatctgaggaagttttggggaaaatctaagattcaaggaatgaacatttgatcatggctgatagtaaataagagccactataaagatcaaagaagttttaatttttaaaaaacttctattactttgaaatacataaacaacacaacacacacacacacacacacacacacacacacacacttttcttttccagtcttccatccaaaacccaaagtaaataaatgtgggaggggaggaaaacagggacagagaaggagagggggaaaagaatagagaaagagaaggacagaaagctgacatgacggagaaaagatggaccttatagtaccatgtgatctagctgttcttctcacttaaacttactgtgaagatgtaaaacgggaaagaccaaaaaaaaaaaaaatggtgggaagccttgcgtctctagcagccatctctttagacttcacaccttcatctttttagaacccttactattacttaaggaaacccaacttaaatccagtcaacaacgcttcctggccagaagctggccaggcttgagaggattctagaagcagctggttcttccgttccacgggcgttcacgcaccacattgtcttctcttccccagccctccgccagggtctgggtttactgctgactcttgtatttcggtgtagagtgtaacagacagtgtcacatccgagaagacctaaagtgtgccttttcccggaagggaatactaaagggtccctcctgcggggttacactacctaatccacaaaaccgctgactttcccaggtggctttttccgcccacctcgctccagtcgccgtttggtttgtttgggttttgttaaagggtgaagcgctaagccccgcctaccgtcgtaagtggcctgtcactccgtcccgctgtgcggtcgtgattggtcgacaggaccgggttgtccggccccacccccgcttccctttgccgcgctccgggtctcgggttttaacccaaggtggagagctggattccggcgggcggcgcttggagcaggtggagaggcgtcctctttccggctgttgctgctcttcttcctccaatcctgggtctcagtcagggaagaacgaacattcttccttt

SEQ ID NO: 33061 - DNA, 2300 bp, Homo sapien
agacaatgtggtgcgtgaacgcccgtggaacggaagaaccagctgcttctagaatcctctcaagcctggccagcttctggccaggaagcgttgttgactggatttaagttgggtttccttaagtaatagtaagggttctaaaaagatgaaggtgtgaagtctaaagagatggctgctagagacgcaaggcttcccaccattttttttttttttggtctttcccgttttacatcttcacagtaagtttaagtgagaagaacagctagatcacatggtactataaggtccatcttttctccgtcatgtcagctttctgtccttctctttctctattcttttccccctctccttctctgtccctgttttcctcccctcccacatttatttactttgggttttggatggaagactggaaaagaaaagtgtgtgtgtgtgtgtgtgtgtgtgtgtgtgtgtgttgtgttgtttatgtatttcaaagtaatagaagttttttaaaaattaaaacttctttgatctttatagtggctcttatttactatcagccatgatcaaatgttcattccttgaatcttagattttccccaaaacttcctcagatatttattctgaaatccctactttcatctcttaacttagtctaatgacatgtcaaaaatgattcctcatcttgacacgttggttattcctgaaattctctgtttaactggaaagcataagtcaccaccttccaaccctctcatatgaaaaatctctctctctacactttagtaaaaaagttttatttacattcagtgacaataaagagtttcctggatttatttctagatgtttttattatacttgtctcttttcacatagtggttttctgatttaaatcataaactgccagaagtttcataagggacaccattgattctgcccaggaatatttgtacctggagaagattcataccatttttatcaacttaattattcacgatgaatcttttgaaatctcactaagcacaaaagctttttagttggcgattctttgaatagcagtaataattgtttaaaaacgtacgcattaaaaaacttcaaaactttatttcaagaatacgtggattccttgctctgcttaaccactgactgggtactttgagaaaaggtatcctctttaaaaaatatctttatatatatatatatatttaaagtatatttattgagaaaattagattaaatgatcttgcagatttattctctggcttgatggagacaatgtatgtttaagtcagtaaattaatagataatattaaaactctctttagagtaatctggaaaattaaattacacaatggcttaaaagccaggataattttaactatttcaacttgtagttaacataaaacatagaaatatactttataaaattagtacggatatgaaattagtatggatctaatcctttttaaatataaagttcatatgaaagaatggctggaatcctcgtaatactcatttttcataacaccataattattgtcttcaaattacttgtcactctttgttatcatcctcctcatttatttgtttgactttttcactagagtgaggacaatggccactatttagcacaacacttagcatataatagatactcagtattcgttgggtgcattaattatcacattggaaacacaatatgtattttctctattagtaaatgaaggaagttgttacagtgcattgggaactagactaattaggtatatttaaaattgagtgattgtggtgctctgtttctttcagttaacgtttgatgtttaattttctagtgtatttttgttgagggatatttatattgtttgttttaatttctataaggtcaaacagaatattatgcatctacatatttttggtagctgtcttgtaaatcgtactcttttcagagtaatagtactgattgaatgggtaggcgagtgaatgtgtttttggggtagggggaaccttctgtggctgacgattagatgatcagcccattcatatacaactgtgctggattgtgacatggccacatctcagctttacctttcgtggcctttattattgctttcttgcactaatggattctacttcacattatataggacatgggacttcggagcttaatgggatatcgatcttcatcatgcttaatacttacttttcaagagaaagcaattgtagaccagtgtggttaagtgacggttacaagccctcatatccagtaagcagaaggtatcaaatttcaatctggggcttttggttcattgtctagt

SEQ ID NO: 33062 - DNA, 2300 bp, Homo sapien
gaaacaagaaagagctcacaataacgttgggaacaatgttttgactagaccataaaattaaaggcagaaagaactttacataagcactttattttagctggtaattttgatctcacagggtaaatttagccattctggaactacaactcctaaagttgtacaagtaagtaaacaaaatgtagacagttcactacatggaatggaatgggaaccaaattctttatatcgaaaaaggaaattacaaatgagcaagtgggagaggctagaatgaccactgtggccatgagttacaattggaaataaaagattgagttcttgtttcttttaatatgcataaatataagtaaatacagaaatacatataaacgtgtgcatatgtacatataactttctctctctttccagaaaaagtaaacaagcaatgatagttctatagcaatgagcaccactgttgtttatatcatggattctaaatatgattctgcaatcatatttagagaaatgactgatttctttggtcatatttggagaaaatatggggcttgggcaggaaaaatacaaatgattctggagcatcctctggtgctagaaagcaagcaagggctgataaatacataaacatacagataaatacatagggcatgtcaaagtgatccaagagttatcctgaaacctcaaaaaatctcccaagacaaccctagaacaacttgagtaacaaaataaacaatgtcattattgaattacatccattagatcaaataaacacgtgcccatactgttataaataatcaaataaattaattgatgaagaaagggaaaagcttctttacaaatggtgaatgtagaagaatggcagaaataacaagtcaacaggtctgaaaatatctccccaaaatatttattaagtactatggtagttgaaacatatgcctgtaaattctctgatactcctctctccatggtggagcttgagggtgggttagatttgttaagaagcttctaatgaatagagcaggaaaagagacaaaaggcagctttccagtggagaaatctatcagtcgctaacttagccatggtgtcaaagtaagccatctccaataacaaatcatgttgatatcaagtttccctgacatattagaaaaaggctttaaatgatattcttcacaaaatccatacctcagttgcactgtgagaaccacagaaacccatatcaagggccattctacaaaataccttccaaagtatattggtaatgaacaacaaggaaaaactgacaaactgtcacaaactggaggaaactaaggggatacgatgacttagtaatgtggtaacctggactggatcctggaaatgaaaaaaaaattaggggaaaatacaggcaaatcctaatgaagtctgtaacttagttaatagtattataccaatggtaattttttacttttaataaatgtatcatggttattcaagatgttaacattaggggaagctagatgaagcatatatgaaaactctacaagctttgcaactcttctttaaggatttaatcattaaaaaattaaaaataaatgaaaaaaacagctgcaacaatggtctatacgttgagaatttcaaaaagatgctgtttactttgggattcaagtaaaaacactatagttgttaaaccctagagtactcttgaaaaagacggttttgtacactttaaactgaaagagtataggaaaaataatttcactcttacagctaggaaacaaaagggaacaaatacaaatgggataattattgaagtttctgcaagggggaataaatcgctcaatgtcccttcattgcataaaggcaaagttctctaattattaaagaaaaaaacctcaacattttgattgataggccctgtgacatctgtcatacatcttgacattgttacctaacttctccctgggactgaataactatcaggtgccgggtaccgctaataaacctcaaacactttgcatgccccagtgcataactgtcgccctcagactcttaattgagaaacattctttcctcctttgtgacatcacatccactaaccaaatggggtggtgtgagtatctcctataaaataaaagctctcctgatggcctgttcctgcacatttcctgaggacgccctcgatcacaagcaggttatagctatttaaaccttgccttacctgtactctttacacaaattgaaggtcaaagaagtagtcatacttctgggcatagattaaactgattttgtaatactgtttaggctgaacctatcagtttcagactaaa

SEQ ID NO: 33063 - DNA, 2300 bp, Homo sapien
tctgtaaaacttgcaagagaagatttacatctctaagctgcagcgaaagaatttacaattttaacttttctaaagtaactgctctaagaaaagagagatcaagggcctagagtcaggaagaaacttgtctgaagttgagtcaggttcaggggaacttctaaggctgccttggtcagtgccagatgacttaaaatttccggaatgccatctgctaatttgcactttcttgtttttgcacatgttggtttctctgtaaaatatcctctcctctttgttttcctgacagtttccttattttgtttcaataatctgttcaatctttacctcttctgtgaggtacactcctggttactccatatcagttgataaggcacattttgtaccacctttttgaagcataatgttgactttctttagaaagcatattctgatgctttcaaaaagacccagccacctctttttgatcactttgtaaaacataaaatgtctttttgttacaggacttttcattagttcagctcaagatgaggtccttatcacacagctacgaaaatttaggctagcggacgatttgaggagtgaaaaaaatggaaaaggggggaaacacagactctccacaaaggcagagtccctgctggtgcgcttcccgcctcgcagtttgaatcccaggttccacacaggaagaggaggggctaagctcctccctgctgcaaaacccacaggaacttcctgagtttccaccccagtgcccaaggccagctggagtttttatggggagtccttcccacttgtctgcctcatttttgtataggatttacataatttcattgtttatacatctctccttcactctatctctcacatctctctctcttttttttttttttcagttgagacagactctcactctgttgcccaggctggagtgcagtggcgcgatctcagctcactgcaatctctgtctcctgggttcaagcgattcttctgtctcaccctcccaaggaactgcaattacaggcgcatgctacgacacctggctaatttttgtttgttagtttgtttttgggacagagcctcagtctgtcgcccaggctggagtgcagtggcctgatctctgctcactgcaacctctgcctcccgggttcactccattctcctgcctcagcctcccgagtagctgggactacaggcgcctgccaccatgcccggctcattttttgtatttttagtagagacggggtttcaccatgttagccaggatggtctcgatctcctgacctcaagtaatctgcccacttcggcctcccaaagtgctgggattataggcgtgagccaccgctcccagcctctctcatatatatctatatatgaaactctatccccactcatgatgtaaagcttgaagctaagtaagcactcaaaaatactttaaattgaataattaaagcaattttcacattgtgttaaaattttaataatatgtctcttcattcttgtctctgagtaacttgagttcattcatcttgtgaaaaaggccctagcaccttgtctggcagctgcttactgattatttaatgaacaaatggatgagtaataataatttataaagcaaaattatttttccagaaaagtaacaattttgtatcaaaacttggaatgtcatattaaagtccttaaaaattaaatttacttaagaattaaaagcctcagattttatgtttaaaaggtaactatgtcttttttccttcaactattaattttgtttttcacaaatggccaactcttttttttaaatgactccttttctcctagaatcagaaattgtactttgaaaatatactctagatttaacaattcaaatagcccactaacactgacaattttgatgtaaaagaatgattttcttctgggaaattttatatttatgcatttaaatttctcttgattgtttttccatgtacttcagaaagctgtgaatttttttttcagccttccacttttgtgtgtagttatcaagttttagctcatcaaactgctgaatttaagctttatctgtctaattaatattcttcagcagttcacagtcttcatttctcatttcaggttagagtacaaaacattctccctgcagtctcacgaactgtgaacaaaaactgaagtgaaaactcatagtgcataactcgtcaatactcctgtgatcgtataaccatcagcaagaaaacaaatttgattgagcccccatccagtcctctttgcgtggaatcagacctcttttgcagtggaaaggagcaggtaaaaca

SEQ ID NO: 33064 - DNA, 2300 bp, Homo sapien
tatatcagttacactctgccattttgcctcttagtgtgcaggcttgagcccgcttctgcaactcctgagttcagatcaagaagctgccgatcaccagctacaggtgtttctttattaggagccagctgtgactaattattattttagaaagacagttaacaactacctgactgtcacctgatggtggcctgacatccttggtgggcggtgagttggggtctctcttgctctgctcatgtctgactacctactgtaacgatagtatttttttttaatgatgtagaaaaattgcactgagcagttgtcatttgaaggacaggagtagctcagctctgggaatattcttgtcagagagaagagccggtgctaagttaccaagccaatgtgatacctggtttctcaggaaacaacagggaagtcaatgtgtctgaagtagaacaagacagtaggacaaaagactgagatgaagtctatgagttcccacgatgtaccatcttgatgaatgcattacagaacattataggtgtggggttttattctgaggggagtagagagtcattacagattttggcagaggcaggagatggtctgactaataatagaaggattactctagctgctacttgaagaatggtttgtaggaagggtagaagcaaggaagccagttagcaaatgattgtattaatccaagtgggagattttggtggcttggatgaggagatggcaagggaggtgggaagaatcggtctgattatggatgtattttgaacatagaggcagcagaatttcctgatagattgcatgtagggtttgcgggggaaaaaagagaattcaaggaggaatttcttttgactgagcaaatggtaagatttgctatcaagaaagataggaaaggctatgagaagtgtttgcttgggagtggagccagcaaaggagaagagcagaagtttttttaaaatgcttattagaaatccaaatagaatggtcagatgagaaattggatatatgaatcctgatttcagaagagagatatgggatggccacatagatttaggagttgttgacagtatttaaatatctgggactggatgagatatgcatgggagaaaaaaggctgaggagtgaagggtgggaagctgcaacttaagaggtcagagagaagaggaggcaacagacaaaaatatgagaagaaggagccaatgagatcagaaaggcaaaaactgaaaactgtagattttagaagacaaatgaagagagcatgaaggaaaaggtgggcatcaactgtgtttaatactgtcaacttgcaagaagatgaaaactgagaattaatccttggaggtcattattatctttataagaaaatttccatggaggggggttagggcaaaatctgacttgagaggatttaagtagaaatgaaaggaaaggaattacagtgaggttaggcaacactttctaggtgttttgctgaaaacatgaattgagaaatgaataaggaaatgtaagcacaacataaatattccacaaaataaagtctgtaatggattactatgaagagagagagccttgaccagaagctttttcaacaatggtgattttttagggaggaaatctcatgagagaacccttttaaatttttacccactcttagaaccatcttggcagaaaggaaaggctgtagagagggatctctgtgtttgtttactgcaaatagatttttcacactgaaatagattccacaaactattggcaaaggacaaactaatagcagcagctctgtaagagagggagagttgatgacaccccataaagctaagaatatgtaaatacatatacatattaaaactaaataaagaaggcctggtaccgtggctcctacctgtaattctggcactttgggaggctgaggcgggcagatgacttggggtcagaagtctgataccagtttggtgaacatggtgaaactcgtctctactaaaaacagaaaaattagctgggtgtggtggcgggcacctgtaatcccagctactctggaggttgaggcatgagaattacttgaacccgggaggcgtaggttgcaattagctgagattgcaccactatactccagcctgggtgacagagtgagactccgtctcaaacaaaacaaaacaaaccatgaaaataaaacaacaataacaaaaacaactaaagagcagaaaatgctaaaatcttaggtattagaatgtcctgaaaatgttttatcatgcctgtatgtgtttagcacttcaagagttcagaaaataaaattaaagagccat

SEQ ID NO: 33065 - DNA, 2300 bp, Homo sapien
gaagagaccaaacaacagaaaggaaaaggagaaacgtctgaaaatagatttaaagaataaacaaaggaggatgaaagcaaagatttttaactgatatgtcaagaaaaacaaaaggaacagtaagagatacatgtattttcaatcctgaaatcaaggaaaacagtcagttgtttctcaaagaaatttctttaaattggcaaggtatattcagtctgttttattaatagaaataaaagtagaaatatacagactactgattttttttaaataacagttttgaatcccaatacttgaaaagctttaatcaaagcaatcaaagcatcatacagatgcaaatacaacacagacaaaacccttatccccaaacctagaaaatttaatgtaagagacagttataaactaaactgaaactagattttattactgttaattatttgcatagcagaaaatgaaaattttacagaatcatgcatctatagtgttacaggggaatttcagaagtggattttgtttcggaagtaaattttaaaataccagccaatgatgggcaaatacttaaacctatccaccctttaatagttcttaatgaacaaatcagacatataaatagaatgaagacattaataaggctatctaaaaatttaagcaaacaaaaactggttcataatgtaataaattagagccatagctccatacaaggaattatgataaagaaagaaaatgaggaatatgaaaatgaaacactgctggtttcatttacactaaatgaacatctcctggaagtaggaagttaacgtgttttgaccacagtgtacttggtagtgggattagaagacaccatggtgctgtaaaaagagtctgcatttgaatgaggccagcagggttttaggcccagttctatcactaattagttcctaatcttacaaagttaatttacttttgcagaacaaagatgatatttaatacgtcttctttttaaaagtgctataatgaataatgatttttaaaatttatttcaacaatagacttttggaataaatgtgttctatttaaaatatttatttttatagttgatatccatattcagcttcttgattaatcaaaacatccatgtttgaattttaatatcagcacactaataagaaataataaaattaaaacatgtccccttcattgatctcacatgttgattgtcttggcaactaaactcattgcagaagctgtaaatccattatgttcaatttatcttgtttttattattttattatcctgataaaagcaggctgactttaaaaaataatacttcctagaaagtcaattccttctcctaggctaaatgtcttctgaggtatgagaaatcagggaacatgaataacaaaaaaaacatgaattgtgtcctaggacatgataacttgctttaattttctatctccaaattttgtctttatgttaacagttatctaccggccaaaggaagggagttaaaatatagaagaaaaaagatattagtgagtgataccatcaaaccaactctctatttctctccttaatgatttgtcgttttaccatcttcctgctccctaaatttggctatggcagaactggccagcaaaggctgttcctgtgtgccaatgtgcctttgtatgccatctgcggatatcatctgccaggcacctcacaaaatcatttacaaggagaaagagctaaatagaaattgccattgatagcaaatatatttgttctgagtaatatcagaattatctctaataacatccttaatactgtaaggctgtttcaaccttttcttattgaaatacacatcaaatcaaaaccgtatttcgtaatcatctaagtgaatttttaaatatctagctttttacacatacatttatcttgttagcactacataaataaatgtgtaatagcacattcaaggcaattcttagaaatttctgcccaatttgccattatctacacagttttttattccccatctagttaacagcttctgagaagcccaggttcccaatttctgagcatgtttaatcgaccactatggttgtcatgccaaccaacacagagaattctgagcttacatggggcatttcaatacagtgacccaattactttctgtcaacaaattcaccagcaaaataaaggggctaacacattaatgagatttcctgagactgccctgtagagatgcttgcagtaagatcaccatcagtttttaaaatactaaaatgctattaagtatcacaagtatgattctttttatcctctgccttagttactgttat

SEQ ID NO: 33066 - DNA, 2300 bp, Homo sapien
tctaagacttacttggtgatttattagcccagtctctaggtgtccctgagcatccgtgttttttgttttttgttttcatcataaagtggggaaaattatgcttttcccatttgacttacaacgggttaatgtatgtaatcatgttttatagattgtaaagtgttctaaaaatttaaggtgacattattgtatctactggcactacaataaacaattgctttcactaatgatttccatggtataaaacgaatgaaggatctaaatgaggagcgttgctccgttctgtgttgattatatgccaggttatgtcagcctagggatgagttgaagcagagaggctgctacaatttggctttttgatttcccttatggtttctctctctcaatctgtgcactgagcaagcagctctctcaaaaacccttgaatacacattgatatatattccaaagagataggttttgagttatttgaactccagttatttttggacaaaattcatttgaaaagagaaaataataacaaatgattatacaagtaagaggactaaacattcatttatgagaaataaagtggaatgcagtaattgtgtttcctctaaatagctgcttttgtaatatttagagggtgatgtgcagcatgctactggcctgctttaaagaatgcatgtgaaatacaagctataatgcaagaaacgtatgctatggataatgaggatgtgagctatttttcattaaaggcagagagttacagttatgtctgtgtgtgtgtccttgtgtgtgtgtgtgcctctccgtgtgtgtgcttgtgtgtgtctttctgtccctctgtgtgtgtttctgtccctgtgtgtgtgtgtgctggctgatttggagatgaagacagaggcaaggatcctttctttctactctaggaaaggtttatgctccttgaaagagatactgtttattttcttgctataccttttgtgaagtattgagactcttggactgtgccctgtcactcagtaggctgaagtacaaatgctaattatcgccagactgcagcattgtgatttgcattccaaatcagcttgcagattcccattataaattgctatcctcttgtttcttatctaaaatttgttcctcccttacatcactcttctcattccctaacactgacctttaaagaaattccctttcaagagattctcattggaaaccagcagctttcgtgggctataatcataacaataaataacaaagacatcaatagggtttttccttccagtggttttctcccttttacttaagagtcatatggcactaagtaaaataattacttaaaacatgtatctctcaggcttagagctttatactcactcctttgacagccacgcttctatttctttttaaatctcaaaggtgtgggattacaagtcctgtcttagtaataaacttttgcagataaaccctgagatggtataactgcatcctttcttggcaccttaaatcaaattaactaaatacttagtgaggagagaaaaggaaaacacagtttttttgcaacgtatctgactgggtgagaagccactgctgcagcataaagaaccgacgggaatctgggctttcccactctggaatgaaggggggaattacgggttggtggtcggcttcatgttaggaggacacccctccatctgttcacagctcagcctgtttccaatttaaagcccagatttcaatacaaacctcaatttcttttccccattttaaatgcaaagcaagacttgtgaatcatagtgtctctgctcctgggattcagaccaaatttccccccaaaattctcaggctatttgtttgaatacctgcttacagtggtacacaatgggcagctttgagaagaaaaattgataatcttcacggaagagtaatttgaatgaaattacacttgacagcctgtctccaagcaaacaagaggaacgagggagcctgagctaagctctgaggacttgcccaagccactgctgttggagcttcccaggaaaaaaaaaaaaaaaaaaaaaaaaaaaaaaaaaaaaaaacccccagtttttccaacatctaattgagcttttgattaattccgtgtaccagattctactgaagaaaggtagccatggaagagaatatggaagagggacagacacaaaaaggtactgtgctaaaagcgtttatttgtaactaagtaattattttgcagtttccttgtttgctttagacacttgccagtaaggctaatgaatgtttctctcttggaaggcattttgttccttcctctc

SEQ ID NO: 33067 - DNA, 2300 bp, Homo sapien
ggctgaggcaggagaattgctcaaaccctggaggcagaagttgcagtgagctgagatcatgccactgcactctggcctgggcaaaagaacgagactccatctcaaaaaaaaaagagaaaatcatcaacaactcaactgccatcaaacaggaggaaggggaaaggaggagtgcgtttttaatgggcacagagtttcagtttgtggagatgaaaaagtcctggagatagctggtggccatggttacagaatgatgtgaatgtacctaatgccactgaactacagatttaaaaatgatcaaaatggcaaatttttcttttatattttaccccaataaatactgaaagcctactgacaggtgattgctgtgaggaggctatgtatgtgtatgcatctctcttaattcatttgacgagtccatttggactggctctgaggacttttttgtatattttaaaaattggtacaagttgatgttgacttatgttggtaacaattgtcacatgaaaaagcctgttttagacaaaaagtgaatggttatatgagtgtattctgctgcaaaatttccagaagaaaaagaaatcatgaatatttttaaaatttcctttccctctcatttccctcttttgctttatatgtgtggtgaaaaagaaagctatgaactgaggctgatttctgaagatgctgaagatactcataaaggaacagagtaggaaggaaaattagcttctaagatcagaacattaggcaagaaatcaacagacatgggttctaagacttacttggtgatttattagcccagtctctaggtgtccctgagcatccgtgttttttgttttttgttttcatcataaagtggggaaaattatgcttttcccatttgacttacaacgggttaatgtatgtaatcatgttttatagattgtaaagtgttctaaaaatttaaggtgacattattgtatctactggcactacaataaacaattgctttcactaatgatttccatggtataaaacgaatgaaggatctaaatgaggagcgttgctccgttctgtgttgattatatgccaggttatgtcagcctagggatgagttgaagcagagaggctgctacaatttggctttttgatttcccttatggtttctctctctcaatctgtgcactgagcaagcagctctctcaaaaacccttgaatacacattgatatatattccaaagagataggttttgagttatttgaactccagttatttttggacaaaattcatttgaaaagagaaaataataacaaatgattatacaagtaagaggactaaacattcatttatgagaaataaagtggaatgcagtaattgtgtttcctctaaatagctgcttttgtaatatttagagggtgatgtgcagcatgctactggcctgctttaaagaatgcatgtgaaatacaagctataatgcaagaaacgtatgctatggataatgaggatgtgagctatttttcattaaaggcagagagttacagttatgtctgtgtgtgtgtccttgtgtgtgtgtgtgcctctccgtgtgtgtgcttgtgtgtgtctttctgtccctctgtgtgtgtttctgtccctgtgtgtgtgtgtgctggctgatttggagatgaagacagaggcaaggatcctttctttctactctaggaaaggtttatgctccttgaaagagatactgtttattttcttgctataccttttgtgaagtattgagactcttggactgtgccctgtcactcagtaggctgaagtacaaatgctaattatcgccagactgcagcattgtgatttgcattccaaatcagcttgcagattcccattataaattgctatcctcttgtttcttatctaaaatttgttcctcccttacatcactcttctcattccctaacactgacctttaaagaaattccctttcaagagattctcattggaaaccagcagctttcgtgggctataatcataacaataaataacaaagacatcaatagggtttttccttccagtggttttctcccttttacttaagagtcatatggcactaagtaaaataattacttaaaacatgtatctctcaggcttagagctttatactcactcctttgacagccacgcttctatttctttttaaatctcaaaggtgtgggattacaagtcctgtcttagtaataaacttttgcagataaaccctgagatggtataactgcatcctttcttggcaccttaaatcaaattaactaaatacttagtgaggagagaaaaggaaaac

SEQ ID NO: 33068 - DNA, 2300 bp, Homo sapien
actcgggaggctgaggcaggagaatggcatgaacccgggaggtggagcttgcagtgagccgagatggcgccattgcactctagcctgggtgactgagccagactctgtctcaaaaaaaaaaaaaaaaaattatgaattatatttattgttggaagatatcaccatctttctcaagcatgtggcaaaccagttggatactgagaaacaatgtggttaactgactaagatcatgaactctggagtattttgtcctgggtatgaattttgcattcccatttattatgagaatttgggcaagtgtttaatctctttgtggattaattccctcatctgtaaagtggggataacagtattttccttttttagtgagaattatattagctaatatgaagcccttagtacaatgcctgacacttagcacactgtactcagtttatgttataattattattttgtatttcaggattatcatagaatccgatgggaaaaaaacaaaaaacagttctaatttttagaattcaaatattattttgaataagtcttcaggagatagattgtaagttgcttgtggtgatcctaaaactgagcttatgaatcaatctccaaaatctatcacttatctttttttttttttttgagacacggtctcactctgttgtccaggctgaagtgcagtggtgcagtcttggctcactgcagccttaacctcccaggataaagtgatccttccacctcagcctcccaagtagctgggactacaggcgtgcaccaccacaccaagctaattttttgtttatttttttggagagacgaggtctcactatgttgcccaggctgatctcaaactcctgagcttcagggatatacctgcctcaggctctgtaagtgccagaagtacaagtgtgagccagcaacttatatttattgaacaaatgtattagtgttatgctttgctacagtcacagttcatgttagtcaatttctagaagggtgatgcatttctgaatgatatgttgaacacttttaatttttgttgactacttcctttcccctcccataagaataactgtattcccatgtaactgaagtgcatttacacacccctgccaggagtatacctcttccattacgtgagaaagagctgtgcagatgtttatgtggcatttgaatgatatgctctgcatttatccatgcattctgctaaaaatattgttatttatttttcatatcaccttttccccattagatagcaatgttcctcaaggtaagtaatcatatccattttattttattcttccacttgctcacagcatagatatgtatacttttgggtgtgctttgcatgaaaaagctgtgtacaccttggggactgacttactgaaataacttctccagtatgactcttgaaagaactaggtcaataacccatagagttatataattttttttttttttttagcttgaggagaccttagagatcactttttccagatccttcattttacaaattaggaaatgagccaggattacaactcatcctctcaactgtcaagccctgtgctctttcagcctcatcaactgcctcttggattgaattgtttattttccaggtgatttctgcatattatgatgtgtgtgtgtgtgtatgtcagggtgtgtgcatgtgtgtttgagtgtatggtttttagaactttataaccttgtccaattacagaaacatattttatgtagaagaaagaggagatgacaaaggataaattaaagggagaattttctcttcctcttgtctttattaatgttattatcattaagaaacaaaatggtacacagaagacaagggaacataaaattatcatatgaaacctgtcttttggaataatctatttccagactccacttagagatcattatcttggctaccgagtcggttgtggggtgctgagacaacgtgtgtgtctgtaatgtgcattcaatgtatttaggagagagactttgcacgtgtctctaatgaaagtgaaagggggcagggtgggggcctctggggaggagacccacagtgaaggggaggaaaacgggcttctcgcagaggaggcaggtggaaagagggaggggtctgtgcgcccgcagagtcgccaggcgccctgcgagttgtctccgctgggaggggcgaggctgtcacttgccagggcgcgaggagcctcagcgcggcttggagaacttggccccgcgcagcgtctggtcactcgctctcctctggggactgcagagaagcaggacctcgggccatgggtgagtgcgcg

SEQ ID NO: 33069 - DNA, 2300 bp, Homo sapien
cgggatgaatgggaagaatattttggaaacagaaccttaggacttgatggacaattaggtgacaggaatgagaaagcagaaataccggataattagagtaaaaaaataatgtactaagtaagataatgaattaatttatatgtttattgaatcccatataaaattatgtaacttgttagatttcaggggagataatggcctctctatacctgagatctaggatactgacaccatttacatcatcactgtaagataaatgaattcaacatcaacattttgatctattcacttataataaggcaaaggaaagaaaacatcatgattttgattattaaaagccagtatatgatgatttgtatctttagtgtattctaaatttcatatattttactgggaatgttaaaaatatttatgaattaggccaggcatggtggctcacgcctgtaatcccagcactttgggaggccgaggtgggtgggtcatgaggtcaggagatcgagaccatcctggctaacacagtgaaaccccatctctactaaaaatacaaaaaaaaaaaaaattagccgggcgtggtggtgggcacctgtagtcccagctactcgggaggctgaggcaggagaatggcatgaacccgggaggtggagcttgcagtgagccgagatggcgccattgcactctagcctgggtgactgagccagactctgtctcaaaaaaaaaaaaaaaaaattatgaattatatttattgttggaagatatcaccatctttctcaagcatgtggcaaaccagttggatactgagaaacaatgtggttaactgactaagatcatgaactctggagtattttgtcctgggtatgaattttgcattcccatttattatgagaatttgggcaagtgtttaatctctttgtggattaattccctcatctgtaaagtggggataacagtattttccttttttagtgagaattatattagctaatatgaagcccttagtacaatgcctgacacttagcacactgtactcagtttatgttataattattattttgtatttcaggattatcatagaatccgatgggaaaaaaacaaaaaacagttctaatttttagaattcaaatattattttgaataagtcttcaggagatagattgtaagttgcttgtggtgatcctaaaactgagcttatgaatcaatctccaaaatctatcacttatctttttttttttttttgagacacggtctcactctgttgtccaggctgaagtgcagtggtgcagtcttggctcactgcagccttaacctcccaggataaagtgatccttccacctcagcctcccaagtagctgggactacaggcgtgcaccaccacaccaagctaattttttgtttatttttttggagagacgaggtctcactatgttgcccaggctgatctcaaactcctgagcttcagggatatacctgcctcaggctctgtaagtgccagaagtacaagtgtgagccagcaacttatatttattgaacaaatgtattagtgttatgctttgctacagtcacagttcatgttagtcaatttctagaagggtgatgcatttctgaatgatatgttgaacacttttaatttttgttgactacttcctttcccctcccataagaataactgtattcccatgtaactgaagtgcatttacacacccctgccaggagtatacctcttccattacgtgagaaagagctgtgcagatgtttatgtggcatttgaatgatatgctctgcatttatccatgcattctgctaaaaatattgttatttatttttcatatcaccttttccccattagatagcaatgttcctcaaggtaagtaatcatatccattttattttattcttccacttgctcacagcatagatatgtatacttttgggtgtgctttgcatgaaaaagctgtgtacaccttggggactgacttactgaaataacttctccagtatgactcttgaaagaactaggtcaataacccatagagttatataattttttttttttttttagcttgaggagaccttagagatcactttttccagatccttcattttacaaattaggaaatgagccaggattacaactcatcctctcaactgtcaagccctgtgctctttcagcctcatcaactgcctcttggattgaattgtttattttccaggtgatttctgcatattatgatgtgtgtgtgtgtgtatgtcagggtgtgtgcatgtgtgtttgagtgtatggtttttagaactttataaccttg

SEQ ID NO: 33070 - DNA, 2300 bp, Homo sapien
tattttagtaggaacggggtttcaccaccacgctgccgtcaaactcctgacttcaggtgatccgcccacctcggccttccaaagtgctgggattacgggagtgaaacaccgcgcccggccggttttttgtttcttaactggagagctggagccattatgagcaaaataaacataaaagattttttccgtccaaccgatggactaagctagacgttgtatcttcagcattttctcttcatgtacaccattgactattcagcactatacctagcaaatatcagtcataaatgaaaactatagtctgttttcacagaaatgtttcttgtgattttccctcttcgctattcttattttcattgtcttaactcaggtcatcagcatcttttcccatgaactactgaatttttctcctaacagaccatgttcttcatcttcctgcatcccatgtatctccaatgtttccaaggtgtctttcttgatgaaaaagcactgattttataaacttcaatctcttcctttggtttagaggttaaagcctaacccatatatagaattctgcatctttcccaatcaagttttcttatttttctagtacagtcttttgccaatttccatcttccttcttatctttggattcacatccccaactccggagaaggcaaaaacatcaaatttatttacatcaatcgtttattttttcccactttatgcttttggcaatgctgctcctgctgcatagtatacactttcccctttttatcaggtgaaattctacctatttataagtccctgctcaaatactaatcatattgaaagcttctctgaataccttggaagaaaaagttctgcctccctcatctgaaatcatctcatagcacttttatgtaaccctattttagtacttaacacattgagttatatttagttattgcccttatactttctctggtagattatgtgctaatttctttctttctttatccatctatccatcaagaattaattgaagacctgctattcatcagatactttgttagaatataggggacggagttgtaagaactgattttagctttaacaagtttattctttatatggaaatccaacatttaagttaattttaatttacaatatagaatattgagtgctgtggtaggtactcgtctctgcagagaatattttggaaaaaaggagcattaaaatctactgcataggaaggtaagaattaggcccagggactttctctggttgaggtcgaccattcatttattaactatttagagtggagtataattaattctcgatagatgtcattaaatacactttgtttcgagtacgtcgaggcttattctctctagtgtgttggataaaggccacaggtagtgaagatatttcagagatgtgaagaatccagtaggaatgacaacatccagcacttccattcaaccagatcccacagggaaaatgtcagttttgtgaaggcagatacattaaccacatacaactcgattaatataaacaaataatcttatccattgagctctcccacagaccttcttgggcccaatcagacaataatgaagtgcaggcgagacagcattctgcactcacattccaggcactggttcaagtccctcctccaggtccctcaagaaagagacaggatgactgacttactgtatatttgactcattttcctagaaagtgcagactcgctataaaatgtgttaggtggtgagaacgctgatggttcaccgttttcctccactttcagcctcagtgcaaaccctctgcccaaagcctcgctccagtacggaggagctgcgccttcaacacactttctctgttgccaggtaaccacttctccctcagcctagtctccaagggtcacgagccacttccgcctccccctctcgggcgctccaatcagcgacctgtgtagctgtcacgtgggcctctggggcagaccctggagatcgggctcgcggcgccttccatcgtggctccgcgctggggcttgcggagcacgcttcccgcccctcggagcccgcgggcccggccgccccgcccccgggcgccctgagcgagcaggcggggagggcggggagggtccgcgcgttggtggtgctcgcctcgcagctgcgcccgccggcttcagcaccttccgctgtccgccgctgcagccgcctcctcctccaggtaagaagccggtggggccgcagagataccaaggcaagctcaggattgatgtgggtgatgctggaactgtcgcggcgtcatgcgagaggggctctgacctc

SEQ ID NO: 33071 - DNA, 2300 bp, Homo sapien
agacataaaatgcttctagataagctaacaaataattattatactctattaagaatatgttaatactctagatacattataacttgaatgttatcacacccataatattctgttttcagtaccgttcgaatctgggattatactcaggatgcttgcatcaatattcttaatggacacactgcacctgtgagaggattaatgtggaatactgagattccatatctgctcatatctggcagctgggactatactataaaagtatgggacactcgagaaggaacttgtgtggatactgtgtatgatcacggtgcagatgtatatggtagagtgtctttcattctttcatgtatttgttatattgacatactaatgatgcttataacttctgaggaatacagtatttttgaagaagttatacagtgttttattttacaataacatttttcacattagaaaatatacacgtttattattataataccagaatgtgcagaagaaaaagtcaacaaaaattatcagaagatgactattgttagcactgtgttgtctttctccccactgtctgcaggtgtgtctgtgtttctgtgtacacacaaacacacacacaatgcacacatattgcgatgggcatatatacatgtatggcttttgtttttctcccttccattgacatcactccagaggtaagttgtttaacaggaaatcagtaatagagtagataccacttatttaaccattcctctattcttggatgtttagtacaatgttttgttttttaatataatcccgtttttttaatataattaattggttatggaaaatcagattacttaccatttgcacatctcttcactctcattcttgtttgtatttattctcatccttaaactttgatgggagtaaatgggcagattaagaatccaaaaatgatttcttagaaaaagtaacctcaatctagatcaggttcagatccatatgcttgatcacaatggccttttagccaaggcaatgcgggactgagtgtgggagagaatcatatttgttgatattcgaattgaaaggtccccaactcttcatcttttaactagaacgtcatctgcccatccactaactcacagatactatgtatgctattggttttatagtatacttgttgctgcttaaccacacgaaatatacttttaacattttcatccatgaccatttgctttctaataatttttttcttttttctttctttcttttttttattattattttgtttttttgaaacagagtctcactctggctctgttgcccaggatggtgtacagtggcgcaaacacagctcacgtcaaccttcacctcccaggttcaagagatcctcccaccttagccttccaagtagctgggactacaatcacatgccaccacacccagctaatttctgtatttttggtagagatggtatttcatcatgttgcccaggccgatctcaaactcctgggctcaagggatccacccgcctcagactcccaggaaagtgctgggattacaggcgtgagccaccatttccagcctctaatggttattcaattttatattcatatttatagaatatataaaataatttattgcattcttatattattttcagccagtatattaaatgcagataggttgactgagaacctttcagttactcacaatatttcttcatagcttcaattctgtagaagttttatgaagcacatataaataaaaaatatttttcaatgttcactttacttaaaataggtttttattttcatcaggtttaacctgccatcccagtcgccccttcactatggcctcttgctcccgtgactctacagtgagactctggtcattaacagccttagtcactcctgtacaaataaatattctggcagacagatcttgggaagaaattattgggaacactggtatggaacatatacatgtattagagtttatttctaaataagttttatgagaaatcttttctcactgaattatgtctgttcttcagattatgctatagaaccaggcactcctcctctactgtgtggtaaagtgtcaagagatattagacaggaaatagaaaaactaactgctaattctcaagtgaaaaaactaagatggttctcagaatgtttatctgtaagtattacaggaattaaatgcgaatattttccctttagccaacatgaatcattacaactatttttattcacatatttacatgtaccattctaattcattgggtaactcttaccataatctgtgcactataagaaagc

SEQ ID NO: 33072 - DNA, 2300 bp, Homo sapien
cagccactagctacatatggctattgagcaggtaaaatgtagccagtggaactgagtttatttaaatttaagtttaaatagccacatgtggctagtggctaccatattggatggtaaagatctagcacatactccaggatagttcctcagaaaaggtttacagaatgaatgaatcattcattaaaacttttttagcctaacagaaaacacttacatagcttcagttttggttttcttttttaaccacatacagaatacactggtttactttattaataagcatgtatatgaataaacattaaaaatattacatagtatcattatcaagatctatcccatattttaccatgtgtatgtatccacagggcctgtcacctggctctctgcagcctcaagttcctgagctcaagcaatcctcccacctcagcatctggagtacttgagagtacaggtgtgcaccaccacacccagctattttgtttgtttgtttgttttgtagcgaaagtctctccaccttgtgttgcccaggctggtcttgaactcctgagctcaaacgatcctcccgcctccaccacccaaagtgctgggattacaggcatgacccactgtgccctgccaagcaaaaaaaaacaaaaaacaaaaaacaaaaaacaaaaaactgtggctgtaaaaatttttaatggattttaataattaagcttacatatttataattgcctatgccaactttgcagttgttttcattgtgttcagatagatcccaagtgactagatgaatgcgtggcacataatatggactcaatacatatttgttgaattaatgaaggaattatgcctactaggagattttaattaagtgtgaaaatctaacctacacatcgttttcaaatattaatgtttacaaatacttaatgcaataattaaggaaatagttatgttaaattttgtggacattcatttccatttcaaagatttttttcccccatctcttccaattcccaaacaaaaactgtccttggcctctggagtcttctcacaccactcctcaaactagacgactgaaaataggcctttggctgggcagaaaccaacaatatttaaaatacaaaacttatgaacgatgacataagaaaaaaaaagctctaaataggttaacagtgaggccaactaaatctgagactgaaagcgctccccagaccgcagccacaccactgggaccccagctttgcctccctcgatacccggccccgcggtccaaaatctgagtaaagcggaagtacgggcggctgctgcggcgcttgcgcaggcgctgaggtctcgccccataagactccgccccgccccacgagaccgcgccgccagcaataaggcccagccccgccttctgctgttgccgcagcaacccagaaagcgtcatggctgccgccggccaggaaaaagggtatttgacacagactgcggcagccctagacaagtcaccgtcactttcgccacagctagcagctcccatccgagggaggcctaagaagtgtctggtctatccgcatgcgccgaagagctcccgcttgtctcgttccgttctgcgttggcttcagggtctggatctcagcttcttccccaggaacatcaacaggtgcttgagtaagccagtcctaggcccccccggtgggcgccccgcctgctttccgccgcctgccaggcctcagattgcctaccctggcctggcttatgtttcaaatcaagacccccccacccacgtacacacacgaaaacactattagggaacaaggctttaacaaaataccacgatacatcttgtttattcaattaatcaaccaatcattaaattgtggacaatatagaatgctttggtgactacaaaaatattaaaatagtcaaagctttttctttagtgatattgggcattaatactggtaaggacggccgggcacagttgctcatgcctgtaatcccagcattttgggagccgaggcaggcggatcacctgaggtcaggagttgagtaacagcctgaccaacacggtgaaaccccgtctctactaaaaaatacaaaaaattagcccagtgtggtggcgggtgcctgtaatcccagctactggggaggctgcaggcaggagaatgcttgaacccgggaggcggaggttgctgtgagtcgagattatgccgctgcactccagcctaggtggcagggtaagactctgtctcaaaaaaaaaaaaaaaaaaaaaaaaaaaaaatactggtaaggatcagtttaccctttgtcggagatggcatctagt

SEQ ID NO: 33073 - DNA, 2300 bp, Homo sapien
atatagctaataaaaggtagtgtgaacccagaaactctgagacaggtctcagttaatttagaaagtttattttgccaaggttgaggatgagcacccgtgacacagccttaggaggtcctgacatgtgcccaaggtggtcagggcagtttggttttatacattttagggagacatgagacttcagtcgacatgtggaagatgaacattgatttggtctggaaaaggtgggacaactagaagcaaaggcaggacaactcaagcagggagggggcttccaggtcataggtagatgggagacaaatggttgcattctgttgagtttctgatgagcctttccagagtaggcaatcaggtatgcatttagctcagtgagctaagcggtgactttgaatagaataggaggcaggtttgccctaagcagttcccactttgacttttccctttagcttagtgatttgggggaggtggggggggtcccaagatttaatttcctttcacagtagaaatggctattcaaagctttcatcttaaaaatcagcttaaaataccaccttctaagatccaaattaatggtcatctcttttgagaggacttcttacactctcccaggccaaagtatttgcttcctttctggtgctaacatatttttaccatggcagagcttttcagtgtatgtaatcttttcactgatatttctatctctgaatctcttataaatgatctgccgcacagagctgtccaatcgaaattcctgtagtgatggaacagtgctgtgtctgtcctacccaacatggcagccactagctacatatggctattgagcaggtaaaatgtagccagtggaactgagtttatttaaatttaagtttaaatagccacatgtggctagtggctaccatattggatggtaaagatctagcacatactccaggatagttcctcagaaaaggtttacagaatgaatgaatcattcattaaaacttttttagcctaacagaaaacacttacatagcttcagttttggttttcttttttaaccacatacagaatacactggtttactttattaataagcatgtatatgaataaacattaaaaatattacatagtatcattatcaagatctatcccatattttaccatgtgtatgtatccacagggcctgtcacctggctctctgcagcctcaagttcctgagctcaagcaatcctcccacctcagcatctggagtacttgagagtacaggtgtgcaccaccacacccagctattttgtttgtttgtttgttttgtagcgaaagtctctccaccttgtgttgcccaggctggtcttgaactcctgagctcaaacgatcctcccgcctccaccacccaaagtgctgggattacaggcatgacccactgtgccctgccaagcaaaaaaaaacaaaaaacaaaaaacaaaaaacaaaaaactgtggctgtaaaaatttttaatggattttaataattaagcttacatatttataattgcctatgccaactttgcagttgttttcattgtgttcagatagatcccaagtgactagatgaatgcgtggcacataatatggactcaatacatatttgttgaattaatgaaggaattatgcctactaggagattttaattaagtgtgaaaatctaacctacacatcgttttcaaatattaatgtttacaaatacttaatgcaataattaaggaaatagttatgttaaattttgtggacattcatttccatttcaaagatttttttcccccatctcttccaattcccaaacaaaaactgtccttggcctctggagtcttctcacaccactcctcaaactagacgactgaaaataggcctttggctgggcagaaaccaacaatatttaaaatacaaaacttatgaacgatgacataagaaaaaaaaagctctaaataggttaacagtgaggccaactaaatctgagactgaaagcgctccccagaccgcagccacaccactgggaccccagctttgcctccctcgatacccggccccgcggtccaaaatctgagtaaagcggaagtacgggcggctgctgcggcgcttgcgcaggcgctgaggtctcgccccataagactccgccccgccccacgagaccgcgccgccagcaataaggcccagccccgccttctgctgttgccgcagcaacccagaaagcgtcatggctgccgccggccaggaaaaagggtatttgacacagactgcggcagccctagacaagtcaccgtcactttcgccacagctagcagctc

SEQ ID NO: 33074 - DNA, 2300 bp, Homo sapien
ataccagcattttgggaggccaaggcaggcagattgcttgagctcagcggttcgagaccagcctgggcaacatggtgaaaccccgtttctaccaaaaatacaaaaaattagccaggcatagtggcgcatgcctgtaataccagctactcaggaggctgaggtgggaggatcatttgaacctgggagacggaggttgcggtgagccgagattgtgccatcgcactccagcctgggcaacagagtaagacctgtctccaaaaaaataaaaaataaaaataaaggaaaaaacctactagatgccactatataataagaggttgaatttactaaaaagctgtaataattcttattcacataataaaattgctttacagtataaaattcaaaaatttacctaatttttaaggagaaaaattttaatcaaattatcttagtaattgattggttatgcagacagacatcttcattatataaacatgtagaagaatttaaaaagatagacctaattgatatatggaacttcacatccacattcttttcatggacactttgaacatttataagagttaagtatacacaggactgtaaagtatgtctcagtaaattttaaatgactaatattataaagtccagaggttggcacacttttcctgtaaaagattaaagagtaaatattttagtctcctgggtcaactttgtgggactagttgcgtacagtttcaactttgatgttatgtaaaagaaaatatagataatatataaacaattgagtttagttctgttacaataaaactttatttacaaaaacagatgataggctaaatttggcctatgagccatagttggctgacctctgatagggaacatataactggcctcagtaattttaatgtagaaatcattaacaaaatgtaattagaaaaaaaattatttggaagttaagaaaaaatattttaaagtaactcataggtcaagaaatcaaaattatgtaaagaataaaacactcactttccacaaattgatgaagaaaataagaaagctgcaagcagaaattaataaagtgaaaaatgaagacaggaagaatcaacaaagccaaaagctggttctttggacagacaacctctgtccaaacttgtcgttgttacagaggtgcaaataaacaacagctggattgaggaagagactataatagcagataccgctgacatttttaccataagtggttattatataacaacataatgccaataattttgaatattaagacaaaatggacaattttctaaataacacaactgatctaagctgagtttagaagagagaacttaaatagttgtaaattcaaatatgtatatgtataagtagtttttaaaattcctcagaagaactccaagagcagataattttactagtgacttctaccaagcattacaggtggaaatatttctagtatgtgaaccacaataatagagaaaacaagagactagtcccaaactcctgtcatgaagtcaagcataagtaaccttgtcatctgtggtggctccgtgttgtgtcagcttggttatgttggatctgtttcccttttttgtgttgttccaagtgagattggaagaaaagataatgtaagagttggatggcagtgtgaggaagctgcagctgggattctgaattttgctgtagggtaccaggtgccgtgggtgtttgcacacgtcactggtcatttagcaacatgcggaggtaaagcttgtcctcctgtcaccggatcttcccctttgacccttccgcgtcccaggtgtatgtgcagttttgtggtgaaggccacccttttctccttaggtcatctacgtcattgaggacaaagatggtgatagacagacacgttcatgatttttttccccatagcttccagatcaccactccattctctcctataggagaggagatatcactcaccacaagattgacatctgtagtttcccagcaacctttatacaataaatgaatgacctttggaacaaaggttaactgttggataacaactgctcaattttttttccaagatgcttatgtcaggcttactctcagacctcatctgccctcactcactatcactaggccaacagatttaggtactcatgtttaagtaaagtagaataaaaaataaaatggagcaagaactgggctcagatatgactcctaaaggttgtatgagggcacggccttgtaaagaaacccaaagcagcacagcctctgagaactgaataatggccccttccagatgcctctttgcaatggtggaa

SEQ ID NO: 33075 - DNA, 2300 bp, Homo sapien
tatgaaaaatacagcatctaatttccacttgaagaattcgtatgctatgagtcattttatttgggcttaatttttatttagtaattagcagactcagagagggtgaaatttgctgagggagagtataccaacagaacatacaaatgggaatcaagtaattcataaaaacaaaacctgatatcttgacataaaatcctaaatattatactgtagttttttgtattagtaaaactagaaggatttaaacttaatgcaccgatgattccagccttagtgaaatgaaaatgtttcttaaccccaaagaatccaggctcctgattagctcatgcgaagacaattatttatgatagcacttactggtaaagagaaaggactgaaaccttagatgggcacttagacgtgactaaggcaggttttatttctgatcccgaagcactgaagaggaagtctgcagtgactcagagcactgtgatggcccagctgtccacgggcatacctctctagtgtggagtcaggcatcatcatgccagagggaagactcaccatagaagaatcagcatgtattgactcaactgacacagtcttaccagtagtgaaagagaggaacattttgttaatcttctatttgaagttaattttcactgactcccaaagcacatatgaaatggcacactgggtctaattaatgtctgcctagccagtattctgcctctgaaaatgataccaggggccattttcataagaagcttggtaatttctttctaatatatagatctaattattattattattattttctgagagccattcattcattggggaaagaagcagcctgctttatttgacatatttattttacagccatttctcctgtgttggaatgtgtcaggtaaatctgtccagtcagttaagatactcagcataaaatggatacaccgagggagagaagcacacaacacttactagtatgaccagtcatgggtatgctccttattccaagaatggccacttctattttcttatgtttgttttttgttattttggaacttctcaaatgaattaggaagcaagtaccacaatcaacaggccccaaacccagtcatagaaatatgtaactaagctccctgtaagaaatgatattttgtattttggcatatcatttttggcttaaatgccaaaatattgctgctgtatgtcattttcttaataatttattctatttctcttttaaaatataagttgcctaaggatacctatatacagatgcatttcattaatgaataaaacatatttgggttaacaaagattataggcctaaaatgtatattgttttccttggttttggacagtcttgatgaaatgcgtatgtttacttgataattcttttggatatgtcttttctgacacctccctcccaggtttacatgcttcctctttgtgctcccttaatacctgtttttaccttctttatatttacctgatttcttttccatttcctccactagactctaagttccttgtggcagggaccattctacttgtctttgtcacttcaaaatctagcaaagggtttgacacataccaagttcttaaaaagtgtccattggatgaaggaaccgtgttaagttattaatctgtgatgttccagtgtaatgacttgtaagaaaaatgtttttttaaatcagtaaaaataacataattggttaatttgatgagtagtcattaaaatacaagccatggactgtgtactgatttagctcatggtctacaaatagtacagtgccattttaaagccttaaatgatagacaactttactcgatatgaatatcatttacattaacaatgggaaccccatacactgtcttcaaattgttcttgataactaaatatataaaatggaaaggatatgcatatatatttcaatatctggattttgaaatttggagcacagaggtggagtgtcattttatattgagaatggaaagtcaggagacttgtgacacgtgatgcaattgcttccatggaatattttcagaccaataggagtttgcgaagaacttttatggagtgtataaatattttgagctgtaggcatcactaccagctgatattttctttcctcaggaccagctgttcaggagcatcccggacgagagccaggcacatttgagacttggatccaactaaagaccgccgcagattcttctgcagcaatgtcggtgttagaagaaaatcggccgtttgctcaacaattatccaatgtctactttacaatactttcgctgttctgttttaagct

SEQ ID NO: 33076 - DNA, 2300 bp, Homo sapien
tataaatgtctagaaaatctaaagaaacacttggaaaaataaaacagaataagaaaattccctatcccatccctctcctgctctttttgtggacttttatgtgtttttagcactaccagtaagtcaagttaaaaactgtggtgtcataataataatactagtttcatttgagtgttcacaatctgcattcactctatgctttgcagacccccactcttatttaggcagttgctaagtaacatagagtttgtttccgaaatgcccctcctatcagtcttccttttgggtccatcactcactctccacatataactggtaaatggttgcctgtgtagcgatgcttgttttacatgtaatttccctgatataaagtcaacttcttgacctggttttctaccataacttacctttccaggcttatttctgcttactcttttatacatgcattgtttatcaggaccagccttctgagtatctcttagatatacctgtacttgcagttcaacaacaagaattatttccctaaaacatgctataataataatgtgtcttgtttaggctttgtgttaaataatttgcacactgtgttgtcccacattaccagggctgtaattccttcctcctttgctatgtaacttcccagggtatttttttgttttacatttcagatttgtttttattttattaactctacctgattatatacttttgagtgtagaaagtgatcagtacaatctctgtatcacttgcagtatagatggcattcaataaaaatccttttttttctttttttgttaacaaactgtgccagcctggaagttaaaaactaagattttaaacgcaactaaggatctctctttagtctctattttatcgatttttcattagttggctctatttgagcagggagtctgccttattagtgctgtattctcaaggcttagaactattcctggtacacggtaggcacttggtaataatcctacctgtatggctatacaaaaattaattgaatggtcatgaataatgcaaagaagcaaaagcttaacaagagacaacataagccagtatcaagatcagatgttcacagttttctggtttgttcctgatcacattccaggacagatatttttgtttggtttatggactgaaatttttaaaaaaaatttatttcagcagaccctgaatccatttttataaaaacccttagctgtgaaaggaacaaaggttttggcagatagtataatcagagtcaggattggctcggtttgaaccctaatgcccttcaggatattgaaaatgtgataaaataattgcattatttattaatgacccaacgaaattcttatacattatgctgtagagcaattccgcagccattatcttctttgctcctaagaacccagaaaggttatccttttatttatcagaaatcaccatgttaaaatgcaaatacttaggatcggtagcctcaacccttatcttctaaaacatctttagctatccatacaaagcaaagcattaataggaattggactgacgttggaggtggaaatactgatgcacgtgacagctttaaggacttgggcggctaattccccactccccactgctcctcagatcctccaaaaaaagctcaagtcctaactttgaccaggtttgacaaagaagggagaggaccaggcgttttgtaaagtgctgcttccaaacgccacccgtcaggacagattctaaaccaccttaacttgctgccggtttcaagtgaaaataaatggtacataagtaatcaagaagtcgcagtcccagacctctgaccaaagaaccgaaaaaggacagcgaacgaccggttcccaattctctgaacccaaaggtcggagaagcaatttagaagaggagggggtgggtcttccacaacaaaccccgcccctccctcactcgtcgctgattggtggcggcgttaggccgcgacggaggggcgggcccgcggctgagtctctccctttccgcgccgccccgtgcgcgctgtgggtgtgtttcgggaagcgggcgcgcgcgcgctcgcgtcggaggaccggaaaggaggcggggctgcggcggcgcgcgctcccggaacgcgcgcaccgcagacggcgcggatcgcagggagccggtccgccgccggaacgggagcctgggtgtgcgtgtggagtccggactcgtgggagacgatcgcgatgaacacggtgctgtcgcgggcgaactcactgttcgccttctcgctgagcgtgatggcggcgctcaccttcggctgcttcatcacc

SEQ ID NO: 33077 - DNA, 2300 bp, Homo sapien
ttagaactattcctggtacacggtaggcacttggtaataatcctacctgtatggctatacaaaaattaattgaatggtcatgaataatgcaaagaagcaaaagcttaacaagagacaacataagccagtatcaagatcagatgttcacagttttctggtttgttcctgatcacattccaggacagatatttttgtttggtttatggactgaaatttttaaaaaaaatttatttcagcagaccctgaatccatttttataaaaacccttagctgtgaaaggaacaaaggttttggcagatagtataatcagagtcaggattggctcggtttgaaccctaatgcccttcaggatattgaaaatgtgataaaataattgcattatttattaatgacccaacgaaattcttatacattatgctgtagagcaattccgcagccattatcttctttgctcctaagaacccagaaaggttatccttttatttatcagaaatcaccatgttaaaatgcaaatacttaggatcggtagcctcaacccttatcttctaaaacatctttagctatccatacaaagcaaagcattaataggaattggactgacgttggaggtggaaatactgatgcacgtgacagctttaaggacttgggcggctaattccccactccccactgctcctcagatcctccaaaaaaagctcaagtcctaactttgaccaggtttgacaaagaagggagaggaccaggcgttttgtaaagtgctgcttccaaacgccacccgtcaggacagattctaaaccaccttaacttgctgccggtttcaagtgaaaataaatggtacataagtaatcaagaagtcgcagtcccagacctctgaccaaagaaccgaaaaaggacagcgaacgaccggttcccaattctctgaacccaaaggtcggagaagcaatttagaagaggagggggtgggtcttccacaacaaaccccgcccctccctcactcgtcgctgattggtggcggcgttaggccgcgacggaggggcgggcccgcggctgagtctctccctttccgcgccgccccgtgcgcgctgtgggtgtgtttcgggaagcgggcgcgcgcgcgctcgcgtcggaggaccggaaaggaggcggggctgcggcggcgcgcgctcccggaacgcgcgcaccgcagacggcgcggatcgcagggagccggtccgccgccggaacgggagcctgggtgtgcgtgtggagtccggactcgtgggagacgatcgcgatgaacacggtgctgtcgcgggcgaactcactgttcgccttctcgctgagcgtgatggcggcgctcaccttcggctgcttcatcaccaccgccttcaaagacaggagcgtcccggtgcggctgcacgtctcgcggatcatgctgtgagtgaggccgggccggcggtgcaggacgccgggaccgggctggggcggaagccgaagccgggccgccgcgccggggctgccgtgccggggccgcgggcagggcgtccggatcgccctcctgagcggcagttcgcccccgagggcggtcgtcaggggtggacgtcgcaggcttttccggcgtcccctcggaacttgcacccctccaccgtaaattcccgggcttgctcttaaattttaattttgagcgttcctcaggtcggtgcctccgcttgcttcctgttcctcacttccctccacccacgcctggccaatgagggagcaacacaacagcagagccggcgccgccgcccgcctgggctggcgcctcccgcgcgtccggtgccgctcgtggtccgcatgcgaggccctccaggcgctgccgccgcgctctgggtcgggcttccgtggggtttcctggcggctctggaggccacaggacggggttgtctttgtgtcattcatcacccgagtttgccctgtttgacattccctttacagttgttgcctttgcaccttcagaaggcagtaaacagttggagctgctttgaagttggccagagatgttgggcactgagagaattaagcatcttagccttctgatacagcgagatttttgttttgttgggtttctttatttctttttcttttgccaaccacttgaagaagtctgcgaaaacgccaaaaaatgcagttcgaaatgacagtgccatttcgctattgcctattttgtccttgattttattctctggcacttttgtctttaatcgtcgtatttttccatctcttgttctcatacccttctactctatttccgtcttacacaagttctttaaccttagttt

SEQ ID NO: 33078 - DNA, 2300 bp, Homo sapien
aagcctgggcgcattaccagccagatcactttagaagtacgtgtgagagcagagctgatttccatacagctgtctgtcaccatgcacaaagttccatgttcctcctaatcgaagaccactgctctagcatacacacctaagattggaaattcctaagtcttatggaattcatatcaacatctttactatatattaccaaactttcccaaagtggtttttccaagtgtgagttctctttgcctaaatttgggtttgcagactttagtttttgccaagctggtgaataaccaatggtatcttattttggttgtaaattatatttctctgtttgctaaaatgagaaacttctattcatgtttattgttcatttggatttcttttgtaaggtgcctgttcaaattttgcccattttctatttgtcttattgatttgtaggatttctttgtatactctcagtttgagtcttctagcttaccccttcactttttcatggttccttttgatcaatcaagcttcttaatataatcaaatgtatcaggcttttctttcattcaataatgctcttttaacctttctcccagcttcttcagtgttatgaaatagaaagtgtcttagttttgaagtcagcaatatctgggtttggattctggtatagccactttctagcaatgtgaaattggctaagcaatgctcactagagtaagttgtctaagccttatgtttgatattcattgtttgtgcctggcattattatgtgtgctttgcatatattaaactgaatgctaacaacaaccctacgaggtaggtactattatcattcccattttaaagaaaaagaagctgagatcaagataggtgagtaacttgctccaggtcagtatggtaggtagtggtaaagccaatattcaaagcctggcacctgcactagagcctgaactctcctccatacagactgtgcttcttcctcagaaacatgggaatgagaatacctttcttttagaattgctgtgagcaaaaaaatatgtatgggaaaggacttcccagcatttttagtacatagcaggtttttgttatttctgtgaaatgtagcagagttgaggaaacagaaccgaacggaacacaaacattaaagtctctttgcaaagtcatatgtattttttttttttacagataattgtagagcaaattgaataattcttttaccttgttcagaacaatgagtctttcttcagtatctttggtgtaggagacagatgttctctgaacaacagacttagtatttttctggtaagaatagaaaaaaatcaatttcttagctcaatcatatagattaatttcttaatgatcttgaagcgtataggaaaatataccctcattttaaccatgtggcctaaaaagggccagagaaaacaaataataaagctttgaatggaagttggcgtgaaagacaaaatgcaccaggcaataaagataattttgctttagatattataatagggagaattttcatttctgcagcagaatgtgtcaaagaaatgaaggaggcttggggttttatagaggcaggtaaacaagggagtcaaggggaaggatggggggggtcagttcttggatatgccaagggaggtggttccttgaagttaactgtttctcacaacataaaaggtttttttttaaaaccattgctttttcctgggagcacagggctctggaaattttcaacaatgtcactgcctttaggaaagctaagaaaaatacggaatcctctactgtgacagcaaggatatgggtcagtatccaggcagtgacaatggtcaaagcaaatgtgtaacaaacctaatcaggagcctaatcccctaaagagatgaggaacccaaaatccaaaatgatttataactttaacttaaagacggatagttcactggccaccgaccagctctttgcacttgattgtaaatcaagaaattcaattaaatatttgctcagcatcttttttttttctagcaagttctttattttaattttaacttgaaatcagtgcattatattaataactccattggtcgtttgtctacttaacaatctttgatgatctttcccatagtgaaatgatcctataaaaccattgacaggttctaagatttttcctttgtctacccatccctactaactagaaatacatttctgggaagtagtctaacaataatttcagttttgaaaagggtcatggatggtaaggagactatattgtttaaaggcctttattgatccttttatagatttactggaagttgaaaact

SEQ ID NO: 33079 - DNA, 2300 bp, Homo sapien
ttagaccagttaagccagaaaggcagaaggtgtactcaagcatctgttttttcaaaatctccttttgtgatgccaagtgcaatcaaagtttagaatcattgtaatagcaaatggttgaatggaaactccaccttctattcaaatcctaccccagtctgcccttagctgttcccttttcacagatctatcaatgtctgaagataactatggcaggctgatcaaatatgcatagagcaggaagacagcaagagagtgatacactgaccatgttccaaatcacaaaacatctcaacaggctagatcatggaccgagtctgatgggatggaatttcataaagatacataaaaaagcatcttggatacagtaaacttaactccacaaatacaggggaatttagacgtgactaagtagcagtacatatgaaaaattattgaggaattttgttgactttaagggtagtgtgagtcaacactgtgatttggctgccagaaaataaactcaatccaaggctgtatcaacaaaggcatactgtccattctgcatgctcattacagcactaagtaccgagccatgttctcaaccgcatacttcatgaacatggaaagctaacagtatggttaaggggggaaactggaactgtcatcttggggaataaaagggatatttagccaggagtaaagttagcttagggagaccatgataaatattttcaaaatatttgaaggactcagttgtggaagtgagattagatttattgtgtaaaactccaggagtcaaaagcaatagagagatagaaggaaatgcttttcagcagtgttgctcatcaataaagggagtgaacagccacacagaatggaaggttccctgtcctttgagatatttaagccttcaagtaaattatgggtgaggagtttcaaatctagagttgaaccagataagaaagtctcttcttccggtaagatattatggacctataacatctgtgtacttaaaagtagattgggagtgaaaggcagacttttgatgttctgtacactgttgaaaccccttagcgtggtcctctgtaacctgctcaccctgccccaaggaggcagctagccaatgccaccagcccaacggaaaccccagtgcttttccaatggggaaatgcagtcacttttctttggatgctacacatcctttctggaatatgtctcacacacatctctctttatcaccccctttttcaagtaaaccaacttcttgcagaagctgacaatgtgtctctttactctccacgaagattctggcccttctcttcacctgtcagaagtttaggattccaaagggatcattagcatccatcccaacagcctgcactgcatcctgagaactgcggttcttggatcatcaggcaactttcaactacacagaccaagggagagaggggacccctccgaggtcccatagggttctctgacatagtgatgaccttttcttggaacttttacaacccccaggacatttccaaactttgagcagggctctgggggccaggcgtgcgggagggaggacaagaactcgggagtggccgaggataaagcgggggctccctccaccccacggtgcccagtttctccccgctgcacgtggtccagggtggtcgcatcacctctaaagccggtcccgccaaccgccagccccgggactgaacttgcccctccggccgcccgctccccgcaggggacaggggcggggagggagagatccagaggggggccgggggaggtggggccgccggggaggaggcgagggaaacggggagctccagggagacggcttccgagggagagtgagaggggagggcagcccgggctcggcacgctccctccctcggccgctttctctcacataagcgcaggcagagggcgcgtcagtcatgccctgcccctgcgcccgccgccgccgccgccgccgctcagcccggcgcgctctggaggatcctgcgccgcggcgctcccgggccccgccgccgccagccgccccgccgccctcctcccgcccccggcaccgccgccagcgcccccgccgcagcgcccgcggcccggctcctctcacttcggggaaggggagggaggagggggacgagggctctggcgggtttggaggggctgaacatcgcggggtgttctggtgtcccccgccccgcctctccaaaaagctacaccgacgcggaccgcggcggcgtcctccctcgccctcgcttcacctcgcgggctccgaatgcggggagctcggatgtccggtttcctgtgaggct

SEQ ID NO: 33080 - DNA, 2300 bp, Homo sapien
gaggtggaggttgcagtgagccaaggtcaggccactgcactccagccaacaaaacaaaacaaaatctgactccgcctttcagtcacgccagtgaaatctcttaatgccttcagtgtcagtccccaactcttactaattaaagatcgtatttgacccaaatgtgcacagtacacaacaccttaaagagaaatgaggtgaatcagataaatgaacaggttgatattttttaaatttgtccacaagctctttgatatccctcctttcaaatcacagcttaattcccctccccttgtgaatgcactgtatttaatgactggcttctaatgaatggaataagaagtaagttaccatagtaaactaagtaataaagggtgactaagtaataaagggcattgcagctttctccttgacttctctcttggatcacactctcagctgccatgtcattagaagagccgagctgcactatagagacacaagaggtgagaaactgaggcctcctgccaacagccatgcaagtgactcatctcggaagtggatcttttagctacaaaaagcctttggggcactttagccttggctaatattttaactgtaacctcttgagaaatgctgagccaggatgactctggctagctagactattgccaaattcctgacccacagaaactttgaaataacaaatgggataattgatgaggtaacaataaataactagtacaacgctgaaagaggagaaggtatataggacttttctccatcaaaggacagagattattgaattgaacaagggagtaaagtacaaatagtcctgaaattgatccagccaacttttgatcactaatctctccctgcaaaggaaagatttaatacttttcaaaatttcaatcaagtcttcagtatattcaaattcaactctctagtatacagatgctcctcaacttacgatggggttatgtcctgataaacccgttgtaaactgaaaatacagtaagtcgaaaatgcctttaatatatctaacctaccaaacatcatagcttcacgaggccctccttaaatgtgttcagaacacttacattagcctacagttgggaaaaatcacctaacacaaagcatattttataataaagtgttgaataatttattgactactgtactgaaaatgaaaaacagaatggctatatgagtactcaaagtacagtttctactgtgtgtcacttttgcaccatcatacagtcaaaacactgttacgctggggcatcctaagtcagcaaccacctgtgtatatgctcttgtggtttaacggcagcacagtgctatgcttatgaaatcacttagaaattgacattctgttttaatgtgtagtatttcagttttcaaaaaagaatacactttataatttacaaaactatatggagtcataaacttcatagatttatatgtatgcatgcatctttggttagggttgtgggtaaatttgaaaagctacgcattaccctcaaatttatataaacctctacgtttaacaaagcaatttcatatagctttcatcttggggcgtccccttacaaaatggatgcatgcacttaggtagggctcacttaactatctaataatggagtttttaaatatagacactagaatatattctgctgtttgttccaaaaaccctcttcttcgtttctcttatcccacccacgtccgaatatagcatgccaaaaacagagccaaaaacaagattgtctgtgacatatctgtcctgtcacagacaaggacagattaagaggaccagatcagaaaatgtgtgtatactaagtagctcaaagacaagggcaaaactttaacgcaaagaaaatacattcagagctttccaagtcccaatttcttctgcttttacagttcagcctagttagttgtcctccacgccccccgccccacgcgcgtttgcgttttcttaataaacccacagcaagacctagggcgggggtgaaccacagcgcatgcgccgtagggagcgacctcaacagctagggtgctgtttgggcggggcctgggcggggccagacgcgcgcgagatttgaatttcctctgcgtgcggtcagtgcccgcgcagcgttgagttgcacagcggtattctcaccaggccctgcaatcggtgggccacagtgccggccacagagatggtggaaggaccaggctgtactctgaatggagagaagattcgcgcgcgggtgctcccgggccaggcggtgaccggcgtgcggggaagcgctctgcggagtctgcagggccgcgccttg

SEQ ID NO: 33081 - DNA, 2300 bp, Homo sapien
acctgtaatcccagcattttgggaggtcgggggggtgggggcggtgggtggatcacctgtgtcaggagttcaagaccaacctggccaaaatggcaaaacctgtctctacttaaaatacaaaaattagccgggcatggtagtaggcagtagcaatcccagctactcaggaggctggggcaagagaatcgcttgaatgcaggaggtggaggttgcagtgagctgagattacaccagtgaactccagcctgggcgatagagcaagactccatctcaaaaaataaatacatacatacatacatacatacaaatatccatggaaaagttgatatattgagaccttctatcagccattcccactatagtgtaatttagctgtttctctgacaggaatttttatttaagaagaaagaatttggagaaatagacatagtaggaggtaacagatcaggctctttccaccagaagaaacacaaataccttaaaaaacaggaagaggctagagagatcagtggggtactaagaccaattttccatgtattgtattttacaatttttgctaaaggcatgtcctaattccttaaggctgcataaaaatactcagcccaggagctaaggaaaatttactcagaggacaatgtatgtttttctggctttcttaccctgtttcacccaagtttccagtttcacctgccattgggttatgattactccagcacagatgacttgttcctcttccaaaccccatgaaaggaacttagaaaatttgtctttattatatcttttaattaacacttccccaacgggataatgatacttctgggctatcttatgttctttaaattatgtatttaatttcctagcaatcaataagagccttgaaggttttgtaagtctcacaactcctacctagtttatatttttacatttatttatttatttatttttgagacagaatctcactctgttgtccaggctggagtgaagtggtgcgatctcggctcaccacaatctccacctcccggcttcaagcaattctgcctcagcctcccaagtagttgggactacaggcatgcaccaccacgcccggctaatttttgtatttttagtagagacgggtttcactatgttggccaggctggtctcgaactcctgacctcgtgatccacccacctcagcatcccaaagtgttgggattacaggcgtgagccatcgtgcccagcctagttcatatttttaaagtttgtatagatttatagatgcttttaaaaattatgtgattatgtgtcttgccttggcaacctgggcaggcattccagacacccaaagggattattagttcatgttcgcacgtctgcccagcaacaaaactgagcagcctccaccaagcacgtaaaatccccattcctcctcttattcatttatttagcacttaatagtgccaggcaggaaggtaaaaatacatttaaaaaggaatggaggtagccgtcttgccctggaggtgcaggaagctgcacttcagtgtgctaggtagagggtacataggccgtttctgtttttcttccagctcagggatttataatgagaggaagtgctacaaaaagctgtggtgcgaaaatgacggacgctatgaatggaaaaaaaatctaaaatcaatccggtcctaagcaaacacgcttcacctacactcataactattgcagacctccgaggcctgggatccccaagaatatactgagtttgacaaacttttcaacttcaactttaaattaaaaagacagtaaaagaaccaaatccatagtacacagcaatcggctaaagttcctggggccctgcaacccagagttgaataattttgtattaaattcccaatatcaagctaaatctattttaaccacaggaaaagcagcaacttgtctggctattttaaaaatctgaacagcacttaggaagaagcaccttagcgcagggaacagctcagtgccccgtgacacaactctcccgcgggcccagggacgcctcgtctcgcgagagttgagggacgcctgagcgaacccccgagagagcgggcgtgggcgccaggcgggcggggcactggggattaattgttcggcgatcgctggctgccgggacttttctcgcgctggtctcttcggtggtcagggatggcgcggaagtcgaacttgcctgtgcttctcgtgccgtttctgctctgccaggccctagtgcgctgctccagccctctgcccctggtcgtcaacacttggccctttaagaatgcaaccgaagcaggtgcgggttgg

SEQ ID NO: 33082 - DNA, 2300 bp, Homo sapien
accggattgattttagattttttttccattcatagcgtccgtcattttcgcaccacagctttttgtagcacttcctctcattataaatccctgagctggaagaaaaacagaaacggcctatgtaccctctacctagcacactgaagtgcagcttcctgcacctccagggcaagacggctacctccattcctttttaaatgtatttttaccttcctgcctggcactattaagtgctaaataaatgaataagaggaggaatggggattttacgtgcttggtggaggctgctcagttttgttgctgggcagacgtgcgaacatgaactaataatccctttgggtgtctggaatgcctgcccaggttgccaaggcaagacacataatcacataatttttaaaagcatctataaatctatacaaactttaaaaatatgaactaggctgggcacgatggctcacgcctgtaatcccaacactttgggatgctgaggtgggtggatcacgaggtcaggagttcgagaccagcctggccaacatagtgaaacccgtctctactaaaaatacaaaaattagccgggcgtggtggtgcatgcctgtagtcccaactacttgggaggctgaggcagaattgcttgaagccgggaggtggagattgtggtgagccgagatcgcaccacttcactccagcctggacaacagagtgagattctgtctcaaaaataaataaataaataaatgtaaaaatataaactaggtaggagttgtgagacttacaaaaccttcaaggctcttattgattgctaggaaattaaatacataatttaaagaacataagatagcccagaagtatcattatcccgttggggaagtgttaattaaaagatataataaagacaaattttctaagttcctttcatggggtttggaagaggaacaagtcatctgtgctggagtaatcataacccaatggcaggtgaaactggaaacttgggtgaaacagggtaagaaagccagaaaaacatacattgtcctctgagtaaattttccttagctcctgggctgagtatttttatgcagccttaaggaattaggacatgcctttagcaaaaattgtaaaatacaatacatggaaaattggtcttagtaccccactgatctctctagcctcttcctgttttttaaggtatttgtgtttcttctggtggaaagagcctgatctgttacctcctactatgtctatttctccaaattctttcttcttaaataaaaattcctgtcagagaaacagctaaattacactatagtgggaatggctgatagaaggtctcaatatatcaacttttccatggatatttgtatgtatgtatgtatgtatgtatttattttttgagatggagtcttgctctatcgcccaggctggagttcactggtgtaatctcagctcactgcaacctccacctcctgcattcaagcgattctcttgccccagcctcctgagtagctgggattgctactgcctactaccatgcccggctaatttttgtattttaagtagagacaggttttgccattttggccaggttggtcttgaactcctgacacaggtgatccacccaccgcccccacccccccgacctcccaaaatgctgggattacaggtgtgagccaccgtgcccagccggatatttgtatttaaataactaatatgcaatccctatagaatctacccgattcagtgtcttcttagtggctactaaaatacctactggatccactgtccagtttgcctaaattgtagctgtttcttaagttaaattcgtctggatatttggttccttctggagtagttttcctttgactaacacttgaagaataattttcattttagttctagaagtaaccttctgttactctcacttaggtgctcttttgggcctaaatataattagatccttcgccgttgttttgaggtaaatctaaacgaaaaggaacacctgttaacaggtagtgatgccgcaggaaagtgctgggaagggaatgctgggaagggaagggcgtggtccctttaaatgataaggaaggggggcgggaagtgctgggtagaggagggcgtggtccccagctagggcttcatccctgggcctgggcctacctaggtgaagacaggcatttttgttttcctgcccggatgttgcatttcccaagaccaccctggcctgccatgccctcatcctgtgcctttaaaaacccccgagaccctggcaggcagacgcacaagcagctggacattgagaggagcat

SEQ ID NO: 33083 - DNA, 2300 bp, Homo sapien
tgaatactgcaggtctaaaaatacgtcctcataggctctacttttatacaatgacagtctattctttataaatcagactggatacacttacagaattcctgatataagcttcatatttttgagtgaaatgtgggttgtaagtcttagcattgactgatcaagggagaattagccctaaattaatgaattataataactaaatttttataccttctttttcacttgtgacatgatacctgaattattcagagtgcctacaaatcttgggtactcatttcgaggaaagacatgaccttatattccacttgccagagaggggttaaatcatcatcttgaggttacagcaatctatagattctatacatattttagtggcagatttcagtgcttgctttatatatattttagcagcagttttcagtgagtggcagatttcagcaagtgccaaaatctcactgggacaaacccttcagaaaatagaagagaatactgctgtctgggactaggtgaatacagatctgtttttaattttcaggcttccttgtgaaaatttaatgtttaaaacatctaagccaggttaaaagttctaatagttctgactgctggtagaacggacataattcttcattgcgaggtgtccttgacagaacgcctcttgttattatagagatacaggccttatgaagattctttccttcatggttacctctcttcctctgttttcatttgtttgtttgaccaagtcctacgctgtgcatactccagaatcacacacacactgtgtcacttatcaatcctgccgtccctgatttcagttgatgatttttgtctattactaatgtagattatctgattctaccatcactctattagctgctaatggcctaattcaattgttatctataatctgttatttttcttaagaaattaggtctatgattgaatttttcataatttttctctgcagcaaacttcgtttggaacatctgggagtgataactcaaaagtagcaatattcttgatatggacagggtagtatagtgaaagtggcggtgattatcctcatttaaaaagtgagtctattttacattttaattgtggtgatgaacatatttcaaggagatactagcttatacttaggagaatgctctcagtgccaacagacaatgagggatcaatttatcattaactgattagacgagacttattttggcaattggaaagagaaggcaaatatatccagaatgttcagagaatttcgttttttattccactttccatagtcacttgtatccagagcttatattttatttttgagttgaataaaataacattcataatgttatggcatgatgtgttttggtacattcagcaagtgccacaatctcactgggacaaatccccataccattcataatcgccaatagttacaataatcactgtttagctttgtattatgtactataacttttaccaggcaataatagtcacttgaaataaccatattcaacttaaaggaaatttaagagttaaaaatatctatgtgattatcaaagaaaatgtaaaaagctgaacatagaactgtttctagtaatatggtagataagctacctagaagcttggcttatacaccacaaaacatttaggagacttgtataagaaaactcccagtatttttttttttttttaaaggaagctagaaaccagagctttcagctgaggctgtgaatgctgtaagctacacggatgtgctttggtcaaggaatgggccgaggcagacatcccggcctgcatgactcagcgggactggtgcacaggcacacacctctacttgttatataacctgtttctgtaagctcatacttggctctatgcccctattgtttgtaaaaggtataactgccctgctgatgctgtgcaggggctcttgggcgtggcttggctcggcttggcataacatggctcaacatggcgctggtgcccagagaacgagagagcgagccaaagctgtccgtcttgaaggcgggcagggggaagccaggaaccaggaaagagttaagcttctgacccggaagaaaagggagagctggccgcgcagctgtgcgtggaaatggccggctcaagcagccgagacagagcagagtgtgagagagctaatggaagtaagctgctgaagaaaccgtattcacctgcctatggcccgtgagtgttcttgaagctatctggcgttcatccacccactcccctcggacctcagcatgggctggaacctcaccctagacctaacagatgctctcatg

SEQ ID NO: 33084 - DNA, 2300 bp, Homo sapien
ttatttatgaattgttaaacaattatttttcccattatttgagttttcatgcatgtctatcataggtttgtgtttctaattcaataattctcaatcctgcctgaacattaggattgcctgtagaagttttaaaagtctcaaggacaggttacatcccagagctgttacattaataaattctgaggcatccaagacattggcatttttaaaatttctgaggtagttccaatgaagtccaccattttaataaattaagatatataaagatttttgtttgcttattttctgggcttgcaatctcccttttgatcttctgtcattttgtcttatctgttaacaatgtcttattaaatttgtatttttaaaacttttccagagcttgaagctcatctggataatttatgttctttttgaaatttcaaaataaataattcatctcaattgtgggtgttttatcaccctcttctcttctccctctctcccttgtctttcctcctcctttcagttctttcaaccctgccacttgatcttctttcgtttgtactgtgctgggctagatctgtcagggtatttcctgcttacacattagaacagcagctgtatccaggctttctggttaacgtgatacagactaagcatatttttcactgagacttgtttttggagaacagtttgtttcccagctctagttcctatttgaggtctggatattattttccaaccattttttctggtctgcaggcatgtaaatttggtggagaagatccacaccggggctgagtccaggcctggctagtagatacttggactctgctctctcttccagatattatcaatgagttctcgcagggcagctttgcttgctcaatagtatgtcccactgtgactggttttgacttatcctcctttccctctatacacacaccctaagataacataatatctgagaaacctatgttagttttttccatttgtgctgaggtccttgggagatacctcagggcttcctctctcaaaatttttctttgaattttctaagactgcatacttattcttagtccacatctcttcaaattggaaatacaagttttgatgaaaattctcagaatgttatgaactcatccgtgttcctctatactatgttctggcgtggggttgaggaccatgatgggaacgagttaggggttttagcataacacacagaattagaatcttttgttcacttgtcttcccttgttttcttgcttcacttcactgtctttgcctagaaatatgtaggttaaattttgagacagcctttccagcataagtttgtaaatccttcaaaatagaaatgtttttgcaaatgctcggtttgaaacaaatgctaattagtagattgtcaagacaagggttttgaacgtttgagcaatatcattttgttgcatgacacaataagtgtgttctgagggctgggtgtggtggctcatgcctgtaattacagtttgggaggctgaggtggaaaaatcacctgaggccagaagtttaagaccagtatgggtaacatagcgagacccccctatctacaacaaataaaaagttagctaggtgtggtggcccatgcctgtagtctcagctactcgggaggctgagacaggaggatctcttgagtccaggagttccaggctgcaatgagctatgagtgcactactgcactccagcctgggtaaaagaatgagaccctgtctcaaaaagaacaaaaaaagaaagaaaacaagcgtgttcttaacaccttttctattcgtggctctcatacattcatgttccttgaaaattacttgaggttcttactaggaattgtaattccttctgattcatgcggtctggaatggagattagtcacctggatgttggcattagtcacctggaagttgaacaccacattagatgactcgaatgcaggtgaatcacactttgagagaagagggttatgtgcatagcattctacttgggattgtgagggacataaaagaagtatatgggccgggcgcggtggctcacgcctgtaatcccagcactttgggaggccgaggcgggcggatcacgagatcaggagatcgagaccatcccggctaaaacggtgaaaccccgtctctactaaaaatacaaaaaattagccgggcgtagtggcgggcgcctgtagtcccagctactcgggaggctgaggcaggagaatggcgtgaacccgggaggcggagcttgcagtgagccgagatcccgccactgcactccagcctgggcgacagagcgagtctcaaaaa

SEQ ID NO: 33085 - DNA, 2300 bp, Homo sapien
aagccagggagcagataagatcggtatcgaactgccattcaataattcttacaaggaagaattcactaaagtggaagcaacatggggtgtgccaccggagcctggaaatttcgtgatttctttttatttatggagtatttccaaattccttctggatggacgcaaattttgtcatgagccttggcaggaagtttaacccacagatttaatatattacaaattcatgaacagaatatttcaaaggcacacctccatcagctttagaactatgaaaaaaagatcatagggatatctttttcttttagtgtttctcaaaaaataacttgcacaaaatattttgtaagaaactccttattgaaggagaaaagaaaacaaaacacaggacatggctgtggctacataaaggccaattcagtttataatttgtgaggtagaaccaggcagtggagtgtcaaagttcagagcatgggccaccctaaagttggaggtaaatcttggccccatcaatttctagttgagtggcatgaagtcacttaaattactcactgcttcagttgttcagatgtaaaatgaggatagaattctgcataatttagtcattgtgagaattaaagaagttaataccaacaacaccgttggaattgcactcagcttgtagtaacacttaatatcatctattaggcattaataactttgtaattcaaaccacgattcagcatcaactctgatttttattcctattatcaccaacaatgaagaaagttagcatgtgtgtatatatatgctgtgtacatatgcatacagcatagcaatataatgtataatgataacatataaaactcttattctgacagtttttttaaaaatgccattgctttgagtggggcttgcacatgtattttcatgtcatgattgaacgcatcatacttttaattacaaaaaaatctaaaaacccctgttcaagttgttcattatcagttttcagagcaatattaaaggccacagtcccagtcgctaagcaagttcttggtatgagaatagtaaatttaaatagcacaatatggataggctagataaaagggagaacgttgctgcaggccatcttaattcatttttcctttgaattaaatccttgagtcagaaagcagaagatggaatggttgggaaattctcagttataatgtcaacgagttaaaaggctcacatatagaattcccacctgaaactgtagaaatctttatcaatgctaccccaaactggttactaggactctgattaaagtcatttaatttgctgaggtggtgtttgataaaatctaggggtttctgatggctagcatctattatattttgaatataactactcttccagtgaccttaatcagccctgtccagttgaattgtcagaagctgtttatattagttttctggatctactgtagtgtctgacattggtgctggacacatgagtaggggcataatacttacatagtattaacccatgccatggcaaggtaaatagccactccagggttcttggtaatttttaattacctggtagatgattgctataattacttaagacacaacaaaatgagaagatgagaaaacttagtgtgaattataagagatcttataaatctcaagtggaaaaatgaagtatattggtagaatctagaagacagcccaaggagaatgtgaaagaaaataaaatttgggcataacagacaaaggaactcatggaaataacacgtaataatgtcatgaagaatgaaccagagccgatgagcagtcaggcagagctgtattccatttaaaacatcaccaccaacaacacaatctcaatgcagctatattttcaagacataagggatgtaaagccaggactattagtgtgcatcagaaggaaaacatacagaacactctatttataattccaggggttggcaaggtatttaatgaagcaccgagagttctcagtagccaccacctcccacgccgtcctcctgtctgcgggcttgcatctagccaccagtgctgaaatagtgcctgtcccatagaaccatcacccctcagaactgagcctggatgtcagccgtggccatgatggctccgtctcattctgtcacagatcgtctttataagccagacatttcagtgctataaactgatgaggtaagtagtgattaaggctaagtggatctcgttaattcagcaacactttaaaataattgaacatgaataaaatggcaaattataatcaaagtcctttgggaatacatttgaaagccacataatgca

SEQ ID NO: 33086 - DNA, 2300 bp, Homo sapien
cttttaattagtaagtgtttacttgcatcctttgaattcaatcctgggagtcattttcctgtagcccgggagctccgacaagcctacagacagggggaaactcagaatgtgtttgtgtgatcagctaagggggtttgtgcccagatctgtgtctggtgagcaattctgttctgaatatgtgaaacacaatgatcgaaacaatgtcattatatgtcttccttgggccaaacatgctttggtaagaactcaaaatattcacatacaatgttagaataatctcagagataaaaaaaatcaaggtctagaggtaataagacttgttcaaaaaatactcagtgagcgattggcaaagttggtactttccaaggcctcctgcctgtcggtgtagtattcttcatattcaaaagatgtcttttacgttccccagagccatcatctgtgatttagagacccattttatttctaagtgttgctcaaaccaaaaagaaaacaaaagattaagtaggtttttgcaactattacctaattccaccgcagcctaccactgcatctggcttttcatctgctcttcaatatttcttactcaaaagcaaactcaaagatagttgatgccagaaataaagcaaaaaatcaagaaaaaaacaccttcctacaaaaagcccataaaatgaatttgaaagaaaacaaatggatgtatttcagctctctctccatttctcttcttctatcgtagcttcctctcccattttctcatctaatattaaagtgtctgcacatgagagcagatacacgtggcaagaaaagacacagaaggtggcaaatgtttccttttctttctttttctttttattatgaagagcttttcagaatttgcagatgttagtactcgggtgtggtgtcttagctgtattcctgcactgtatagaggttttgagggtgacttcttaatttgtgcagtgtctgagatgccgtgtctgggtgcaagacagactgtgattagcgagtggtttcttccggaggcctgagtcagggtcagactggtagctgggaggtaaaagacattataccgtgttatcaattcttgctcaaagtcctgttttaatagtttaatattgacatccaaatagtccccccaaaaccaacaaaacacttcaaatgccctaacttttagtgtcagcccttttcaaaggaagagcaactatttacggacttcttatgccgtcaaaatttacaagctattatttaaatcacaacttataacaattcctcaaagttaaaaggaagagtttcctaatatgagagttggtggatgattttcaagattcatacttctctttctttttagaggacaaaagaaagcaaagcataaaaagagaaatggtttttaatactgagtagaaaaacgcaatatatatgtagaaaatatatgctccatttgaattcatatttacatgttttgtaagctcagataatatatgtttttcattattttagtaaaattaaagaatgggcattcagctatctttaaattttcatattgctcatgctagtttaggcacgccagatcactttggcataataaattcctacatgagcattgcacagataccaagacactgtaatatttttcttttaagtgtgaattgaagaaaaaatattaatagataggcacatttttatgttagccattattagaatttactaatgagaaatctgacatgctatttcctattgctttaatatgttatatattataaaatgttttcccacattataggcgttaattgcataatgttaaaaaaaaatcgtgtgtaatttcttgtgatttatgggcctgccattggtgactaggtgtgggagaactttggcttttgtggactggttcagggcaaggatgtgtgaaaagttgaggaagcccaattagagaaaggcactgagaaaaatttttaaaaatctatcctgctgagaagcaggcattttttctggatgacaaatgtctggagttctcagttttacaaaaaaagagtgctcacccctggcctcttatccttttgtcatgtaggtaacctaagctgtggaaaaaagagaccatctggaaagaatgctgcggtttcacagagccaacattattctctacctccccttcctcttcctctttctttatggatggcaaacagcgttcagatgacagattttggaaaattgtcttaggagacgcattctcaggcagttccagtgtattggtattttggatgtttctctgcattttgtcatacggttcagaagggtgataggctttc

SEQ ID NO: 33087 - DNA, 2300 bp, Homo sapien
agaaaactacttttcttgatcttccgtagggtgggcatttcaggtcagctgagtcacccgaggaggtggcagtgcaagacactgccgggaagacggattccgaggcagaagggtgtaattaaggatttccacccccggtaggcggcccgtcctttgcagagcctctgaaaatgacccgcgccttcctttccacagtgttctttcgtccgagaccgaaaagcgcaaatgacctttggacagggaagggaggcagtaaacactcagacttccttaccagcccctggtgggcactgcagcagaacaattgtctgccccccaggttcaagcacctaggcctccgccccgcatcacctggccaggggcggacccgggagtcctccgaaggctccactccccacttttactactcttctttcctctccattctcccctcagattagcggccggacactgtccctgcctcgattttgtttgctgtgggagggaaaaaaaaagtttgctgctcctcccaagacactggccactttctactcactgaagttcccaccgcagcgctggctcccggctccctagctcccgccccctgtctgcaggaaagccctcccccggagcttccgaaactgctggaggttccagagttttgtagctccgaatgggcgacctgagccgaaccgctctctggctgggtggtcggcgggatccttcaggctcctttcgggtccgggacggggcggcggcagaggtggggcgtgcgtgcttggggctgccgagtgagtgcggctccctggtgcgcgcccgagcatctccccgccctctcctgggaccagcagtctgcccgtggagggctaggagcccgcgaccaggcctgccccggccgtcgccaacctgtccttggaagcgtggcggagactggtgcgctctcagcctcgtcgcgccagccgcctcgcgccaccctccactttcagcttcagagcagaggattccgccgacctccacctgtacctgtactcggccgttaggaaatccacttgcatttttaactaccgtgcagaaccagaaacagatcgagcactgggagaacaaggacgacgcctcctaggaaagcctgaacctttatgttagtttatccaaagtttgggctagaagtgaggagaatccctaaactcgaggtggtgtgcccagacccacagcccgtgttcccgaagttgctaagtgcccgagcgcagcgcgttaagtagagaagtcttggtagtaagcgaacccgacccggctctcggggcgctagtgacggaaagcagcacgcatatctttgcgggaagaatctagagtcgccctgggatagatccatctccttctgccactgaatttcacacttgaaaaagataaggtcatgggggcggatgaatgatatccctcactcatttagccattcttattattatataaaaaaaaggcttgtcaattatgaaggtgtgtcccagatattacatgaagatcatgcaaactacttgaaatttgaatccggacatgatcgtaaggaaactctttcataaagcacttttgtggcctagttcccacacacacacaaaagtattaggtctttaaaacttttccaagtagtaagtgagactccctcttactgtctacgaatacacaataaagagatgagacactgccccaatcctaaagaggccagaactgaagtgctacattgtgtgagttaggggatgcttcttttttccagctcttttttctagaatcctcattacagctaacgctggtaataaaggtaggaaaacaatagaactcataaaacttagaaatggtaataaatcttggctcctgtctctagcccagttccttcttacatgagattcaaagtttttcagtatgcaatgctgaacgttcacactatggttgcaaaatagaaaaaaatactctagaactcattaatacggccctgcgcactctatgccaggcgtcgctggtggacaaagcgcgcaggggtcctcctctacgtctgcctgcgcctgtaatccaggcagcttacgtgtgttaaatttgggtctctctctgtctctcacacaaagaagttccatcatttgaggccgttaggaaaagctgatgttgtgcagtgccaaactaccacacgcttcctccttcggatgaatccctggaaagcagagaggcagctcgctacgtgaccatcatgctttttacctcactgagctgttgtcaagagagggcggggatggcgggcagctcacgtcgtgccctccgcagcaataaaaactggagcg

SEQ ID NO: 33088 - DNA, 2300 bp, Homo sapien
ttaagaggaataataaaattcgtgtaagaaaaaaagaacaagattgttaagggaaatgcaacaggaagagatacagacaatcctgaaatacacaatagaataactaaactcattataaactcctatctttgaagaatttaggaataatttgtgaatgccatgacattttaaagtgggattagcaagtcttattactgaactaacctctcactcttagatcaagaattaaatatttactctgcatttagaattacaaatccaaactttcagggctcatacaagaattttatatattaagatatacatgctcgaagttttagataattaaaagtgtattaaggaatgcacaaagcaagattgttgaatttataaaatcttgttttaattgaaatattaaaatagataattattattacacagttgctcttaattctaaagtcagtctgttctcaatatattaatacataaagactacaaatacttctccaagtaggcagtggggaaaaagggatatgcgtcattattttaaagaaattcactaagggatcaaatcaccaagttctgttcagttacaataccatcttttgggatactcttccaagctttccagagatgccatatccaccttttttcttttgacaagagaagggaaaggtaatgcctcaacatatgtctatttctagtgaaaagaccacccagtggattctgccagagtctaccaatgtttgacaaaatacattgtcagaagataagaaatagagcatgatgaagagacagtcctgttctcgggcatcccagccgtctggggccctgtaaaaagtctaggacagctctcagcctttcatttccattgcacctcctcacacgtacctggaaacttttctctacctccaaattacagtgacttggggaaacacacgtgtgtgatgtattacacggtacaagtacttgttaccctctctctacaataaaaattaacaagttaccactccagctaccttaaaggtgaggcagtaagaatggaatccaagctgcatagtaagatgctcagcaaagatcaatcagacacaacccgcctcaacctaaaatacgtgaagctctttgtaatcggttgtaaaacacgagagggacttagaatctcagttgcaggctcataaattcgtaatttttgaaacgcccagctcaggatattttgtgtgtgtttccaaccccatccagagtttcccgatcaagtttcagccgtgatccaccactccccacgctacccctcgccccgcactctccctccttcactccttttcaacttggctccctgatcgctgcagaagccttctgtcccctgcctgccccggaaagcggtgacatcccggggctttccgctcgctggaagccccccaggatcctgttaagacgcccccgcagaagacgcggggcctcgccacacatcgggggccgaagaggacctggcgggctcccctccccgcccccactgggcgcccagcctccggactgccttcctcagggaccccggggctccccagtacgggggcgcggcgcctggctccccgggcgagaggcgccggcgaagttcccacctgagccggcggccggaggtggctggcgcgagggcggggcggggacggggaggccggaccgtggagagaatccgcgcgctgagaagatgtccccgcgtccgccgcctcccggggccacgcgccgtcccagctcgcgcccgccagctcccggcgccgcggcccggcactaggaccccataaaggaaggagggcgcgccggcggcggcgccgcacttaccgcgctcggctcgcccgcgccgccggctcgctccccggcagcagccgccgcgtccgcccgagccgcgcgcacaccgcgccgggccaaattcaaaggagccgggcgcgggggaggggggccccgccgagggagcggggagcgggcgccggcggggcgggggcggggagggggcgcgagtgttacaacttccttccctgcccgcccccggccgcgcggcccggggacgcgggaggggagggcgcccgcgcgccaatgagttcactttctttctctcccccgcgctccccctctccccgcccgccggcccctccagcctcctccaaggcggcggaccaggccgggccggagttttcggggttcagcccgcgagcgggaggaccggggaggcgagggaggaggaaggcgagaagggccaggtgaggaggcccgcgggacgcccggccagggagcggcatccaggaccgtaattgtgcggcgggggacgcgcc

SEQ ID NO: 33089 - DNA, 2300 bp, Homo sapien
cacacatgttctctgtttttctctaacaaaaaagacatgccttcatcccttcttctgttcagtggtgccccctctacctgggccctgtgtggcattcccctctgcttcctctggatccttggctccattaatttttttccacattctcctatcttcagtcgcttccttttccctttcttttttctttctttttttttttttttttgtgaggcggagtcttactctgttgctctgttgctatgctgcgatcttggctcactgcaacctccgcctctcaggttcaggcctcctgcctcagcctcctgagtagctgggactacaggcatgtgccaccatgcccagctaatttttgtatttttagtagagacgggttttcccatgttggtcaggctggtcttgaactcctgacctcgtgatccacctgcctcggcctcccaaagtgctgggattacaggcatgagccactgggcccggctttccttttccctttctttttccagacaggtaaaatgcacaaggcttgaccgttcttttaaaaacgcttctccactgaaatgactctccgtggtcacaaataacctctttattcctgaagccagtggacccttttcagttttgctctcatctgttttctccactgtcagccacatgccttttccaccaatttgccttctttttttttttcctctctctttttttttttttattttactttaagttctagggtacatgtgcacaaggtgcaggtttgttacatatatatacatgtgcacaaggtgcaggtttgttacatatatatacatgtgccatgttggtgtgctgcacccaataactcgtcatttacattaggtatatctcctaatgctatccctccccacttcccccaccccatgacaggccccggtgtgtaatgttccccttcctgtgtccaagtgttctcattgttcagttcccacctatgagtgagaacatgcggtgtttgtttttttttccttgcaatagtttgctgagaatgatggtttccagcttcatccacatccctacaaaggacatgaactcatccttttttatgactgcatagtattccatggtgtatatgtgccacattttcttaatccagtcaatttgccttcttaaaacttcttggtggcccagcacggtggctcatgcttataaccccagccctttgggaggctgaggtgggtgaattgcttgagcccaggagtttgagaccagcctgggcaacatggtgaaaacccgtctctacaaaaaatacaaaaattaacccgatgtggtggcacttgcctgtggttccagctacctgggagactgaggtgggagaatcacctgagcctgggaagtcgaggttgcattgagctgagattgcgccagtgcactccagcctgggtgacagactgaggccctgtctcaaacaataaaacttactggttttcctgcctgattgctttctctgaactgtaccctagatcttcctaccgtggtggttcagatgagagatgatggtagcctgtatgtgggtagtgcttatcagagatggaaataaaattgacaagagttgataatgtattagaagcggaggctaagagagaggtaagcaagataatcactaggtttctgacttgcataattgggcggtgatgtcattcactgagattagaagcattccagggcgactatgtggtagagaggctacaatgaattcaactttagatgtattggagatgtgtttagaatgtcttaagggtaaatgtcacataggcttttatttatttatttatttgagacagagtttcgctcttgtcgctcaggctggagtgcagttgggtgatcttggcgcattgagacttccacctcccgggttcaagcaattcccctgcctcagcctcctgagtagctgggattacaggcatgcaccaccacgcccagataatttttgtatttttagtagaggcggggtttcaccatgttggccaggctggtcatgatttcctgacctcaagtgatccgcccacctcggcctctcaaagtgctgtgattacaggcatgagccatcgcacctggccatgaaggcttttagatgggtctggagcttggaggagaagtctgaactaaggataaactaaaggtaagttgctgagtcatctgtagagaggtgggaattgagggcacggatgagacagcctagaagaaaaggaggagaagatgagaagagagtatcgaggtattggaaactggggagggcagacaagtctaaaaaggagactggaaaaaagtagttg

SEQ ID NO: 33090 - DNA, 2300 bp, Homo sapien
agttacaaaattttaccccactatattaacaatcacattttatacttttaattcttttttaaactctccagtcaccaatgttcatgtctaattttactacaacaaaacttaggtttaatgatgacccattcataagaataatcaggcacgtttactgttactgccatcctttcagaacccctccattgtttaactgtttagatcaaagatgtaaaggcatcttgttacatgtttctaatctaacaataactaagtaaagcccatggcgttctccatggtgcttgagatggtcacatcagggtcacaagagaggtggagtagggtgggaggaatgaccccacttggagcaaagtgctcttgagttcacaagccaaccccaccattaccagatgtctgagagcctgctaccctcctcaagattcagattccttcacctgtaaagtgcaaatgttaaagccttcctacgagggttcctatgaggaaccagcacggagtaaggattcaacagtagttgttgctacatgaatgttaaatcagagaagactgtacagggttatcttgtggtctaactaaaacaaggttgctggcaacatggatggaactggagctcattgtgtgaagtgaaataagccaggcacagaaagtcaaatactgcatgttcttgcttatatgtgggagctaaaaaagtgaatgagcagaaagaggagaatgatggttctcagcaaactaacacaagaacagaaaaccaaacgccgcatgttctcactcataagtgggagttgaacagtgaggacacatggacacagggaggggaacatcaccccagggcctgtcagggtgtcaggggctaggggagggatagcattaggagaaatacctaatgtagatgatggattgatgggtgcagcaaaccaccatggcacgtgtatacctatgtaacaaaccagcacattctgcacatgtaccccagaacttaaaataaaatttaaaaaaaagaaagagtagaatgatggataccagaggccgggagggcactcaaaatacgtacgactattatatatcaattatgaatttaatgcattaaaaataagcctgctggattggaaatgtcagttcatgtagattttatgtttgtatccccaaactgcctaaactcatcaaacttttgatcagtcagtagaattaaataaatttggaaaccatattgcccaataagggaaaaaaatggtccctgatgtttgaatccagccctgtgtggcgaatagtttgcgtcctccttgtaaatgctatgcatgggagacttctaccatttggacctgtcaggaacttctttctaacattgtatttgttagagcaaaggaagacagattgaagagaaaaaaaaaaagagagaagcagccaccctttatctttctgactatttttcctcgtcctccccccagtatgacttcgtggagctcctggatggcagcaggctgattgccagagagcagcggagcctgcttgagacggagagagccgggcggcaggcgagatccgtcagccttcatgaggccggctttatccagtacttggattctggaatctggcatctggctttttataatgatgggaaaaatgcagagcaggtgtcttttaataccattgttataggtaagaatagtcttcaaagcagcattttccaggctatagcctaaacgccgtgtttaataaaaactaaattatctgtaccaatttggggtaattcctagggtgttaaagcccaggtaaaatgtgagaattatttttaaacctttatttgggaatatgtgacaaactgtgaagcactgggagaaaatattttctggaattaccttgggagaggagaatatgtcatgaaacactttgaaaatctgcatttgaagtgacagtgctttgctttactactcaaattatctagcataaatgaagatcaaagtgataccgtttatcttttgcaagaggcaggctatacaacaagtgttccttctttcctttttcttcagagtctgtggtggaatgtccccgaaattgccatggaaatggagaatgcgtttctggaacttgccattgttttccaggatttctgggtccggattgttcaagaggtatgcaagttagattcttctcttaagccgatataaataagctgtagaaacacaagtgattccaaaaactaccgagacaggaaagaaagggggggggagactggcatattgcttgttccagcgatgtgtcttttctttcggaagctcggtggaaagtgtggctgtaattcttct

SEQ ID NO: 33091 - DNA, 2300 bp, Homo sapien
gactacaggctcacactgccacacccagtttttttgtgtgttttttagtagagacagggtttcaccgtgttgcccaggctggtctcgaactcctgagctcaggcagtccgcctgcctcggcctcgcaaagtgctaggattgcaggcgtgagccaccatgccctgcctccttactgaatttttaatttatttgtattataaatgcctgtgttggttttttctaacgtgtttgcaatctgcagtcctacctgctacctgtcacccgtgttgtcactggggttaaataactgagtttaataatgggcctaatagttaatcaaaagtaaccatttttgaaaaattagtaatacttgcttctctcaaatacaggaatggcagttgataagaatggattaatctactttgttgatggaaccatgattaggaaagttgaccaaaatggaatcatatcaactcttctgggctctaacgatttgacttcagccagacctttaacttgtgacaccagcatgcacatcagccaggtagttaaatactaagcggacttgtttgtttttcctctaggtgacttgacttattcagtcggtagactatgatggcaccatattaaactgcatatatcatgtgttgcagtggttctgatagggcagttccatttacatgtatcacaggagctaataaaaagttattttcttctataattctacatttgatgaattcagtgagatacagaacaattatcactaagaaatgctaagcatttgtaataaaataccagtaaagtaggagcatgcaggtattctaaaaagaaccaaacaactgaaatctctaatcttttgattgcatgagctccttaagtagtagagagaacccactatgattagtgccaagggacttatatttagaaatagaaactttactgttggcctgattgaaaacacaatagaatactaatctattcataacctagaaagccccaacatttggtggttattgctgccataaggaacatgtgtgttcatagctcatcgatatctgttgactcactacgtagaggcctatttgctatttgcctgtaactagcaaatctttctgtgagctgaattttaaaataaagtgttatttcctgtatctatcttcattcattactttttggtttattttactgaggctattgaaaaaactattatcagacagtttatctcagattaatgccaatttccctgaatggtctaatttactcttctggcgaattaactgtagtgcagtaacttactaaccaggccatttctttttttattaaggtacgtctggaatggcccactgacctagccattaaccctatggataactccatttatgtcctggataataatgtagttttacagatcactgaaaatcgtcaagttcgcattgctgctggacggcccatgcactgtcaggttcccggagtggaatatcctgtggggaagcacgcggtgcagacaacactggaatcagccactgccattgctgtgtcctacagtggggtcctgtacattactgaaactgatgagaagaaaattaaccggataaggcaggtcacaacagatggagaaatctccttagtggccggaataccttcagagtgtgactgcaaaaatgatgccaactgtgactgttaccagagtggagatggctacgccaaggatgccaaactcagtgccccatcctccctggctgcttctccagatggtacactgtatattgcagatctagggaatatccggatccgggctgtgtcaaagaataagcctttacttaactctatgaacttctatgaagttgcgtctccaactgatcaagaactctacatctttgacatcaatggtactcaccaatatactgtaagtttagtcactggtgattacctttacaattttagctacagcaatgacaatgatattactgctgtgacagacagcaatggcaacacccttagaattagacgggacccaaatcgcatgccagttcgagtggtgtctcctgataaccaagtgatatggttgacaataggaacaaatggatgtttgaaaagcatgactgctcaaggactggaattagttttgtttacttaccatggcaatagtggccttttagccactaaaagtgatgaaactggatggacaacgttttttgagtaagtatatgaaaattctactctgattataaaatactgtgatataataatatcatctataataacaatataatcttaagagctggaggattccatgtttttgagagtctagagcttctgta

SEQ ID NO: 33092 - DNA, 2300 bp, Homo sapien
tctaatttaccattatgaagtatgtcaatcactgagaaataagaaagtctttaaaaggttcttattttattaatttgttgaagatgtctgaagatactaaaaggattttttacatatgcaaatacatacatgcacgtaaacatactgtactgtactgccaccgagggagtaagtcagtaaatctttaagaactgatgtaacagtgaattaaatctactttgtagaaaatatgaaggaatactaaggaatttaatatcagcaaacatgttccctttgaaacagcaaattagatgtgcaggaggattttggtcacacttcaaagaatcatgtgctgagatggagagctggtctgtttactcgtgttctcaccggtgaggtttttctatgttaaacgggtttttgattacttcaaagcatgtttgaagtcttcactctgcatcgctcatccacgaagacaaatagtcctccaaatttgtgcaactaatattgctacacattatatttataagtcagaagaaactgcagtttcctatttaacaccaagttaatgcctcttgtatttagctatgacagtgaaggtcgtctgacaaatgttacgtttccaactggagtggtcacaaacctgcatggggacatggacaaggctatcacagtggacattgagtcatctagccgagaagaagatgtcagcatcacttcaaatctgtcctcgatcgattctttctacaccatggttcaaggtaaacacgaaagcatcattttaaacaagtaccaccagcacccagacagaatgcggcaacacccactttccaaggtgaaccagaaaagggaaggtgaaaatgtaaacctctagaaatattggtgacataatctacagtgtacatgtaatatttatttacttgtatagacatattttaaaaccacatataagataatctgtcatccttggaatagtgtctgtttccattcccatgtattaaaacaacttcattccagcccttcacatgcatcatcaggcgatttttgcatcacctaagagttttccagagcaggtcttctgaccgccatctaagtacagtagtttgagacacagcactttttgaggccatatgtgatgcagtattttaatctgcatgtcatggaaattttatcccaaattccaactacacattcatgtaatgcctggagtgtccattttttcattccatctatagtcatatagatgccatatctccataatggaccctccttgccatattcctttctaaatttgaaaaagcctgtctacaatgacatttgtaattgtgagttcacaactctaagaataattactaaatctgtattcaactttttgactcattttttttacctgttccatgaagtaatctctaaccatctaaaactgctattgcttgaattcattccttccccaaatggtcctatattatttcaaaattttaaactgaggcagtagtctacaatatgagcttttttgtataaaatataaaatgtcttcctttattgaagtcaatttcggagggaacattgctttctatttttggtattcaagatatagatattaatcctttcaaaggatctttgacagaagatgcagggattgggtgcaggggagggaagtcttccaagaccttggaggtgtgtacaccgcgctcctgagagatcacatatgtgcctctttacaaaatatttacttagtgcacatcccatggaagctgagctctcatttcatcaggcaaatgagaaaaagaagtctattaaactgcagaaggacttcaaattcccctaaagtttgcctttaatatttagccaaacctctgacagcatgaaatgccaaggatcaaagttgttttgtttctttctaaaaggacatcatcaggtactccttattcctagtcaacttttagaaatttagaacctatctcacggcacaaccggccaagtatttaatccatatctaatagttcatgttttgtgcttcttgttctttagatcagttaagaaacagctaccagattggttatgacggctccctcagaattatctacgccagtggcctggactcacactaccaaacagagccgcacgttctggctggcaccgctaatccgacggttgccaaaagaaacatgactttgcctggcgagaacggtcaaaacttggtggaatggagattccgaaaagagcaagcccaagggaaagtcaatgtctttggccgcaagctcagggtacgtacgtgttgtggagcaggagatagctgcagccctctgatctgtgcagat

SEQ ID NO: 33093 - DNA, 2300 bp, Homo sapien
ttacagagaagaataacagaaacatacaagcacaacccttaaaatgtatagtagtgatcataatggcactgggaaatgtttagagggagcccaggagcatatcattgagaagagccgctgtcacagaatgacaaaggcagtgaccaggatcacctgcatgcatccaggaggatcagaaaagacaacagacagatctttctcatcgtctctcccaaaacccatcaaatccacccagactatttcgatgttcttactgggataggtgcactaagccaaaacttactcatagcaaaacaagtaatattttacagaccaccatcaaatatgacttcagatgattccaaaagtaggtattcatgtgaattcggcaaagtccaagctttccttggaacaatgcaaactattaggaacaattctcaggacatttactacacaacctgcatgcaaaaattgcccctgggtctgcccaaagaggagattctacagaagctgaagtcaggcaaaggagaagtcccagcagggctcccaagctccacatcctccctgtgccaatgatgttccatttggcccagcgggttagaggaagcttcctcagagggaagagtcacccacagccctgtgttactgctgagcttgacttaaccagcctgggatgaccttctctcacatttgttggcctagtaactgtcatttgtctttcggcagtggctcatgaaatagagttcacttttaatacatttactcatttcataatttagcaccaaagcagtatgtagtccagaaaccatccttattgctcctgagatacaaatcggatttggtatccacagaaagaaaaggagattttattgtcagtacggatgccttgtaacaatttgcctgtatgtgtatatataatatttctattaagggcatttatagctctcattcaccatgtgattaatttcacaatattttttggtgtcgatgctttgtatacactttatccatttttggctaattttatgtctttatacaataatattgtgactgctttgcccctcccccaagtacactagaaattaaacatgatttgagtggttcttcactcagatgagggggggaaagccaccttactaaataattgctaattatggatagaactgcattccccatatgctcttttctcctcaaaatattgtctgtaaagcagctttgatcatgcctgtattatgactaatccagatccattgacaaatctgctggttggctatgaatgtctgggaaaataatggtactgtcgtgacaggcagcacattgtgaatctcgagccactaattgcagaacccctcacaattaagcatccaagcaaattaggcagagaaacgttaacaacacgcaaggtcaaggataactcaattaaaatgaaaatcattttctctagtggaatgtttctgtgcatctgtggtcactaaatctgcttttgcatctcccgttcacaaacactgagtaacagtatgttctctctttacagtccatggttcttctgcttcatagccagcggcagtacatcttcgaatacgatatgtgggaccgcctgtctgccatcaccatgcccagtgtggctcgccacaccatgcagaccatccgatccattggctactaccgcaacatatacaaccccccggaaagcaacgcctccatcatcacggactacaacgaggaagggctgcttctacaaacagctttcttgggtacaagtcggagggtcttattcaaatacagaaggcagactaggctctcagaaattttatatgatagcacaagagtcagttttacctatgatgaaacagcaggagtcctaaagacagtaaacctccagagtgatggttttatttgcaccattagatacaggcaaattggtcccctgattgacaggcagattttccgctttagtgaagatgggatggtaaatgcaagatttgactatagctatgacaacagctttcgagtgaccagcatgcagggtgtgatcaatgaaacgccactgcctattgatctgtatcagtttgatgacatttctggcaaagttgagcagtttggaaagtttggagttatatattatgatattaaccagatcatttctacagctgtaatgacctatacgaagcactttgatgctcatggccgtatcaaggagattcaatatgagatattcaggtcgctcatgtactggattacaattcagtatgataacatgggtcgggtaaccaagagagagattaaaatagggccctttgccaacaccaccaaatatgctt

SEQ ID NO: 33094 - DNA, 2300 bp, Homo sapien
cctacctaaggcacactgaaatattaatatattccaggttatgctctagactagacatagatagcacgaaaccccataaacaaaagggccaagacagtagtccttaggaatgtgctgattgggttcaacctgtgtgaggccctcaaggaaggccaatctagatagggctgaacacatacctaacctctgtatctgtagtaggtggagaaagatcctcaattataagcccaaatacaaggtattagcaagagagatttaacacctacagtcacacttggagttacaaggtgttaatgagaaagacataccaaggaatatatttctcccccctttggccgcgtggcttcactattggtgtacaatatttgaaacctcaagttgtgaaactctgaaccaggagggtttcctgtattatgaatgatgtcatctttaagatgagggactttcagtgaaatgcgggaacattcagggtaatgtgttttcagcaagcaggagcttgaatttatggcagaggggagtgtgtgagttgaccaaaatggagagtgatgagaagtaactaaattatgtatgacagtctttaccgagcagaggaaggaagaaagcttaatgatgttgtggttgaaggagcagcagcaattggtgatgtatgggttgtaggttggtaagaagagaaatggatctatgaagacccaaagactgtagatgagtgtgacaaagaccaagcggtggatttgggaggaggagggaaaccaggggctcgggatatatgacacattttagcggcaacaagacagccatgtaaagtcaacttgaaattaaaaatcatcatcttaatctatgtggctctttcaagcctgagtcttatcaaggcaaaaaaaaaaaaaaaaaaatctatagttaacgatgaagtatttctcccttttgctttcccggcatccaccaagagcagtacataatttaattattgaatctacaagctggaccatgagatgaagaatgatgtgtctgctgtagtgagaaattagatagaaccaactgtttactctcatcattcttcctccgttaggctaaattaatatagttaacaagcttttgtttggaatagcagttcaaatctgggatgtgcagatcagaactggcgattattacagtagctgttatttatggagtgctgacagtcccctcaagtcccatgaatgaaacagaaaggggttcttctgtcattctctgtgctagaaccactgtaaggggctagacgtctgcacagggtaacgaagttcatgaaaaccagattaagttgcttggggcatacgactccagaaatgtcactgatggtctttcctattgccctgtttttctcatctttgaaacaactgcaacaaaatgtgcactatataagtgggcgagcattaccaggaggtaacatgcaggtggggtgcctgtgcggtgatacgggtcgagcagggcgcggcaggctttagcaaacacctcaggcccttccgcacaatttgagcagaaactgaaagcctgtcaggcgcagccaaatgcaaatctagcttcgaggcactgagcctcgaggcacagcgcccccgccggacccagttccctgccccatccagtgtgtgaaactgtgacccagccaccggccaagggtccccacggggacgctgcgacacagcgggctcactccagagacccaaaccaggtctccccacctcccgccccgccagtttcacggcactagattcttggggtcgtcttttaatcacaatctccatagccgtgtctctaagcagttgatggaacacggatggtggggaaaacctcaccaccgccaccaccaccaaaccaagcagcccccgacggtcgtgcagtcaggcccgggagcgcccaactcgcggccacccagcgccacgcgtgacccgggcagcggggcgacctcggggcggtctggcacccgggaagtagtttgtgctcgggctctgaacaccgccggccggaccgcgggctgcgtcacggggaccgggaggcgtacggcgacgcggagcagcgcctttgcggcgtgcgacccgcccccgccgtccctccctccctcccctcagggcttcgggcccccggggccagccgccgtcctgcgaacgcgcggcgcccgggccgctgcccccttccggccccgcggcggccccgcctcctcccccgacttccttccctgagcacggcggcggcggggacgagcaccggcctgcgcgcggagccggcaccggatggtgggcgggggccagccgtgcgggtacgcggcc

SEQ ID NO: 33095 - DNA, 2300 bp, Homo sapien
ggaagcagcctgttttacagcctcttgccctgcagcctgtgtggaatgcagtcgccttgctggttggaaccagcaactgacagaccccagcaacttatagatgaaccccagtgaagtttcttcatgccatgctaaagccctcctcccctagaggagctatagctttattatcataacctgtgacccatcatggcatgtagagggggggtctgggccactgggacccccccccccatacacatgccatgatgcacctctcccttctctatcactccatcaaaccctcctgtcactttcccttgggaagatacggctttggagaacacttcccgtgtgtgtcttacttgtgccaagtaacacaatgcctattgatcaaaatctgagttctcctggagagtcgtttgttactcaccaggcaaataagccccagtttttgggaggtaacattatgaaatattctgaagtagtcccatgaaagatttctactttccttttcaaattattgataaataaatgagcttgctttgggctatggagatagttttacatgaataaatcaattcctctgagcaggggcaccagtgtggagatacaggctgacacaccagctctcgcctgtccctgggtgggaggggctgggccggtgcctcccctggattgtttcctgtttaggcattgccagaggcgggatgagaagaaagggctgtggggatctgaggcttggaattccaagattgctcccaactaagctgtggtgcttagatggacacctgcacaccccgttatcctctggctggtcctacatgttcaaggacccttaaggggctctccacaacagactttcatctcttcttccgaattggcctgctctctgttcaattccctcaaggcagggatggatgactggcaaagttatccaagtgttacgtgagagaaagagaactatttcttttgtctgagtcctttgtctatctttttcttttcaagtattccctgtccttcaagagccaggtgaatgccacgtcctcttcagagccttcctggatgtcacagccgaccattgctggggctcagaaaaagctacctgaacatatggcgctctggcctgcagagtactttgaactggaggagattggaaggcttcagcaatggcctcagcactaagatctctctgaccttctcttgcccttgtgtctcgctcctctttctcccctaagcacagggaggggctgtccctgaactttccttgtctccttaaagatagatctaaaaaggaactcagtttctcctccagagacaagattcactgtatcataggagaagagactgggggtccgggccactcacagacatcgccataggctatcgcctgttcgtcttccccaaaaagcacttattctcccctaagcagcctacatgcccgatcccctcttctttatgaagaagtagataagcttgtcaatttcactgggttttgggtactcacttttgtttctcgtgctgctcccatccgtgtaataaatgtgcatgtttttttctcctgttcatctgcctactgtcctggagtcaattatgaaaactcagagagtagagagaaagtgttttctgtccctataggaggcagccgttgctctcatggcactcatcactgtctgcctggcgtcatgcgtaagtacccggttgcccctaaaagattgcaagctctgtgggagcggaaactgtgtctcattcatctcctgcaggcactcaggaaggaggaagaaatggatgaagcctcttatgtcctaaggcctgctaaggtgcttatgtaatcaaattttatcttatccttataatatgtgttgctttacctttgatcactgtaatgccacttatatagcatgttataatttataaagacattttcatatactttctttttaccaacattaatttccaacatccttccatgcgtgtgatattttggggacagtgtagctatctgttcttttgccccaaaattacaaccagcagatggctgcctccatccccacttagagatgttgcctggccgacagctctctgacttcacaaagaggtcatcagtcatcacagaaccacagaatcatgatgtgagggcggctcgcaccccagcgcgcacccaggcaccttagagtccccggctttggctcccctgggtcccctggttgtgcgccaggcaagatgttgagatgcacactggaaaaccggaacgctcaaaccaagcaactgcaagcagctgtctcaaatatggagaagcatttgggagaactgtgccaagt

SEQ ID NO: 33096 - DNA, 2300 bp, Homo sapien
ttcactccactttctatttactttacccagacattacatattcttgtaatcctttccggtaaacacaactgagataatatagtaaagcatgtaaaccgaagaagagaacctagaatgcctaaatatttcaagaatttattgttatttcaattacctgaaactccaagtatcagaaagcagaaagaattaccacacaactgtaaaagtcaaatatttatacaggtgccttaaaagccgcagttgggtgcacaccatcagcactgacatttactatctgttaagtagtttcaaagtgcaatagcataagtcaaataactggcttggagcgtgaagtttatgacaacaactagcacgtctggagacactgggaaggtgtgatgcctgtcacaattttcatcaggccagcaacaggcagccaggctgcggcaagaccgaacctcagcacaggtgccttttctcatttcaggagggaaacctaggcccgtagcttcacggataattgaacaaggattgttccataaatttataatgttatttataactttcttgtaattgccttttagtagctttcaaaaacaacatttttagggcaaaagtaactgagattataaagtagttaggtatttcagcttcaaattgagaaaagggaaaatgttaaataggagaagcacctaaaaagtatataaagcccaaagggccacattcaataaagttataattttcagaaatgacaaaagtccaaatgtcgaagttatccctggtggcacgttatttaaatttacaattaggaatatctccttaatggataatttacaaatttataattaggaatacctcctattattcttacaataattctaagaaattttaagggtaaaaaaaatatgggacacagaaacatttgtgaaccttcagttcctgaaccaatttaaaaaacaaaaaacaaagaaaccaggctaagctcaaatcagagtgcctcaatacccaacgttaatttcactacatctcccttccaaacacaatatgcctgttcccgatctgggagtcggttcaagttttcaggtgaagactaacgacagacagcgaaacccccaaacgcgcgtttttaaactctgaggggcaaagtcagtcacacccactagcagggcccggcggggggcgggagccccttcccagctcgggacctccggccagtctgggcgcccccgccaagagctcgcagcccaggctcccgcgccaaggacggcctgagggatgccacaggtggcccggagggctcgttccccaactggcagtgaggccctagcccacccccgccgcccagaggccgaaggtgtcctgcagcctccacgtgggcacctcgaagcctagggaagttcctaacagggctcaggtggcccctcgggtccgttagcctggcgcgcggcgtcggcccggggcagcgactccagccttgcctcggggccgggtccccggaggggcgtcgggaagccggtgggcggaggagcccgggtacgggcggctcctcggccccgccggagcagccagccccacatccctcccgggacccctcggggcaccgcgggccggcgccgccccagccccccgcgcggccgggtctccgggacaacagccgccgtgtccgaacgggcccgcgcccccgcggccggcgcccacctgtcccgggggtcgatccagctggtcctcctggtgttgtggtcaatgtagaagaccttgccgtcgtagtccctggcctcctcccagccccggggcagcggcagctgaccgctcccggccctcctaggcatggtcggcggcctcgccggcgagcggcgcctccataggtaccgggcgcgggacgcggcgggaacgcggctgccgggctaggctgccaacccgcgacgcgggcgccggcgaggggctgaggggcgcagggcgcggggcgcggcggaaccacgcgcgggaggtgcctcaggaaacgctgttcgcggccccgctgcggatcagtccaccatgtctgcgtcggagccggcgagcgaaccctcctccccctcgccgccgctgcctccgcctcttcctcctcctccgccccgtccccctctggccgccgagggtcgcggcgcccaggctgccggagccgccgccgtctgggctcggatccgggaagctgcggcgctgccgcggcagcggcgggcccctcatttgcatgcgattagcatgcgcccgcccgcctcatctgcatgcgcattcctcgcgccgcattcctgagcttaaccccgccgctgccggcgtcgccgcac

SEQ ID NO: 33097 - DNA, 2300 bp, Homo sapien
gctctaggttgtatagtgagtaagtggcagaataaagatttgagcccagatctctttgatgccaaatttcaagctcttaacttctaagccggtggttcccgcactttagtgtggagcagaattacctggaaagcatacattgctgggacttagagtttctgattctacaatagggctcaagaatttgtattatttctattatttttttttaatcattttagtttttttttagagacagggtcttgctctgttgcccaggctggaattcagtggtgcgatcatggctcactgcagccttgaactcctgggctcaggtgatgctcccatcttggcttcccagagtgcggagattacaggcatgagccacaatgcctggctaattttttatttttttagagacagggtctcactgtgtcgcccaggctggtcttgaactcctggtctcagccatcctcctgcctcagcctcccaaagtgttggaattacaggcgtgagccacggtgcccaaccagaatttgtatttgtaacaaggtcccagatgtttatgctgctgtttctgggaactatattctaagaaccacagttctatgctgtgctgcctgacttgattcctctgagggataaatgagagaattcacatgtgcttgtgttaataatcactgacatttattgactacttataatgtcctggatgctcttccaagttaattcctttttatcctgagtttattttaggagctagttaaattgcagggagagtacgtgaggttatactcactacttcaaagagaaggaaactgaagtaggaagaggtgcccagtaagtggtctcacagtgagtcagtggtagagcaggttaccctcattattgcttctgtctgctgagctggtttggaaggccagtgtcttctttggagccatctccagaaggagagatttcgtgctataggaaggttgaaagaaaagtagacccttcctttcatctactggtgttttttgtccttggaggactattgcagagcaggcctggaaaaaaagaattttcctcctttttatatcattcttgagcattctgaagggtggatgatgtactttgttattctgatgaatgatgtgattctgaaaatgacctatatttcagttgaactgtgagatctttggataaaagggattccaggagattttgtatgtaagaaccatgctagtggtgctagtgcattaaattagaaaatgtgttgactgatggtggccacactccagcaaggcatctgtggtgttaacctgcccatggccgctccagtagccaaggaaaatctcaaaagcaaaatgcaagagagtgagaaaaaaaaaatctattgtaattaagtctgaaacctgtactctgcttaggaaactgtgtggtttcttcattagttttaaagagaaaaatcctacagagaaagcgtcttaaagaaaaaaatggtcttaagagagagtataaagcaatttcagaaggtgagatcacattgatatatgaatgaatacttggtgtatttggttcagttaaaaattttgttgagtgactgttatgtacaagatacttataaaaaaaatttgtccttcctctcaaggagaacttatagtagccttcacagttgaatgtttagttaatttataaatgggcatccagtctgaaattagtgtaacctgatgtggatcttgtctccatgctactgataggattttcatgataccagtatttgaatcttgggacacatttttctttttaatggggtatctgtttcactgcagagctagagctagatcccaagcttcctcactctcagcttggcgttctccctgatttaggatgcctttatttatttagtgtatagatttatctccaaatattaagcagtgaactttcaaaagggtattacgacttgtcctacttttttggatatatacatctgtattttatccttggtttttttttttctttaagattttaaatgcaacctagacacttgtggttagggtgctgaattttgacatatgcggtttgacggaaagaatcactggtgtgtcaattctggtttgttgtaggttaacgaagcccttgtcatttgctgattgtgttggggatgagctgccgtggggatgggaagcagggtttgaccctcagattggtgtctactacatcgatcacatcaacagtaagttttcctttttggtaaaagcaaacatatcagaaaagtaatcccccaaaacctacagtcacacaaaagaataaacatgttacaaagtgaatttccaaaaccc

SEQ ID NO: 33098 - DNA, 2300 bp, Homo sapien
aagcagtggttgcactgtgcccgtccgactcaggccattttgttgatcacccagggcttctcttggcctcaaaaggacccagccttcacagcctgaatcactttagcttagagtcatcccttatccctagaggccaggttaaacacccacagaaccagtctggtctctggaaattcctgtgggccaagtcagatgccctctgacttattaacgaacaaataacaaataaatatagcagattattctctaggttttgacttgctgtagctcttggggccaaccagaaatacttcgttgggctgcattaagattgagattaccaggcaaagctttttgaagacagtatatgcccctgggcattccagaaaattgatagtatttctattctaatctatcaggaacaggttcttacgttcatatagtggccagccccatggcccatcttgttttgattatacccaggatttaatttatagaggtgactgagtgatgatgggaagaggtcagtgccattgaaagaagttttattatagttctcaagggaagggggcatactacaccattctgggccacatagtggggaagcgcttgggttggttggaaggcagaaggagcagaggagaaatcatggcccagagcctgtattgtggtttcctggggaaggaatgagtgaggcagggtaggcaaatctgagcaagtttaggattggctaggttgaataatttcggcagactctgggttatgggaatggtctctagttgtccagtatcttctctggggggtggtgtagggcaggggaaatattggtttggagtctgagttagataaaagaggaggttagggatatgggcttttggactgttggtttacatatgaaggatgggctcatgggagtcatttgctatctctaagaattaaattagccctgggaggggcagtctcttcccagacagcaaggcccccaagacatcaaagcatcataaaatatataaaattttaaaaaatgatcaatacaccatccactgacaaatggaaagtgcaacattatgtgtcatactaagaaactttgagaagaaatattttcttgattgtttttcggtctcatctgctgatctgcccctgacatcttgtataaatacatatgtggtggagtgtgcaaattccactaaaggaagagggagcagagtggatataattttataatttattaagttacaagtctcttttttctccggtgttgctgccatgtgcacagattgaggggaagtgttgagcatatgtatatataattcatttgttacagctgactctatcccattttcatcagctggttcaagccagggtaggttaacatgggtgcagagtgatctgtggagccttagttctagacacagatgctctctggagtcaaggctggggaaaggaatgtgactttataatttctttgcttttgcaatctgagtatcagagacagtgttatagcttactagcgttaaaggctttttatattttgcagtatctcatttaatcttccaaacagccccctgaattagctccattttattaaggaggaaattgaaccctggaaaggtttaagaacctgctcaaggtcacacaatttgtaaatgacacacctgaatttgaacccagttagactgaatacagggtttatgatcttaactactgggatattacatctcagttcttttttccagtattcgtattcttataacttcctcaggactcaaaataattcatttgctttttttttttttttaaactttcattatgacctgagtctcagtattctcaatgtacattccaatatggaatcattttaattattcaggtattaggtggaaggaagagttatccctccttttcctgtttagtttttcacaatgcgggtacctcagcccttctgaggtacccgcattatcacccaggtggtagtgctaccatatcattttgtttttttcttcttcctcctgcacctctgtacctcctcatccccttctagtaataagtgctgaggttcttattggaacactttccttttatatgttccatagtccttctgtatccactcctttcatttccagtgtggcctgggctgactaatgtacactctctacacccctaagaaaggggttgtggaactctgagtgggctgtggaagtattttcaggtatgatatgacatcaagggcttaaaatctaagagtactgttactaatggtacacaaaaatgattttattgagtcagttaggctgtgccttaatctaattttgtttttacaa

SEQ ID NO: 33099 - DNA, 2300 bp, Homo sapien
aacataaaatgtttagggtaatctgattctttcatttttgtttttcttcatgttttgtggcccctactgtagcttcaccacacagtaaagaatgtgtttggagtttataaactgagcataagctgccatggaagacagaggataaagggctgacttgcagatgaggtggctggggcaccttctggaggaggcagcatgtgaatgctgttgcagaacactggttcttgggctcggctgctcaatggaatcacctgagcagctttgaaatctaccgtgcctgggttgcatccacagaaactctagttggtctgggttttttttttttaaaagggtctctggttgattgtagtttgtggaagtgcagaagcaagaaccagggccttaggctagagcattctgtataaacaggaccagggttctgtttgtttgtttatttttaaatttcagatccactgcggactcactgatatttttgtaaaatacaagaaaaagtgaattactggaaaagtgaaaatgtatacacacaaagaaatgcatagtatttatcaacagataaacaataactgactaaaatcgctataatgattacaaaatgttttctatttctgtcattactgttgcggacataaaactgagttcatggactggtgttggtctgcagagtagaccaactttgattagtgctgatgcagagggcagtgtgtctacagtcctgtattaggtgaatgaaggtgggttgggtccagcttatgcagggcattgagtgctggaatgaatagcttggcttttattctgtaggcactggggagccacagaattcttgaatgatctgattgacaacattgtgtgtggtagatttatagtgagaatacactgttgatcagaacctggaagaggaaggaagttgatgagactgggtaaaataaaactaaaatttctggagaagtcactccagcacagctaaataaactccttagaggatacaagaacttaagctagcctactccctaaagcttaaacaagccggaaaacaaagttaaattctaaaaagtaccctccacctaatgttttcagaaaccacgcagatagaagatccaagaaaacaatggaggggggaacaggagaagatgctcaaggactacctctctgtggcacaggatgccctccggacacagaaggaactgtaccatgtgaaggagcagaggctggcgctggccctggatgaatacgtgcgattaaatgatgcctataaggaaaagtcaagttctcacacaagctgtaagtacagtgtggctattcagactttggaagtggagactgaattgtagataacagaagaccacttacatttctatggagtttaattttgagtccttttccctcctaagcaggaagagtctctcaaaaccattgagaggtgagggcacaccccagattttctcacccctacttcagataaaagaatccctgtttgggggttatgcatgccttctgtttctgcacctgcctctgccaggttgccttttatgcatttacgagttaatttttaccttttcagaacagtgcaagtagtttggccctttttgctacttttgtacaatatttttagtggggaggaactggaactattacctagagtgtaatttctgttgaccatctgagttgatttactgctccctcatctcacagattgactatttggagctggctttgtttaaagaagcagctgtgatgagctcagaagttctgcttaaattataaattccttgataatgcaaaactctgatatactgctgcagtatagtcctctgaggacatagtgtgtataaaatccagaagaaaattaagcaccaaggtcttaatgacatttctctttacagagttaaaaaaaatggtagaggtttgaagataactttttatatttaggtgtctgatcaatggcaataaaggaattagaaagcaagtattcacagaagcacataaatcttgtttttagcttcagtaaattctaagctgagaactagttatgcaacttgtaaataattagtttttcttttttctctataaaagtattctcaggatcttcatccagtactaaatatgatcccgatattttaaaagctgagatctccactacaagattaagggtaagaagttttaaattgtggttctatgttgacccatatgcatagagtctgaaggctgtggaaggggctttagtgatcagttctcatctccatttggtgtagaaaactcctccccttatctctgatgagtggtccttctaccttgatgtgaac

SEQ ID NO: 33100 - DNA, 2300 bp, Homo sapien
ttcactcaatatattagtctcttttgaaagataaaatatgttcacttgcattccttctctggaaagtgtataccttgagaaccaaattttcacagaatctgtatatgcctgtgacttgctgtttcatcactagcctgttttccaattctgaatgcacactggaggcagcaaatggaaacaggcatcttcctggtatccatttacacatatactacactgctgcttaggccgaagtcaaatttgggaccacaaactgaaatgaataacgtagagaacaatgccacatttgtctacccagtataaaactattgtaccaagtaaaatgaaagctcaagtttaaattacattataattccagattcaacaaatatattccattctattgtaaataaaagttacaaagcctacaatcagattctatttaaatcttttcctgaaatatattttctgtcatgccacaaatataagtccctttatagtatcaagaatgtggtttcttaaaaagtctggctgctgggtttgattgttgatcattcagtgttttagtagtatggtggttaacatttgaataagaacagctttattttgtctatagttaagataaacaggagaggtctctgatgttagatatcatatctttctgctctcggttcaagggattagaatcattccaagagaatgcctgaatttctacaacaaatgtctattgttttcttgtggaatgttattgacagattcttaaacatgccttagattcctataaaaattgcttgcaagcaaactgctttgaaacaatacagcattgttacatcaatataacaaagacagcaagtttggctaacctttaatcccaaatggtgacgcgagttataatttcatgtgccttaaaaatgtggaacatatggctaaacacgttacggcactcttcaaactctgttttctctccccacccccaccacgaagccctgctttatgctgataaacaattactaaataatgcatttatgtcattctagttctgcctggtttatcggggagctctgcaaccagctgaggttcttacaacagggctggacttgagaagcacttgggatctcataaaatatacctggcatagagactagaaacattatttttctaagcactctccagattattctaatatgcagtcaggtttgagaaccactaggatgggagcatctgaaggagtatcagggtcatgattctatgcggtaagcaggaaaaaaggagtctggatgataacagcacgtgtgaaattaaagtcatgcgtctgactggtggtcaagagcagtgcctgcgtatcccaagatatgactaatcacccaaacaagaacaaccagtttgtttatctggccagtgacacacaggatctttaaaggggcttgctgcttggagcatcccaaataagagcagaaggtaaagtaagattccacagggaaaaggaacacagctgggtactttccacagaggtggcgcctgagaccagcttggcattcctgaggtgctaccacgggagatgccgggaagaacacgaaacctgcctgaacacaaaactgaccagggacatccctaaaaatactgcaccgcacttggaggcaccaagcaggagggaagttttaactcctctccgtggtcatgtggctgtgaaaaccatggactgcttctctcccatgagaggccctgtggagtggagactgcaggattagaaagtctcaggtgtgcctgtcacggtttggataggctgggcctcagcagcagggagaacagtggctttcaggggccgggaatgcggaagggatatcctcatcctgtgaccctctgtcacctccatttccactttacctggcccagcttagggctctgctaacggcccagccaacttcagtagcaaacgggaaaggtagaggaaccaggaagtgaggagcgcactcccgctcctttgctaataatcctaacttgctcttgctcccctgccatctgtcagggttagactctaggtcatccctggggctggcagagagagagagagagacagacacgcctccacccaagggcccagggcagctgcaggctcacacaggggtcaagtacagccagcccagccgaatgtggagaggaatttcttgtgcctagtctcttagctctgtaccacaatctcagaggaggccagcaagggtccaggagataaaggtaagacaaaggcttttcactttggtttctttggatctccaatgattaataaaaactttggatcttttcaagtgcatagatctttccca

SEQ ID NO: 33101 - DNA, 2300 bp, Homo sapien
ccttttgagagggctgatgtctgcaatttcttctaacccctggttatggggaagttggggagagcatttcacatgaaatacacgtggattctgaggaagacttcaggctttcgctaggagaggctttggtgataacatcagagacaaactgcggcccactaggagggtttctgtgcctctccccagtgccttcctcatgcttctcccagggaaggtttcatctcaacaccagcaagaacggagggactggccagggcaccctgtgctgcagggagaaagggctgatgtctgcattctgggattgtaggagctaagtgggaaacgtgaacaagaacacaaagacaggcatctgtggttcaaagcagacattaaagggctggaagagcagctgccgagcatcacctggagaaggctgaggacgctccctagtgatggagaagggacagcactgaaagtgtggctcagggtcacattctgacgtcatcctggtgcctcctgaaagcattagaaaaaggcttcattttaataaaagcaatattgagttttaaaacttccttccgaagtgtttctcttgtttcagaagacatggattttagtagagtttggggctttcttcagacctttgtgcacttttaattcagttagtctacttcatattacttttttcctcgttgagtttttatttatatttgaaagatttttaaaatgaccgctgcttttaaaaatacacctttgaaagccatgaattaagaatttatcgcgcttttgaagtattaaagaaaatggcaagaattactttttttagtttaacatataatggaatagtgttgttgacacatcaaagggatagatacctataaataaaatatgggcatgtttccttactgccaaaaacatatataacatttcaaagagattagaaattaaggaaattttatttttctccaaagaaaagtggctagtttttatatcaccacttttcagggcatgctgaggctttgaacaagtcagatttgtttttcttctctgtcaagcactttctcatacattactccattgatccctttaacagccttaccagggagacacaggggaattatagtcaccattttacagatgagaaaagtaagacccttgattcagcgacttaccaaggatatgcagctagtaagctgcaaatcaagattagaaacccaggtgccctttttctgaattccattctgctgcttactgctctgaactactttatttcatgatgtctaaagaccttcacacgacatagactatacttgcacagactcttagttgcataaacccctgggtacttggtatattttaaaatgacttactattcaagtatacagttctataatgctgtactcttaaaaaaaagaaaaacttttgcagttgaatgtggatgaaattttatgatagtccgacgcggatgatgagatgtgctgtagctcggaaggggaatcacttttaggtcatcctcttccctaaacagttgagcccaaattagcccacaatggtattgtggactaaaattgtttcttaattgctaattcttatcaaatcagggttgggaatgttatcactaaatactatgttggaacaagcgttactaaattcggtatttagggtgacctttactgttgctgtgaaatgttttaggaaagggttcccaggtcacagatctgtgtcaggattctagtctttggttagttttttgtttccttggttattttcctcctcactcttcttccccaactcaaaggaccatattacttacccatttaaaaagattctaggctaccagcaattttaaattctcagtgacatggtgatggggcataacgctccctccccatccttcagcttggctcgtgcagctctgccccccacacttcttgccggtgtcctgttttctgtctgtggagcccattcacatttttcccttgtgatctgtaatgtttgtacaatgagaatctttctttccttttagttttcatattttgttataatcatttgaaaataattttttttcttcctagattgagattggaagagagaagaaaagagctgctacagaaacttgaagaaactactaaattaactacttatttgcattcacaacttaaaaggtgagcttatcagatttttgaggggaaagcttttctccgaatagcatgttcttgttcatctttgattacttttcactttatttccaactactttaaataaaatcattatagtagcacagttactgtttgagtgatcagatttaaagtcacattttc

SEQ ID NO: 33102 - DNA, 2300 bp, Homo sapien
acatctgtagtcccaggaggctgaggcaggaggatgtcaaggctgcgacgagctgagattgcaccactgcactccagcctaggtgacaggagtgagaccttgtctcaaaaaaaggaaagatgaattatcttcaagtcaccagcactttttttcaggggacgtctgccctgcatgtggggtggtggctccctatcagggacgtttgtcatctccctcagtgctctagaggcttaggcaggtaaagtcaagtcccttttacgtaaactttgctgtccagtgccagtccctgctggatgacaccaaccacgttggaataactgcaaaggccttccgcagtcagtcactgtcattgtcaaagtcaatttcaggctgctgtggttattcctgggggtaatcaataaatcatgtcatcaccttcacccttcacaaaggggggtgggcggagagaaggcacttcatcatcaaggaaaaagcattcccactgccagaaataaagtggaaaatgcagcaatcaatcctgtaatctgaagccttaaaacttaaacatcttcacaagatgtaaagtcacggctcagaagggggccaaaatgcataccaatacagatccctgcgctcactctcactcactggaggatgaaagagcaccacaggcttgcagctcattacagtacagagcacagccttaaatgaatgttccttgctcactgcaggatgctggtgtatgaatatgagttcgagataaaagttaagtggtcattggtactaaagattcagtagcacaaaaagttttttaatggtattggctggtgaggagttcctgtgagtcaaagacattttttctttatttctgttagaatagtagcacaggagatgtaggatatggcatgtggagagaaggggagaccaaaagaggtggaaacttatccattgagtagctagaagctctctctgtgatagaaatgtcacttgagggagatagatcatttcctattcctgaatatatgaacactgcagtgaatgcttgaaagaaagagactaaggaccaatgagaatttgtgtaattcatcccttcccttaaaatatttcaggacaaagaaaaaccatattctcttccaagtaatgactgaaaaaactggcgtcccaggaatcttataagtcatagtgccttgagttgtttacagctgtagatttgaatattaacatccttgactcccagaaggaaatcttattttggattgctcatgaccaaactatgtatgtatttaatacttaacttttccaaataagacattctgattagtgctctcaccctcccctccatagatgtggaaaaatcattaccaaaaagaagagtgatccacttgcttggggagaaaaccacttgtgtgtcggctgctgtgtctgatgagtctgtggctggagacagtggggtctatgaagctttcgtgaaacagtaaggattcagcaggggcgcttttagctccagcgaatctccatcgccgtggatgtgggttatatgctgtaaatggactgctaccattagtccgctctttggcttagtaaggactttagccgttaaagaagtggtgtgcctgaaaagttcagtatatcaaaaatgacttagccatggaaattatcgataaacagattggtgtacccagaggcaattgaccctctttagaatttaaaaaccttgaatttagtgggaatattggaagaattcaccagaccctgtttggcacatgaagcttctcacgtgtatttctgaaagtctgaaatgtctcaagggtgtggtatatttctagtaataaggaaagtagtcatcagagaggctttgccctaaagcccagaggcgggctcttcttgaaaagagcctctgaaacagtaagctttcgctgggatcagttccactgggagggcataggagtgctgttaatttggattttcattcagaatcactaagtggcaaactgttaaccataacaatcgataaccccattaattaactgttcatctactccctgtccatatagacctagtgaaatggaagatgtcacatacagtgaagaggatgtagccattgtagagaccgcccaggttcagataggactcaggtaaggaatgtacgtgggaaaggagcagttctgacatctgtgcagggcaagtggcctgtggtgattcctgacttcatttagcctctcttttgacagatacaatgcaaaaagttcaagtttcatggtgattatagcacagctccgaaaccttcatgccttcttgatacctcatacttcaaaagtgta

SEQ ID NO: 33103 - DNA, 2300 bp, Homo sapien
aagagtggccatggctcaccttattatatttctgttctacctgggatcttggccctctagtcctgattgcctttgttgctcttcattgctttaaaacatctgagaggttttgcttgttttgggttctattttattcagctttcatatttgttttcagcaggagagttgagtcgtctttacagatagaagtgtaaattcccatctgctgagtttttaagtcattttttcaagtatattatgttaattgccgtatgctttacattcttcaggatgcagtgtcagccttacttgcaagaacatcagctgagttgttagctgtggaacaagaattagcacaagaagaagaagaagaatcaggacaagaagagccaaggggcccagatggagactggttaaacacttatttcctttgctgttgggagctcaaagatgatgtgtttacacggcttacagtgaaacctttgtaggctcatgctttattccagaatgatggaatgcactgcaccttcaggaagctgtgctaggaaaagtctttccttggtcattagagagttaaggaagtaatggcaagattatgggcaaagttaaaacattagccagattctttgttcttgtttcgagtaattttaaaacactattttctgagcctttttttttttagtctaaacttgattttgaaaggtatggtagcttattgtagagttatagataattttaaaagtgactctatttttcttttaactacctggaagtaccatttaggctctagtaagacaaagcaggtatttaaaaaacaacttctgagtactcatttctctgttaccactcttaccttctttttctgtgtccttccctgtatccatacccaatcctttaaaaaggggaggcagagggggaagttattacagttattgtccaggttcatttatatataaagagctctccttcctggattgtactgtttctcttaaaacaaattttagtgaatatttcactttttaagtatatatgtgaaatcatttgagttaatttttaatatatagttgtttatactgttatgtttggttgaactactgttaatacatgtgcatatacatatatagcatgcatttgtatgtgtgtatatagaaaactttttagaaacttagagtgacacgatatatcataaataacgcagtcatggacatttggaaggaagagcttctactgtgatgtaaaaagatatagatatactttgtccttataaaaagtccttcatagtgaataaaaatcacagcactgcaaaacaaataaatacgagagtgattataaggttcattatagtatctttaaatagtaattctcatatatgtaaaatacaagttgtttcacacatatttccaaacagtactcttaatatgtaaacaaaggaatttataactcatagtagtcattaatggttccccttgtgttcacttcatggctagacatttattaactagtctgtgccagtttgtcattatgtcaccaatcaaattaaagctgaacatttagttatcaatggaaagaatgtctgcattcggagaacatgaaactcaacaaagtatgagatgttctaaaccatcctagtactcctgctttatatattccatataagctgtatttatattctggagcaccacttataccacttataatgccacttcagcccatgccagggcttttgttaaaaatgagccttctgctagttcagaagaaaaacttccttaacgtaggattctccctgctcgactgtgagtacactcaataaaatgaggatttaaaatccttatttctgtattcactgtcatatgattaattttacaataaatgaacaacgaataccaagttattttatagtgagtgtcaatatttttaaatgctaacattaaactctataatgtgattttcagaatatgtctattttgatatctagaagttaggttaaatttcatgagtttaactttttagtaccacattatggtgattttgctgcaggttactagagggtgaagagaggatttttttaaatgagacatttagttaaaaaccccagccaaagaaatggcttggctcattgtgtgagtctgtttatttcccagataacaacttagcatgcccaggttgcgtgttcatggagcatgcctgcctaccaaaagtgttttgtttttgttttaccataggctaacaatgctaagagaggcctctgatgaaattgtggctgaaaaagaggctgaagttaaattgccagaggacagtagctgtacagaagatttaagttc

SEQ ID NO: 33104 - DNA, 2300 bp, Homo sapien
attccatataagctgtatttatattctggagcaccacttataccacttataatgccacttcagcccatgccagggcttttgttaaaaatgagccttctgctagttcagaagaaaaacttccttaacgtaggattctccctgctcgactgtgagtacactcaataaaatgaggatttaaaatccttatttctgtattcactgtcatatgattaattttacaataaatgaacaacgaataccaagttattttatagtgagtgtcaatatttttaaatgctaacattaaactctataatgtgattttcagaatatgtctattttgatatctagaagttaggttaaatttcatgagtttaactttttagtaccacattatggtgattttgctgcaggttactagagggtgaagagaggatttttttaaatgagacatttagttaaaaaccccagccaaagaaatggcttggctcattgtgtgagtctgtttatttcccagataacaacttagcatgcccaggttgcgtgttcatggagcatgcctgcctaccaaaagtgttttgtttttgttttaccataggctaacaatgctaagagaggcctctgatgaaattgtggctgaaaaagaggctgaagttaaattgccagaggacagtagctgtacagaagatttaagttcatgcactagtgtgcctgagatgaatgaagacgggaacaggaaagaaagcaactgtgccaaagacctcagaagtcagccacctactagaataccaacactggtgactattccgctgtgctgtcttaaaactgataccttacaggcaccatgtggactagggagatgcttgtttgtctccttaggtgtaaattccatgtcaggattttgtgccaaaagctgatcgtgaaaggcatatgtgggaataggctctaagaagcatcataaatgctttaacgttttaaaatgggcccaagatattctccacttatatttggagaatatataagaagagaaatagtgctagttactttaaatctataaatattctgtgaatattaaaagtattttctgaattcctaggagaacaacagggtgtcttgtgtcaagttccgtatatgtagtaagttttatttccatttcaaacatgaagtaaacatttaaagttcattttggttaggcgatgccctgattagaaaagtgacaggtgacttagtttaggcacaagtgccaaccaagttattaaacaggtaactttgctagttaagtgagagatgtattgagactgtcaaccccatatggggaaaatattttcaagcttcatggatgctcacacactggggatattggtagtagagtttagaaaattataattttgtattcctgagaaaataatattatgccctgagaacttcctttctcaaaggagcaaactttcatcaagaggcaggtttggaatcaaattatacctataagataaaaaatagacatctgcctatgcctactgagtttgtattttgagaaacttccatttttacttaggttttatttttgttacatttctaaagatccagtaaaaatacaactcagcttcacaacagttatgtttatacatgtataattgcatattctatttaaacctacaagtttgtggtatatttcattttcttatatttaattatctttatcatttatttggaaaacaatgtaatcagaaagttgaataaagtttaatgatgatatgtacccaaataggattctttatagaatcactttaaatctaaaccttcatttttatgttcaaccctttggaggcagcacctctatttatggtgcttgttggacagatatcacacggcctgctgtgcagaacttcctaagaacttagtacaaaaccattcttggtagaaaactgaagaacaattctccccagaagtacttcagaagtactatagtctgtaatgcaaagcctttctcttaggagtggccatagtgctccatgagtctctgttgtaacattagatattttttctttcttagaagaaaggagcataatgtttacacatctttcagctcctgacaaattgttaacttctcttataggttgacaaagagacaaacactgatgaagccgctaatgacaatatggcagttcgccccaaagagcgcagcagcctgagctctagacagcatccgtttgtgaggagcagtgtgatagtgcgctcacagaccttttctccaggagagcggaaccagtacatctgcagggtaaggtggcagtgctcgtggtgaggcgctgggactgcag

SEQ ID NO: 33105 - DNA, 2300 bp, Homo sapien
aaaaaaataaaaaattagcctgtcgtcgtggtacccgcctgcagtcccagctacttgtggttcatagtctttgaatctttatatgcaaagtcaactttttaagaatcaaaaaagaaaaatgcatgtatcttttattccaagcacctggtttttgcacaagtactccatctttcagactctatcgcttttattataattaaaaaaattgtttgaaattcaggctctacttgttctcctttcaaggcaatgaagcccatgagtgggaagaagactacagggcaacaagaaaaaaagtgagaacattattattattattttttgagatgaagtctcactctgtcacccaggctggagtgcaatggcttggtctcggctcactgcaacctctgcctcctgagttcaagcgattctcccgcctcggcctacagagtagctgggactacaggcacgtgccaccacacttggctaacttttgtatttttagtagagatggggtttcactacattggccaggctggtctcgaactcctgacctcatgattcgtccgcctcggcctcccaaggtgctgggattacaggcgtgagccactgcacctggccgtgagaacattcttgatttaaaatgcacatatataatctaggtatgcgatcatagcttcttttacttgccatggtccccttgccaaagaattcatgaaaggagaaatcgtaatttctccaccttttaaatagccagatttctgcaatccgtccaccccctctagattttcagcaattatctgtgaaaaggaggaaagaacagcaaactagaagcaaaatcacaaagcttcaaaatttctttgtgcctccgtttttatgtagtttcttttggtatggcaggaaaatgggcaatattgttttcatacaatagctgtattttgttccagcatgcacataaattacacagttaaccttatctgatcttacctaaagtgacctttttttgcttgcttattctgattcatgcatttttacatcaaagtctacatttattgaaagaaaaatttcataatttatatcatttaacgtatttatcttacagtgcatgtatacctggaatgggaaacgtaacaataagccagccagcagttagagtacgtaactgtgggaaatgtaaagtggaaaaaaatatatagaaggaaaaaacagctctaacagggagagaggtttggggccctatagataaataggtacatttccactccacctccggacatctgccggttggtggtaaagctgttgattttaggaaattctagagacagagcgttgtcggggtgttgttttcctactgaccagaacaggaaggcaatgcctggattaactagagacctaataaactgcgggaacaagccctaccgctgcggggccagggccagcttcgaaggctgcaagcctcacggcaacacggagccaggtcctcgtgtgaccttactgtctactgctgctatgtaaggggactggcactcccgccctcctgaaggcgcggagaccccgacggcctcggaacgcttcgctcgggcacactgaaagcagcgcgagacgcagctcccaacactctaacatggaggccggcttttgtttgttttggccccgctcacacacaggcgtctcagggcggagaccacaggccccgcggctgcgggcggctcaaggtcccccgggacgcccccctagcggactttggccgccgcgcccggctgcctcccttgcccgggccctgcccctctcgcctctgctcccggcgccgcagctgacccggcgggggaggaggacggcaggagcgcgcggcgtcacaaagcgaggacagaacgcccggggttccgccgagactcggtcgtcccaggccagctcgacttgcagtccgccctcgtggggcgggagacgcccgacgcccgcccacctcacccccggggtgccctccgtggcctcacggggacgcagcgtcgcagcggccccggcgccgcaaagcgtcttgggagcgccggctcgcgccggaagaacgcgagggcgcgcggcggcggcgaggttataaaagggaagaagccggcggtgggcggaagtgggcggttcggcggctctgggcgctgttgtttggtctttaggcctgcggaggggcgttatctggagggccgcgggtgcaggccgcagtgacagggccgctcgccccgctagtcctgcctgtctcccggtgcagctgtgttcgcggcctgcaggcccaacatggcgcaggaggtgtcggagtacctgagccagaaccc

SEQ ID NO: 33106 - DNA, 2300 bp, Homo sapien
gctataaatgtctcctatcccatgctcatccctcctctcatcttgctctgtttctggagtactctaggtattctgcatctttgcctttttccccttctagtttctaaacacatttcttatctacttgcagatcacttatcagactgaataaaatccataggtacattcggtgtctgacctgtaacaaggcaccccacattattttgcgcctttgataaagaccagcttattcaaacttgtgagaaaacaaaaatagcagggttcaagtaaaaaccagtaaaattcagttcttcacagtggcggttttttgacaagacccggccgaaagatttcacgaacagtaaaatcccagaatgttctcagaaatactatccactgtactgtctgggttgcttaatactggcccaaacctcagtgtcctaggataataacccaagacaatttcccagtcctttgaaatagttgacgtcccaagatgtcaaattgcctggagtgctttattttggtttgaaatttaaaatttcctctagataaagatctagatttctctttgcaagtcaaaggctagttactattaacagctgtttcaaaagtgctctaaataggtcaccattcaggtgtaccaacgctgcaaactggatctaagaagatccaaatttgtcaccactcactcacattttaactcaaaggtagtactcacaattggccttgtttacataggcattccattaaaattatccatgcattcattctatttgcacccatttctttcaaaaatgtccatctgtaattaaaatcagctcctctgcctgacatctcatttacactacaccgaaattaaaccccactaggagatcacgtagattatggggccgagggcccgcccgctgactaggttttcactcgcgtctcctccatgccccaggtcccctccgattgcagtcctggggcaggactgagcaaaaagtcccgtaaagctggcgtgtgccccactccgccaggaagcctcaccgacgtcctgtgcttaaatgttctgacaccccccaaaagcagttgtttttaaaggctgtctgtgggaccaatgcgttgtcaaacagatgccgtcccgcatcccctccccctaaatgacacagaagattccagcgtaggggaagggccacgaaacccgcagggcacacgacgccgggggccggagggagcaccgcctacctccctgatcaagccccgcggtgccgggcgagcccgagggcccggcaggaggcgggcggcagccccaggcgagctcggaggcggcgggaacgcagccgccgcgcatgccgggagccgcacgccgcccgccggggcgcgcagtcccgcaggcctcgctccaggtcgtccgaaaaggaaccgcctgctgctcctttgcaggctcgcgaggagccgcactcggaccgcctgatggggaaaaagccggtgtggccgggcggagcgagccgagcggagctggagctgcccctcccagcggggaggacggcacgaaggaccgagccgcctcccctcccgggtcccattcagacgcgaggcgcagagactggctccccgggcttcccctttaaggggggcggggcgcggcctgccgtttggccgccccccacaccctcccccgctagcccagagccggcagaccaatcgcccgggcggcggagcgaaggcgggagaatgcgaaccctccggtaggcggtaggggcgggccccggccttattcgcagggagcgctgcgcaggcgcagaggcggccgcgggcggaggggcgggggcaggctagcgggaggctctccgtgaggcacggagggtgactggggacaggcgggcggcgacgggcttgtcatggggatccgggctgcgagacggcactcgtagcatctggggactccgagggggacaggaagtgtcagcgcccgggaccccggcgccggccccgccgaggggatccccactgctccggtcctggagcgggaggggagaaaggagggagccccggtttcgccccgcccctgggctggtgctgcgggggcggggagtgagggctgctctggggggagtggagatcggggagcgcggccgtgccctctcgagcggctgcggggtccccgcggcgccgggctgctgagctgagggcccgcggcggccgcggccggtgcatgtgcggctgctggatgcggaggcggcggcgacggcgcggatcggcaggatgttagggcagcagcagcagcaactgtactcgtcggccgcgctcctgaccggggagcggagccggctgct

SEQ ID NO: 33107 - DNA, 2300 bp, Homo sapien
ttaaagttcgtatggctgtttccatactatgttcaaggtctgttcctcgattcaaggttattaagcgcaacacatttccccttttaaactgccctcctagtagcaccaccgatagtaggtggtaacactgtaaggaaggtcgattctgtcccgggttcccgggtcggccggcaaagggtggtttcgcctccacacttaaagtcggagaaggaggggctcggggacgccaggcggttgcccagtcaaccaacccacttcctcctgaagcccggaagtgacacatgtcccggaacctacgcggagccaggatccgcgacggtccgagctgctgatcgccgtcctgatccattgactgggaaagaggttggaaacatcaccgcaaaacatgctgcaaaccccgattcggactccgctggggccgaaccaacgcccccgcacagccccgactccctccccagcagccagctcgccaccgcccctctcgcgaccagccattttccaggcccgcgggaacgcgcgccgcgcccctcccacgcccctcgtcaagcccgcaggccccgcccccggcgcgggggccctccccgccacacacgcccctctcttcctctcccgcgggggacccctcccctcttaaccattttgccgaaagaactgggctagggctacaacgcggggcgcccgcgaactttcccggggcgagagagcggaacggactgctctcctccgggccggggcaggagcgcggaggaaggccccctcagtccgcctccgcggcctctcgccccctccccccgcacgttccaaagcacccgcactccggggtgggggcgagtgaggtggggaagcgcgccccgcagaccagcgggagcccggccgctcactccctccgacccttgcccggctgcagtcccgggccggggccgcagggtctgcggcacggggcgggccagcgcctgaacaaatgcttgctgcttaaaatggctgattcccctcagcggcagctgcagccgctgggtctgcagcgggggctgacaagcggcccccacccccactctggggaccccagagaagtactcgcccaccgcggggccacggagggccgccaacccggtctccagtcctcccagtcccgctcggcagaccctcggtgcgctcggggagactgtcacgggagaaagggaaggtggcactcccccggacaggctccccgccaccggctcccgaggccggcagccccgcggctcctaccttgatatttgttgtccagctctcgcagcacagacacgttcctctgcatgtcgtggggcagcgactccacgcactcaaggtagtcctgcacgtagcaggtgagcagccggctccgctccccggtcaggagcgcggccgacgagtacagttgctgctgctgctgccctaacatcctgccgatccgcgccgtcgccgccgcctccgcatccagcagccgcacatgcaccggccgcggccgccgcgggccctcagctcagcagcccggcgccgcggggaccccgcagccgctcgagagggcacggccgcgctccccgatctccactccccccagagcagccctcactccccgcccccgcagcaccagcccaggggcggggcgaaaccggggctccctcctttctcccctcccgctccaggaccggagcagtggggatcccctcggcggggccggcgccggggtcccgggcgctgacacttcctgtccccctcggagtccccagatgctacgagtgccgtctcgcagcccggatccccatgacaagcccgtcgccgcccgcctgtccccagtcaccctccgtgcctcacggagagcctcccgctagcctgcccccgcccctccgcccgcggccgcctctgcgcctgcgcagcgctccctgcgaataaggccggggcccgcccctaccgcctaccggagggttcgcattctcccgccttcgctccgccgcccgggcgattggtctgccggctctgggctagcgggggagggtgtggggggcggccaaacggcaggccgcgccccgccccccttaaaggggaagcccggggagccagtctctgcgcctcgcgtctgaatgggacccgggaggggaggcggctcggtccttcgtgccgtcctccccgctgggaggggcagctccagctccgctcggctcgctccgcccggccacaccggctttttccccatcaggcggtccgagtgcggctcctcgcgagcctgcaaaggagcagcaggcggttccttttcggacgacctggagcgaggcctgcgggac

SEQ ID NO: 33108 - DNA, 2300 bp, Homo sapien
agcattttagttatacatgcttaaaaaaatgttagatgtagtgggatttctcttaagcatcaaatgatcttgggtactttaaaatacagacactatgccatttgagctgctttttccctagtcctatttatacgttggcttgttcatctctagtcttctaggagtttaaggaactggagataagagtaatttgggattccatgtggaataatgtgctcttatgagagtacgtgctgctgtcttttgcttagtagcattttgatccactgtcagtagcccatttgtcaatgccttgctgctgctttgtagatatacttagtctagtgcttaataagggagttgttttgtgttttcttttaattgggacaggtaagagtagttagcataccaaaaatatacattggcttacattggcaaactttgggttatatagtatcacggctcaaggttgaacaatttaaaaatacatcttaattaatagtattttccatgtgacctgctgccaggatgcgtagccacaggcctatcagtggaaaggggcatatagtagtctttaaatattgcctttatgtcagagagttgttttaaatggttttgctagtggttattgttcatttctgtcccaatcagtgactattttaaataatagtgtatttactgtcttaacttctagtattggtgctgtttgatgttttcacatttaattaacttatttcatcatcataatgcaattaatgtatttgtaaattgaattttccaagattctgatatttgaagggtaagcatcttgatggatatatgtccatatgtttagagaaggttttggttttgggggcagcagattgactagttctttaaatctgtgtgtaacgtatgttttattcctcatttcttcctaatctgatgatcttgattctttttgattaacatgaaaaatcctgtctgcttgttttgggaaaaaaaaatgctttttttctcttctagctctcctgtgtgacttttaggcatgtcatttcaccttgtctgggtgtcaggtcattcacctgtaaaatgagttggcttaaatatctccgagattccttggaaatttctactatttgcactatagtgaggattttaataatgacatgacttctcttttcattaattttgtccttcattctgaggtataaagatagtttaaaggtgagtttggagatgggtaaatgtgcaatatttgttagcttctgtcctaagaatatttggattcatgactagagctagttgattctattaccttttgagtgagaaatgttagacagcatgattaagaatttagcaaatcctttctcatcaccataacttagctgagttgtaaggaaatccttttgagaatatggcattttgttttagtgattacaaccttgttaccagaatggagctttttacttgacaccattaaaaatatcagtatggacaaaacccccaaagccttcagatgcgacttacatagaagtcaccactttttcatacgtaaatctgccttggcagatgggagaaaagaaacgacttcctaatagaaatgccaaagtttggattagacttgacgggaaaacgaacctggaaaatcctggaaggtgtgctctctttaagacctaatatctgaaacagttttatgacttttttgttttgttttctacacatcttggaaatagaagtcttaagcatgcgtagcattaggactggaatttcttttgttgagtattctggatctcatatcatggttaccaactcatactgtatacaccagtggttcccaaacttaacgttggaattacctgggagtttcaacaaatactgatatctgtgccccaccctcagcaattgtgatctaaattcatttggaatgtggcttaagcattagaatttttaaaagatccccattataatatatggaaatgttttggaaccactgccacatttcacagttttcaacttattgaaagctgctgtggattatctacatccagatttatgcaaatctgaagcagatacagatgcttatacacacatgagagtatctcctgcccccagtggctccaccaccagtgcctgaatactcaacatctgagtgctaattaatgtgccaggcaccgttttaagcagttgtggtgtaaaaaggaaatatccctgcttgtggacgatacattctagtggaggagtcagatacataaaatgtcaggtaaattgctaaagtgaaaggaaaactgagtaaagggctggaaatgaatggaagggggggtggcaagtcttttatttat

SEQ ID NO: 33109 - DNA, 2300 bp, Homo sapien
cctgcctcagcctctcgaaatattttcagtatacatatgtgacccaaaaggtcagtgacccaaaagttcactggcccaaatgttccaagaagaaagagtaagaattaatctaaatatatccaccatatcacactaagaagcaatccatttatctgggttataaaagaaaaaaaaacggctgggcgtggtggctcacgcctgtaatcccagcactttgggaggcagaggcaggtggatcacctgaggtcaggagttcgagaccagcctggccaacatggtgaaaccccgtctctactaaaaatacaaaaattagccaggtgtggtggcatgcgcctataatcccaactactcgggaggctgaggcaggagaatcgcatgagcctgggaggtggaggctgcagtgagctgagatcatgccactgcactccagcctgggcaacaagagtgagactctgtcaaaaaaaagaaaagaaaagaaaagaaacacacacaaacctgttttgtctgccagcttacgcttctgggcttttgaaagttgttcttttttgtcttttttcttacttgatggggctgtattaggagtttcaattgagatgatattgcttatcgatgtctaaaaaaaaaaagaaataattctcagcctcataccttacaacttgtgttacactaaatacagctatatcctgaagtgggttgataatttttacacttatgaaataaaagaatcctatattattatgattcatttttaaaatcaagtgcccttaacacattattggttttactcttttaaaagttcagatcaaaggacgtaatattagttcaattgttataaccaaaatcctgggaaggaagatctgattatcagccttatgttgaagatctgaggttccaaggtaggtttacaattcagttaacttgctattatttggaaatttaattaaaacctttttttttctttacagagcttttctcaatgtgaacacttgacaatttaaacacgtctttagaaaaatcacgtgtgcctacctagaacatcctggttcccggaagaaaaattttaagacacatgggttaatgcagtcagggtatatgatagctaaaatgtaaaatgcttactaggtctaagcatggctgcaaatgttttccatataccacacatttgatcctcagcacaatcttagaaggtagatactatataacccccatttgacagatgaggaactgggcacagaaagattaagaaacctgccgaaagtcacagagttggtgagtggtgcagtgatgtgaacccaggcagtctggcccagagtccatgatcttagctaccaccctccactgctcctccagttgcctcttggggttctgtgtcctgttgggaatgtgaaagccaaaaccacttgcacagaagacaggccttgctgccaacagcttagcccttggttcacaagacaacactaaattataccgaacccctcaaagtcttttagtgcatgacgtggtgcaaaggggcctcatacacagatgcttaacgtcatgaaagaaatatttcctaaaactattctagaaataataataaaacaattttttctattcaataaagtttccacatgctgcaacatctacacattgaactgtggcaagactgtttacaatgaaacaagcctcatgcagaaagcaatttcatacttattttagcactgcataagagatcccttagctgtttaagctttatggagagattaaacaaatattaaaaatactaggttctatgatatctcagttttggtgggcatgttatatatattctagtctttgataaaggataaaaatctagagaatataatatcattttctaggttaaatagaagaaatctgaaatccattgttctcatttaactcaggtgtaactctcactttaacaagtcttcttccgattttgaatatatattaagtagtacaaatttattgctaacagcaaaaccaaaacaacaaaagaatccggcaaaaaaataatcacatactcactgcggaattgatgggattgtgattctccatgaactgctctttattgtctttggcatattcaaacaatgtataggtcatagcggttccaagattagcttctactgcttcctgtagcttggctaatatactctgctttacagctgatgatctacaatgcacaacaaaaataccttgctgagagaaaagtataacagagagtgaaatgaaaagcagtaaaaacaagacactactcacatggtgttgttaaaaaaagcgttcatagatagaattgg

SEQ ID NO: 33110 - DNA, 2300 bp, Homo sapien
acaccgactatatagatttcagccaggctccacaggtttctcttgctacctttacagaaaaaacaaaaaaaaacaaaatacagaaattcaagccggattcaagaataactaagattagattggaacaaaaaccttactcaagatatagtactactccttctgtccctaatcctttcccatattttaatttatgacttggacaggtacaaaaataggaggcaagtttattaaatttgtggatgacaatttgttgggacagtgaataatgctgatggctgaataagaatccaaaaagtctttgaaaagcaagctaatgatgaaatttagcagggtaagtagaacttgtatcaatactcagatacctaaatgtagaagttgaagatgaaagacaaattgctttgtataaagcacttaaaagatttcagttgacagtaaatttaactagacaaaacagcaagatgccacaattttgaaacaggacatttaaaaaattaaaatctgtccacaaacacgtgattccaggatagtgaagagattaacaaagaatggatatatgaagacaagctaaaaggaaccacttcctcagagaaggtctgagaaactgggcaggaaactatcttcaaagatcagaacatcggtcatctgaaagaagaatgaaattttcttgttaaactggagattcctgggcccaccacagaaattctgattcagtaggtctggggtggagtgcacgcatctgttttctagcaaccatctaaatggttctaaggtaggggactatggtccaactctgagaaacattacactgtatgttctttgctttgcagggagaagaagctattaacgcattcacttagaaattcacccggcaagaatattttagaagagattcagatatcaactagctagcttgttggactttgggtcctttaaaggttaacttccaatccagagattctattacatttatcatgtaaaagtagtaagtttcaagcattatactttaaattaacagtgaacttatctaccacccaataagacctggtttctagtcccgattctaccacgtacttactgtgcagccctgcggctatcatcgacccacctatcaaagttagaaggttcccctacagatggcccgtagcacccaccccccaactctaatattatatgattcaatgtcaaaatggcatctcacaaggaaatatttgagcataaaccataaattcaggtggtacatgaatgctcaaaacagacagatgggtaaaagatttccccaaacaatatggacagaaactcagatgcaccaccagtgtcattttcttccatgagaaatgtaactaactcaattagccctctactagccaagagatttaaagatgaccagactaaaatttaaaggtgatcagcctaactcagtaaacaggcactgaacacatgggattcaaggagagccaagagcactggatcgtgcaccaaggacgctcatccctgttattaagtaaccaggggagactcccggatttgcaaaaatgaaaaatgaggggggaagagtggcagaggcggactcctggccattcacgcgcgcttgggtgggacgccggtgaactcggggcaccccggccggctccgagggcacagggcacgtgccgggcaggctgtccgggcaccaggtctcacgggggcccggggctgcgcgccgcgcccgcgctgggagagggccctgagccggggggctcacctcctggtcctcgttggcactcatcgcgccggtcgcggggcgcctcctgagcggacggcgttcgcaacaacgaagagaaagcgaaggcagcggcccagaggccgggcgtccccctttcgcgcctcggctgtgggggcggcacagtcttggcactggcagacgccaactgcgcgcgccccgagcctcggcagcgcccagccgccggcagtgggctgtgggctacgagccggagccgcggctggtggggcctgggaagtgcagcgtctccctgacgcttggaggagcggcgtaaagttccgggacagcgattggtgtagagcgcggtcactcaggcccagaaagtgcttcctgtgccgggggaggtgggtacagggaagtctcgcctgttggaactggctgtggggctgcggcggtggggacgggccacggcgttctgtgacatccccccgcctcccctcgtcttctcccggctggcggcgaccggcctcagctgcagcgggcccggggcgtggggcctgggtgagtccgggcccggagacccgcggggccaggcgggacc

SEQ ID NO: 33111 - DNA, 2300 bp, Homo sapien
ctaatccccaaaacatggaatattttcaactgaaaggttaatttaggaaagactattagtcttctcatgtttacatactgaaagaacaacaggtattcaataaatgatttgcaaagcttgccagaaatgtctacaacagattgttttagaattgtttaaatatttttaggacaggattaagttatgagggcaaaggattgcatgttcagagaaagaaacagtctagttctgggtaatgtaggaatgaaaattaaaaaggggtgaccaggctgggtacagcggctcacgcctgtaatcccagcactttgggaggccaaggcgggcgattcacgaggtcaacggttcaaaaccagcctggccaatagggtgaaaccccgtctctactaaaaatacaaaaattagccgggcatggtgatgcgtgcctatagtcccagctactcgggaggctgaggcaggagaatggcttgaacccgggaggcggagatttcagtgagccgagatcgcaccactgcactccagcctgggcaacagagcaagactccgtctcaacaacaacaacaaaaaacaagtgaccaaaatacaatacgggcccctttgcttaatatgaacgagtctagactagaggccatttcctgtaataactccagaggcccaaaagacatagctgtggtctttaaatatggagttgaaataagaggaactaaaaatgactgtcatccaatagaaatacaagtcacataaataaattaaaaatttctagcagtcatattaaaaagtaaaacgtggatggaattcattttaatattcaatttaacgcagtacagtatgtccaaaatattatcatactgacaataatataaaagttattaatgacatattttacctttttttgtactgagtcttcaaaatctggtgtgtatttcacactcacagcacatctcaattcagactagcctatttcaaatgcctgatgtagctactggctacagaactggacagcagagatctaaattatgggaaatgtgtcccaaaattgctgcacgaaaattgtatcagaaagtcttgccacattctcctatgtcacctgaaatggtcgtgcttattctgcagcaaaggaatttgaatgagaaccccgataacgcacaggcgcagatcgaatggatttcaatgacaggctggaaggagaaattttcagatatccaatggagcaaccaacgaaactatacacgaaaggaggcgcagctatagaaggtgaataatggatgggagatcaagtaatgcaagggaagtaaactggaaactagcgtgaaagataagaaaggtgacccaatcaaattggcaactaaaaaaaccccaaaacctaatgtggttactttttttttcttttaactaactggaagttcagggtgttaggacacaaggctgctaagaatgggattcagagatgttcaactacaaaacgaacaaaagaggaacgacagtgtggggacgaaatgatgtttcgatgttaaagatgagaagcaacaatccaacgtaggagaaacaccgtccccatggtcccagtatctgttctggtagctccagtgaggaaaggtagagaaataaccttgcagtccctaaaggcagatatcttcctcctcttattcccccgtcttaaacctgggaggccctagaaacgggtgcgtctttcctcgggtctaaaagagaagtgccaggattgcacccgtcgatgggattgcaaaacgcaggcccccaaaccagcattgttaagagctagctctcttcctcggcggtcccgcctggccccgcgggtctccgggcccggactcacccaggccccacgccccgggcccgctgcagctgaggccggtcgccgccagccgggagaagacgaggggaggcggggggatgtcacagaacgccgtggcccgtccccaccgccgcagccccacagccagttccaacaggcgagacttccctgtacccacctcccccggcacaggaagcactttctgggcctgagtgaccgcgctctacaccaatcgctgtcccggaactttacgccgctcctccaagcgtcagggagacgctgcacttcccaggccccaccagccgcggctccggctcgtagcccacagcccactgccggcggctgggcgctgccgaggctcggggcgcgcgcagttggcgtctgccagtgccaagactgtgccgcccccacagccgaggcgcgaaagggggacgcccggcctctgggccgctgccttcgctttctcttcgttgttgcgaacgccgtccgc

SEQ ID NO: 33112 - DNA, 2300 bp, Homo sapien
tgtagcctgttacggttaaagcgagggaaagatttgactctgtatccctcagtttagaggaaataatagcacttaccaagcctacttactctcagtcttctgtattgactgtttaacaggtgttttatctctaagtacacattcagcttgaaaactaaaaccacacttatctttgatatttactgagacaatctagattaataatactgattctctattgagaaggattttttgtttttgttttttgaatcattcagaatagtctgtagacatatttctggctaccataacattagatattctagtcagtgccttgttgctacccgttcgcaaattttttttttttttttttttgagatggagtctcgctctgttgcccaggctggagtacagtggcgtcatctccgttcattgcaagctccgtctcctgggttcatgccattctcctgcctcagcctcctgagtagctgggactacaggtgcccaccaccacacctggccaattttttgtatttttattagagacagggtttcaccgtgttagccaggctggtcttgatctcctgacctcgtgatccgcctctgcctcccaaagtgctgggattacaagcgtgagcactgtgcccggcccccatttgcaaaatttaaaggatagcttaggttaatacattccttcacacattatttggttcaaggttagattctaattttgtcatattttaacatttttaaaactacagttttgaaaatagaaaaatcttaaaaggccggacatgagggtttatgcctgtaatcccaatactttgggagatcgaggcatttggatcgtttaagtccaggaatttgagaccagcctgggcaacatggtgaaaccccgtctctacaaaaaatataaaaattagctgggcgtggtcatgtatgcatgtagttccagccactctggaggctgaggtgggtagatcactggagcccaggaggctgaggctgtggtgagacttgattgcaccactgcactccagcctgggcaacagagcgggaccctgtctcaaaaatgaaatgaaatgaaatgaaataatgaaatgaaatgaaatgaaatatcttaacctagaaaatcaaatataaaatataatagctgatatttaagttcgtcttttatctggctatgagttctgctttctttcacgccctaggcagataactcctgataacttcttttcaccaaagaaagcttgagttgtgtatccatctctggtcagattttcttgttcctatgtaagttatagaatgatggaggatttaaatcacacaaatgttttcaccttatttgccagttctcatttttggttctttccccattagttttcttattcttttaaatcctaaatactaaaatcaccaaaaaactgaaatctaattgattaataatttttttcagactttttataaaaatataaaatagtaggggcgaatgtgcttttagagattccaatcaaattttaggccaggagcggtggctcacacctgtgatcctaatcccagcactttgggaggccaaggtgggcggatcacttgaggtcaggagatcaacaccagccctgctggccaacatggtaaaacctcacctaaactaaaaatataaaaattagctaggcatggtggcacatgcctatagtcccagctacctgataggctgagacacaggaatcgcttgaaccagggaagtggaagttgcagtgaaccaagattgcgtcactgcactccagcctgggtagtgacagagccagaccctgtctcaaaaaaaaaaaaaaaaaaaaaaaaagattaccaagtttttatgaatcagagaaaggtatttttatttgttgtatcctgtattataaataattttaaatggcttttggatggtcttgtttttagactttttgatctgaaaattcaggttatcttttgcttcactttgtcttattcataatgtaaaacagatatttctgtcaccattttactttcaggtctcacaaatattcttgaaaagtttggtttaaaataattcaatatgtaaatgcttgtttgtttttgttttttacagattggaaaatgccttttatgaacatgcacagacttattactacactgagatcagaagagtgaaatctcataaagaatttttgaataaaacaacacaccaggtgcgtgattttttgcaataatagaagcattctggagcggattattattatttttgaggtgattattacatgttcttaatactttaatgttttaaatggtttcagcatttctaa

SEQ ID NO: 33113 - DNA, 2300 bp, Homo sapien
cagcctgggcgacaactctgtctcaaaaagaaaaaaaaagtaaaataaaatttccatcaaataataatttgagaagctttaaaactgtgcatatcttttgacctagaatttaatttttggagataactaaggcagctaataaattctgaaataagtaccaaaatttatttataaagttgttctcacagatttattaattaattgtaaaatagaaataagatgaatagctatagggaatttgttaaaatatgcactagtaagcagccatgaaaaataatgttttagaagaacatttaatgctggattaaatatacagaatatatttaaatgaaagaaggaggttgaaaattaatcattaacaaatttgtgcatgtgaaatctggaagaatgataacatacattcttaacagtgggagttggtagtaggtttataagtaatttagattttcatccttttggatgttttctgcatttttcatgtattacgttttggtttcagagggaaaagttaaaaagaagaaaaagcactgtaaatctgtcagttctggtgccaaaaatattcccccacaatagcaagatttaatacagaagtgataaagaaggaaaatagtgtcttctttgtagaactccttgtaacattgttttcatttacacaaagagcatgtatgcatgcggaataaatatagagcataatttgtaatatatttttactggtttattagagcaaagattaaaaaagtgaagaaattactgtgaaatcatttgtcagaatcagattgatttttatgagactacctaaatatgaaacatttttagcttaatttttgttaaaatttatgttaaaatattcacaaatttgataattgaatatatatttggtggttgtatttatgaaaacttttttgttcagtcaaaggttgggcaagagttgatttgcgatgagttccataaactattatttaggtttgtgttttaatttacaggcttctgtaatgtatcccaatcctgatcccttagaaacacaaacaggcgttcttgacttttatggacaaagatcatggcgacaaggaatactaagtaaataatttttccctctgtcctttcctctcaacctcaaaaggcaacaatagctataatagattttccattggctgcacatgcataagaaattatgttgaagtaaaaatgtgtgctttttaaacattgtttttgtttttagaatgctttgtatgtatcactgcatcttagagtgacttataattaaagttgctgttgtgattaaaacatgtatctgggtgtggtggcacatgcctgtagtcccagctacttgggagactgaggtggaaggatcacacctgtgaacagccactgcactccagcctgggcagcatagtgagacctcatctcaaaaaaaaaaaaaaaatacaacatttggacatctgttgttttaaatgacacatgccactgttgtcttatttaaatattttaattccagttaacttttaacaattgatttgacattttaaaacagcattaactcatattaccttaaaaacaatttctctgcatattttttaatactttatacgtaatttaattcaagcaattgaactataactgttaaattactggctaggcgaggtggctcatgcctgtaatcccagcgctttgggaggccaaggtgggaggattgcttgaggccaggagtttgagaccagcctgggcaacatagtgagaacccatctctacaaaaaaatacaaaaattagccacacatagtggcatgtgcctgtagtcccagctacttgggaggctgagatgggatgatcgcttgagcctaggaggttgatgcgcagtgagctgtgattgtaccgctgcactccagcctgggcaacagagtgagatcccgtctcaaaaaaagaaaaaaaggaaatgattatctccagcaagtgtatcctctatagaggatgatattgacattgcttttcagatcgttgattccagtaggtagaagaacattgagctcaataatgttcccatcagaacagaacacggaagtttccatgttaataaagctgcctcttagcacctttacgattctagaatgttgaagagtctgaaatgattatattaaataaaggtttcaaggagtgtacacatacaacgttcatatgaagatttatattaaatgagctgtctaaaatgagttgtgtctcatcttacgcaggttttgatctttctgatcctgaaaaagaaaaggtgggaattcttgccattcagctgaaggagagaaatgttgtt

SEQ ID NO: 33114 - DNA, 2300 bp, Homo sapien
taaaatattcacaaatttgataattgaatatatatttggtggttgtatttatgaaaacttttttgttcagtcaaaggttgggcaagagttgatttgcgatgagttccataaactattatttaggtttgtgttttaatttacaggcttctgtaatgtatcccaatcctgatcccttagaaacacaaacaggcgttcttgacttttatggacaaagatcatggcgacaaggaatactaagtaaataatttttccctctgtcctttcctctcaacctcaaaaggcaacaatagctataatagattttccattggctgcacatgcataagaaattatgttgaagtaaaaatgtgtgctttttaaacattgtttttgtttttagaatgctttgtatgtatcactgcatcttagagtgacttataattaaagttgctgttgtgattaaaacatgtatctgggtgtggtggcacatgcctgtagtcccagctacttgggagactgaggtggaaggatcacacctgtgaacagccactgcactccagcctgggcagcatagtgagacctcatctcaaaaaaaaaaaaaaaatacaacatttggacatctgttgttttaaatgacacatgccactgttgtcttatttaaatattttaattccagttaacttttaacaattgatttgacattttaaaacagcattaactcatattaccttaaaaacaatttctctgcatattttttaatactttatacgtaatttaattcaagcaattgaactataactgttaaattactggctaggcgaggtggctcatgcctgtaatcccagcgctttgggaggccaaggtgggaggattgcttgaggccaggagtttgagaccagcctgggcaacatagtgagaacccatctctacaaaaaaatacaaaaattagccacacatagtggcatgtgcctgtagtcccagctacttgggaggctgagatgggatgatcgcttgagcctaggaggttgatgcgcagtgagctgtgattgtaccgctgcactccagcctgggcaacagagtgagatcccgtctcaaaaaaagaaaaaaaggaaatgattatctccagcaagtgtatcctctatagaggatgatattgacattgcttttcagatcgttgattccagtaggtagaagaacattgagctcaataatgttcccatcagaacagaacacggaagtttccatgttaataaagctgcctcttagcacctttacgattctagaatgttgaagagtctgaaatgattatattaaataaaggtttcaaggagtgtacacatacaacgttcatatgaagatttatattaaatgagctgtctaaaatgagttgtgtctcatcttacgcaggttttgatctttctgatcctgaaaaagaaaaggtgggaattcttgccattcagctgaaggagagaaatgttgttcactctgtaagttttgtgtccaatataaactattttttacactatttaagaaaaatatttgtattgaaatgtttcacactctactttttctaataggagataatcataactcttctgagcaatgctgttgcacagttcaagaagtataagtgcccgcgaatgaaaagtcacctaagtatgtatccacaaacgtcaccattgcatgcaactttgaatgactttaagttacatacataaatctttttttcctttatagtggttcagatgggagaggaatattattacgcaaaggattataccaaagctttgaagtgagtcctgttcactatttacttttacaagtatttggattatctgaagtgaaactgaaatagaaatcagtgttgaaggagttcgtattttcatatttatttctattgttgttaaactccatttctgtaatgtttttttcaagtgctattgatggcacaatctttttcagtgttttaagaaatctcacgtttagctaaatatgagaatacctgttcaaccatctcagtaagatttttctatacttacataaaatgaggaaagtatttttttctccatgaactcttcgaaccctttcttgtgaagccggttcagtattacattttgtcttctttgaggttgctggattatgtgatgtgtgattatcggagtgaaggatggtggactctgctcacttctgtattaactacagctctgaagtgctcctacctcatggcccaattaaaggattacattacttactccctagaactccttggtagaggtaacctgatgttttttgagtaaaattcttgatacataaaattattt

SEQ ID NO: 33115 - DNA, 2300 bp, Homo sapien
ctttggaggctgaggtgggactatcccttgggtccaaaaggttgaggctacagtgagccgagatcatgccactgcactccaggtaggaaaaacaggaagtaaccaagcaggatgagaaacaggaaagattatagcatcacagaagccaagtaaaaaaaggctcttcaagaaaaggaggtgataaacagtagtgtccagtgcaacaaagaacaaactgtttctctgggagagggatagctaaatattttcagaaaacagtttatgtgtagtgaactgttatattatggcagcagtaagtggataaatgcctctatttggcataaaaaatacttccttttattagtaacccttcataatgcttcagtgtttgtggagttatactaaatgagctccaaagcacttggcatttagggttagcagacatctgacatttgatgacccctgttcacctttttcaggaatacaaccagttctgtgtaatagaagaagcatccaaagcaaatgaagttttagaaaatctgactcaaggaaagatgtgcctagttcctggcaaaacaagaaaactgttatttaagtttgttgcaaaaactgaagatgtgggaaagaaaattgaggttagttatgaaatttgttttaaaatatttttaataataaaagtatgtttatatcaatattttaaataatacaaaagttgattaagtaaaaaatgaaaatctgctacttggacttcctaaaggaaaccattcataatagtttgggaagtttccttcagacatttttctgtgaacatacttgtagtttaaaattttttgcaattaaaaaattgagaatatactgtacataataaactgtagctggcttttgtcatttaatagtgtatattagatattatttcttgttagtatataaaccaatcttgttttttaatgaccacataatcagttaaggagttttaaataatgtatattatgtaatatagcaaatatattttttatgttattcagactgaatatcttttgatgtttaagcattactgagtacatatttttaaagaaaaatgaacatatatatttgtaaagattgatatagtatagataattgaaatgccttttagaaatataggatctaagtaatatctttattgagcataaactctggagccaaactgtatgggtttaaattacagctctctagcttattagcttgtggccctgggcagttacttagcttctttgtgtctcagtgtattcatctgtaaaatggggatcataagagtactaatctcttaggatttcatgaggattaaatcagctagttaatgtaacttgcttggaatagtgattagcacacagtaagcattcattaagtgcttgtttttcatgacttgaatgggaatggttagctcatctaaacttgggaccattgctaagataaatggcatataaagttatacaaccagtgttcccataacagtttctgtgaacatgttgcttttattatttgcttattcattaaaaaaaaaaaaactttcatgattttgactaaatgccctaattgcatattttattttttcatggtacctaagggaacctaccagacataaataataattagtaattctattttgagtccttttgttaatggttttagttgaatagatcatgtattcaattaataaagcattttattgctaatactgtaaatatttttgagaaaaatatttgtggagtcggaaatgaggttataatgtatccatagccatcacaatacttatttcattcagcaaccactaattgaaccttcattacatcagggactatgccagatgttaaaatcataacactactgtgcaatcagcctgtcaacagaaagtcaggttagtgtctctgttttaaaggtgaagaagttggaacccagagcgcagttagtctctgtcccagcccgagtaagacctctaatagcaggtgttctcacttctgtcacactgggggtctctagatgaactccatggtcttagcagtcgacgatgtaattttggtgagaggagatggtgacaagcacatatgagatgacatttccaacatccttttttttctttttagattacttcagtggatcttgctctgggcaatgagacgggaagatgtgtggttttaaattggcagggaggaggaggagatgctgcttcctcccaagaagccttacaggcagctcggtctttcaaaaggcgacctaagctacctgacaatgaagttcactgggacagcattataattcaggcaagcacaatgtaagtctgc

SEQ ID NO: 33116 - DNA, 2300 bp, Homo sapien
gtaatatagcaaatatattttttatgttattcagactgaatatcttttgatgtttaagcattactgagtacatatttttaaagaaaaatgaacatatatatttgtaaagattgatatagtatagataattgaaatgccttttagaaatataggatctaagtaatatctttattgagcataaactctggagccaaactgtatgggtttaaattacagctctctagcttattagcttgtggccctgggcagttacttagcttctttgtgtctcagtgtattcatctgtaaaatggggatcataagagtactaatctcttaggatttcatgaggattaaatcagctagttaatgtaacttgcttggaatagtgattagcacacagtaagcattcattaagtgcttgtttttcatgacttgaatgggaatggttagctcatctaaacttgggaccattgctaagataaatggcatataaagttatacaaccagtgttcccataacagtttctgtgaacatgttgcttttattatttgcttattcattaaaaaaaaaaaaactttcatgattttgactaaatgccctaattgcatattttattttttcatggtacctaagggaacctaccagacataaataataattagtaattctattttgagtccttttgttaatggttttagttgaatagatcatgtattcaattaataaagcattttattgctaatactgtaaatatttttgagaaaaatatttgtggagtcggaaatgaggttataatgtatccatagccatcacaatacttatttcattcagcaaccactaattgaaccttcattacatcagggactatgccagatgttaaaatcataacactactgtgcaatcagcctgtcaacagaaagtcaggttagtgtctctgttttaaaggtgaagaagttggaacccagagcgcagttagtctctgtcccagcccgagtaagacctctaatagcaggtgttctcacttctgtcacactgggggtctctagatgaactccatggtcttagcagtcgacgatgtaattttggtgagaggagatggtgacaagcacatatgagatgacatttccaacatccttttttttctttttagattacttcagtggatcttgctctgggcaatgagacgggaagatgtgtggttttaaattggcagggaggaggaggagatgctgcttcctcccaagaagccttacaggcagctcggtctttcaaaaggcgacctaagctacctgacaatgaagttcactgggacagcattataattcaggcaagcacaatgtaagtctgctttgctaagctgatattaaaggtcatcctcttatttcttttgctattttttttggagacagagtctctctcttgtccaggctggagtgcagtggtgtgatcacgactcactgtagccttgaccacctgagctcaaaccatcctcccacctcaggcgctacccttgccttccccagtagttgggactacagccaggtgccaccatgcctgactaatttttgtattttttctagagatgagggtcttactatgctgcccagccttgtttcaaactcctgggctcaagcgatcctcctgcctcagtctcccaaaatgctgggattacaggcctgagcctctgcacccagcctcttatttcttttaaatactttatttgaataatttatttgctttttttttgatcagttacttagctaaggtttcttttcaaaggatcatatccagagtcccaaacatttctgtacatctgctacatgaaccccctgcactgactaatgaaatgtattgtttggttgtgactgttcagtcccatgaaaagacccaaatcagagatgtgaagctcaccgctggcttaaaaccaggtaagcattcctttttgtaagtttgatcagtattaatccaacattaaataagcatcagtgatgtcaactctaggacttttgtttacaagagggtatggcatagtgctcttcacacagtattgattattgggataatgtttgaattctttgttttgaagaaccaatattaactcttttaggacaggatgccaatttaactcagaagactcacgtgactcttcatggaacagaactgtgtgatgaatcctacccggctttactcactgacattcctgttggagacttacatccaggggaacaggtaaacttggtcaactgggattgaagaggaaatcaattagtttgtagttttaaatatatagtgagtttttaacagttcagagcgtttta

SEQ ID NO: 33117 - DNA, 2300 bp, Homo sapien
caagtcttcagctgccacacgaccttaggctgcctgcattccctcgtccagttggaggggttgtctggttgtaagggttgttgtacgtacacttgatccaagctggaaactgcagagaaaaactacactccttcacacgcacatctatccttcacacccacatccaaacatttttttaatccagcttttcatctccatcctcagtgccatcctcaccatttctctcacctggtctatagaagtaggtccttaactgttttcttccttggcagtcattctcttccctatcctgcctttcatattgccactagactttgtgacacactggacctcacctggtcaggctctggctgaccttcccagctgcctctaccccaggctgtctactgccctttgctctctcccaggtttcaaccaagacaaacttagggcattcatccaacattgcccccagctacttttgaacatatctttggaacttttgtgtaaaaccttcatctttttcaacctgttgaactctggcttgctcttcagggctcttgtaaacttgaacttcttgttcctcccaagcaggactaagtactcttccttctttattcccatggtgttttgtacacacctacattgtaacacttaccatattatattgcaatttcgtatttgtaaatatggctcccttactagactgtgtgttcccttagaacctgagttgtgtcttattcatcttcatatcgctagcatcatagtacttagctaataagtgtttactaaattaaggaataatctgtggcttgaacttctagtatattagtttcttactgctgctgtaacaaactaccacaaagttagtggcttaaaatgacacagattcaactgtattaaagttctacaggttagaagtccaaaaaacaaggtgtcagcctggttgcgttccttctggaggctctcagggaaaatctgtttctttgccttctccagcttctagaggtcacctgcactcctcctcatgtggctccttcctctgtcttcaaaaccagcaggtagcacttctttgtcacaaattgaccctaatgttaattggtttttttttttttgagacagagtctctgtcacccaggctggagtgcagtggcacgatctcggcttactgcaagctctgcctcccgggttcatgccattctcctgcctcagcctctccgagtagctgggactacaggcacccaccaccacgcccggctaatttttgtatttttagtagagacagggtttcaccgtggtctcgatctcctgaccgcgtgatctgctcatctcagcctcccaaagtgctgggattacaagcgtgagccaccacgcccagccaatgttaattattaataaacattgtgaccgttttatttaacttcttacaattaaggagaactttggtagagtttaatatgaatggcccaggttttttaaaagacgatctctagaggctcaaactgatgtgtattttatttactgggctacaatatcatttccaagtctttaacattacataaaaatacttaattaaagcaaaggttgatccagcttttttccctttcactgttgttatctgtccacaatcagacctccattgatctgtcacaaccatcttcattagaaaaccataaaaatagcctaatgtttagaaactttgttgttattcctttggagttgcactcacagattgctaaaattgccgttaaatatgtactgttgcctgcttgcatttgaagctgaggcattgcaggctctggagagctgaaaggtggaggagacttggtttgaatgggcgcttatcttgtcatcagggaatttgctataaaattggcagaaggaaagcattcttgcacagaggtgaatggccatgtgaggcaatagtgaggcggtatgagtgctattagtaatacaggctgagtatctcttacctgaagtgtttggtactagaagtgtttcagatttcgggtttttcagattttggaatatttgcattatacttagtgggtgagcatccctcatctaaaaatctgaaatctgaaatgctttaaagaacatttcctcttttaaaaaaaaatttattttcattttggagccaaggtctcactctgtcacccaggctggagtgcagtggcaggatcatggctcactgcagcctcagacttctgggctcaagctattctcccacctcagcctcccaagtagctaggaccacaggtgcacgccaccacacctggctaatttttaaattatttatagggacgagatctccctgtgtt

SEQ ID NO: 33118 - DNA, 2300 bp, Homo sapien
gatcttttctgtatcttctttttctgtttttttcttagaaaaaaataggtctcactacgttgcaggctgctctcaaaaacttctggccacaagcaatcttcccaccttggtctcccaaagtgctgggattataggtatgagccaccgtgctggcctattctgtatcttcactatggtggtggatatatcaacctacataggtgataaaattgcctagaattaaatacacacacacacacacacacacacacaagtggggaaatctgattaagactggtggattgtatcaatgtcagtattctcttgtgatcttgtactttagttttgcaaggtacaaaagatctccttgtaatatttcttacaaatgaatgtgaatctataattatctcaacataaaaagtttaatttagtttttaaaaaatgcagtgctctgggctaaccaatgttcttaaatcaatatgcaacataagggaaatttcaccgatgacaacgatgacaatggtggaggtggcagtgctgatgatgctgtcatttgctgagctgtcgctgtgggctccaagatagctgagaccttgtctgtgtcattcactactataacccaaacactacagcctcctgaaccgttgtttgttagacagcactaagcaaataattgttgaataaataaatgaacaattctgcaagatttttattttttattattattgcctattatcatgtttcggatgagaaaactggaactcaaaaagtttaagtaggctgggcgtggtggctcacgcttgtaatccctgcactttgggaggcccaggtgggcagatcacctgaggtcaggagttagaaaccagcctggccaacatggtaaaaccctgtctctactaaaaatacaaaaattagctgggcgaggtggtgcatgcctgtcatcccagctactcaggaggctgaggcaggaggatcgcttgaacctggtgggcggagattgcagtgagccaagattgtgccactgcactccagcctgagcaacagaacgggactctgtctcaaaaaaaaaaaaaaaaaaaaagtttcagtaataccccaacgtcaaacaacttacaagcagagaagccaagattgactcatcaccatctgtgctattaataactaatcacagtctcccaaaatgctaccatagcttccaataaaccaaaacgaatattctttattttagcaataatcactttaactgcctaatatctctcaactgaacctccggatggttctttagttcttatttatagaacggcatcaccagccctcctcccacgccctattgttctctgagcgtcattgtgagagtattattagtgcttcgtgtgtgcagaaaagctatcaatgactaaggcatttttaaagcatgttagccactttggcaatgtccattaatttctgagaatacacttaggaatctcaccctacgggtttgaattactccaatttaagttgaccatgtaaactgcaaataagatccggcatggtggctcatgcctgtaatccaagcactttgggagaccaaggtgggaggatagcttgagcccaggaatttgagaccagcctgggcaacagagtgagacaagaataaaaactaagaaaagtagccaggtgtattgacacttgcctgtagtcccagctactcgggaggctgaggcaggaagatcacttgagtgcaggagttcgaggctgcagtgagctatgattgcaccattgcactttagcctaggtaacagcatgagatcctgtctctaaaaaatacaaattaaaaatctgcaaatgagtctagtgtcaggcatgagagacagtttaaaaataataggtctggctctccctctccctctccctccacggtctccctctccctccacggtctccctctgatgccgagccaaagctggacggtactgctgccatctcggctcactgcaacctccctgcctgattctcctgcctcagcctgccgagtgcctgcgattgcaggcgcgcgccgccacgcctgactggttttcgtttttttttggtggagacggggtttcgctgtgttggccgggctggtctccagctcctaaccgcgagtgatccgccagcctcggcctcccgaggtgccgggattgcagatggagtctcgttcactcagtgctcaatggtgcccaggctggagtgcagtggcgtgatctcagctcactacaacctacacctcccagccgcctgccttggcctcccaaagagccgagattgcagcctctgcccggccgccaccccgtctggga

SEQ ID NO: 33119 - DNA, 2300 bp, Homo sapien
gctccaatttcagccacagtggcctttttccacttcctccaacagaaagtcaagatcccttctaccccagggcctttgcacagactgttccccctttctgtaacaccatctcccccactctttgcttgagtggctcctcatgctgtaggtctcagctcaactgtcatttcttagagagattattgttcttcatagaacttagcacaatttctgcatttatttgcctactgtttctcttccatactagacggtttgctgcagggtcatgtgtggtgttctgtttgcccagcacccatcccagggcttgcgtattctagacagtcagccattgtttgctgaatgaatgactatcacagttgccacagcagtcaccattagctttaagtcatagctattataatcattcatataaccacctttggctcttgggaggtactgagtaattgttgaattgagatatctaaatgtcagttctcctacattcattaatacaacttgttattaccttatggtcctttacaccagcggcccccaacctttttcacactggggaccagtttcgtggaagacagttgttccttggactggggtgggggtagggttggagagcagaaggttttgggatgatttgagtgcattacatttactgtgcactttatttcttttattattacattgtaatatataatgaaataaatatacactcaccataatgtggaatcagtgggagccctgagcttgttttcctgcaactagagagtcccatctggaggtgatgggagacagtgatagatcatcaggcattagattctcataaggagcacgcaacccagatccctccaagcatggttcacaatagggttcgtgctcctgtgagaatctaatgcagccactgatctgacaggaggctgaactcaggaggtaatgccagtaagcaatggagagctgttgtaaatacagatgaagcttcaccacccacctcctgctgtgctgcctggttgctaatgggccgaggactagaagctgcacggggtccgtaaatatctgtggggtaggtaaatatccaagcagtccatggcctgggaattggggatccctgctttatacagctagctttctataacttctaaagctgtaatctttctgttcttagcagttctcttacaggaaagaagacattgaactaaaagtgccttctataacttctaaagctgtaatctttctgttcttagcagttctcttacaggaaagaagacattgaactagaagtgcctttcccaattaaaaataaaaaccacagaacattagtgaattggttgacagtaatacattttgattatgtaaatataaattccataggctacttagtgattatttatttatttaccctgggtatcccaagaggtagtacagtggccacaggttatagagggcggtcttgagatctgaatgaggagagctctaattctagattttataatgcctgtggcttaacgccatcctgctctgcctggttcttcaagatagttgctacccccctcaaataattcaagccttggaatagcacagattgtgttagaacttcctgaatcctaaccagctagaatccactggcttgtttttgcgatatcagcctgttagaagcatatccctataaagatttaatatccctgtctctgcatcttggcacctgtgaatatgaaacaacagcataaatatgattttgaacgttgcattgtcacagatgaaaaaatgcaccaacatgtcaaatgcagcgctgaaaaaggaaatcgggcttatttttgtcgttgtttactgtaccaaagcatttttgaaaacccaaatcgaggagataaccgtttttgaatgaacggcagtgcaaagcgtggtcggggttagcagcaacgtggctgggcgcctttaactcggcgtgacctccgggtcccaggcccgcgtcccgggcccagcgcccaggcccgggcggcgcattggcccctcctcccctcgcgcgccgcgcgcattgttgtcctttagcgattggttgttggaccagaaacagctgtgcagagccgtgccatctaaagagctgtggacctgaatgcagcgtagcgggctggcggtgacttacaccgggactccagagggagagaggaagcgctgcaggccacttgcattgcgtcttccaggctgcgtggacccggcgccccggcgtgtgcggttgtgggggagctcgccgtggcctcccctccctctggctttagcttcctttggggttggcgcaggtgggccaggcagcgcac

SEQ ID NO: 33120 - DNA, 2300 bp, Homo sapien
gagcgcggagcccccgacaaatgaagctgagaagctacagaaaccttccaactgcttgcaagcttctgttactagcgtgtgattgtccttctgcctcagatcttctgtctcattcgatacagcaaagtttacgacactgggactgatgtttacatctttggaaagacaagcatctcaaccacagtttttgtgtttacttaaactgtgctgctaagtagggctagggcaaaaaaacaaaaaatctttatttcagagtattgcttttcacatttatggctctgtagcaactgagtaacagtaggggtgatatgtatacttttgcttcactaattgtatctgagcacacataggaaagtctagacactgtaagtgtaatacgcattttcaatgtcatgcagttgccaattccattttaaaatgccacagatgcgtgttgctcccagtctgtggttaaacggtgccacagaactgatccttgacacttccaaaaaaaaaaaaacaaaacaaaacaaaaaaaatttaaaaaaaaaaaacaaaaaacaaaactaagctaccacgaaatgtcaaatgcaagggtccaccttgagggaaatagatgccaaactaactagaagggaccccggccctttgtgtgtgaattgtttatgcaccagtcatttttcactgtgagttttcgtgacactattttgcaggagcccatggaagtgtgtgagaaggggtcgcaatggagatcactgggagtgaatgttttcagggttttgttttgaagtgtcacagatgcttgtctgatttttttaaccttccgtgatcacaaacaggaatataggcctttgaatctgaagtggacaaaggaaagcaatttccagtctggctggggcacagcattaggtgattgaaaaggtgatgtggacttgtaaaaggtgttactcaaatattgaaggaagagaatttcctccttgtgatacttaggatgaccctatcttactctaatagatacaataattagtttgtttaaaagcaaaatgttctttgtgatacaaatgaagagtagggcctgaggatgttattctttctaatggaaggacataaatctattttatgtagttttaaatagaatgcctaaattaggctgtgggagataatttttagtggttgtaggaaagagcaaatttagggagtgttgaacttcaggccttttattcctgggaagatatgtatagagaaaacttttaaaataatttttgattagaaatatacatgtgcccatgtaataaacaacagaatgtgctcattctgctagtgcggtataatccgaatttgtactcccctaaaatttatcagaataacaattatgcatacatgaactatgccagagtaatgtttacagatactttgtaaccaatttcaggaggcgtttttagctggatgtgtagttaattagaccaacttatttccaaatggtttgttaacattttgctttggtttacaatgtcatgttgaacacaaagaagacccagcagcaaagggatgaccaataatttcatcttatagcaaggagacattccaacgttcccatgttttattttctgagaacagtgggacagatctgtagtaatggaatattatttgcaaaagggttacatatgacacaagtaagtgttctgacataaagttttatttagttcagtggcatgtgctgttgggagccatacaccataaaatatatatatcccaaaataaatctagaatattttcacctccaatttcagtaattggcatatgatttgtgagacgcatctgtttttgtatgaggtttaatcactagcaatctgtttaaagaatccagtcctatacacagttggactcattcttgaaacctttaaatgctccctcatagtttttcagttatttggaagttgcattgggtcaaactgaactccttgagtttggtgtaaattccttttttctgcttattatagtgaaacttcagcatgtttcttagtaaactcccataccattgaaatgcttaagccagttggctttcagtctcatgccttatttcctccaaggcatgcctcaacgcattgtttgtctcattgcttaaatatgtccagaaggaatgatcatgtatctaatagactacatagttggttcccttggggagttatatatcatacagttactaaatatttgtctaaattcattttttccaaaaacctgctctcaaatttttcttctactctcagttcataaataatataaccattgaaacaacacatcagcctctagctgatcctctg

SEQ ID NO: 33121 - DNA, 2300 bp, Homo sapien
cccttccccttccccttaccctttcccttcccttcctttccctcccttcccttcccctccccttcccttcccttcccttcttcgcttttcttccctttttctcttcctttcccttcttcccttctattctttttttcctccttcccttcccctttccctttcccttcccttcctttccctcccttccctttcctccccttccttcccctcccctttccttcccttcctcccttttcttcctttcttctcttcccttctgttctctttccttcttcccttttcttcccttccctttctttctctttctcccttccttcgtttacttttctttctttcctttttctttctttcttccttcctttcctctttcttctctcttttctttttctctgtttatagcaacaataccacacagctcaaagaaaaaagaataacattgttttcaaagtaacaaccttttaggataaactccccttttccttattttttaataagaaaaaaatttaaatttaattataaaaagcattacctcttattggaaaaaagaattctgatccttggccaagtcccctgagaggggagtggtaatttggccaatgtgtttctcttttgcagcataatttaaaaagtgacatggtgatcctgtgtttgggcttgactcaaatacaacagaaaaagagaaggagaaaagacacaagcagagggcagaggtggaagagggattttggggttgactgagagtggctggtgtggctggtgtctatcttccttccctggaaagtttgcccagagcctgcaagtttcctcaggagacaagcaatgttataatgcgaataacatctaacatttgttcaacacttgctatggaccatgcatgttttatgtctttttttttttgaggcagggcctcactctgttgcccagcctggagtgcagtgatacaatcacagcttactgcagatatgaccacctgtgctcacacaatcctcccacctcagcctcctgtgtagctgggaccaggcacgtgccgccaggcccagctaattttttaattttttatagagatggggtcttgctgtgttgcccaggctggtctcaagctcctggcctcaagcaatccttccaccttggcctcccaaagtgggccactgcactcagccatgttttataagccttcacatgaattgtgttgtttaattttatgtagcatgacggagccactctagggaacccctggactctgggtactttgtgctaactctgtctgctccccagctcacatctgcctccctgtcactaacctcctcctattttccactccgcctagtcttctcggtcccaaagcctgcatggtaatttctagctctgcttttccatctcaagctctcaatctccagctctctatttcatttccatcctcctggggcaatgctgcttcagaccattctgccagtaatgatttcccattgtccaactctggaagcttctcattggctctagggctcttctacgaaccacctcctcctatgggcaccagcagctaaatcacatttgaaaaataaaataataacaaataataacactgcatataaaaacataagtggccaagacatagacaaataacttttttaagtgctgtgtctacagagacacagctgggaagtttacaaatgggcccaccgaaacgtattgtttcctgtttatgcactgagtccagaggtttgcgttactaaattctaagtgaaaaagagtttaaatgaggccatgatgtgggataacagcaaattaaaatcttgcccttttccttggttcctccctttggttagctcaactgcaaagttagtgttgactttgtcatcttctaaaattccacctctgtgggtgcttgtatttctggaacgttcaccaaaaataataagtttgaactctctcccctggtgttaattctgggttgtttggaacccagtttatctgaaggagtcggtctctggactttctagtaaagggtgagcatagatgtgtggaaaagggggtgctgttcctttaaattctgcaagtgaacttgactcaggaaggccagcggctcaaggtccagcccctggaagagagaatagctacagattctccatcctcagtctttgcaaggcgacagctgtgccagccgggctctggcaggctcctggcagcatggcagtgaagcttgggaccctcctgctggcccttgccctgggcctggcccagccagcctctgcccgccggaagctgctggtgtttctgctggatggttttcgctcagacta

SEQ ID NO: 33122 - DNA, 2300 bp, Homo sapien
gcttgacctccctgccttaaatgatcctcccacctcagcctcctgagtatctgggactacaggctggctaatttttaaactttttgtagagacaggttttcaccacgttgtccaggctggtctcaaactcctggactcaaatgatccacccacctcggcttccccaagtgctaggattacaggcgtgagccatcgtgcccagcctactacaaattttaaaggctctttcttggaatttcattatccaagtaaacattttgggagttacctgctccataattatttattgatagatttatttaactggaaaagaaacaccaaggcctttatattccccatcctagtttatgcaaaattggttagatgtcttaagcaaagaaaaaaatagtcctaacaaccacttgaatttctaaatgccttaaacaatacctataggctactaaactggccagataatattacaaaattggctgtgctgtgtttttcatttcaaccctttctctgtaaggaagggtccccagaaaagaacagttcactttcacttcagtaactggtggagattatcctcccttcctttttcagactgtcccatagacttcttgcactgggaaatttgccaagttcctcacattttagccacataaggcaaaactcaccggaaacatgcatttcccttctcttccagcaacaatgactttacccagagtcaccaggaagtcctgtccactgtcagctgtgcagtatgtgtgtgtgtgtgtgtgtgtgtttcacccaaaatgtggcatgaaacagacttacataaaaaacaacagaaaggcctttttgcagcactgcttggaaacccccatcctgcttgataagccttcttcgctgtgttgcccctgcaggggccactcctgcctaagctgggtggtggtcccccacctcacctgtgggcagctcatcctggaggacacagcatgggtgagggggtgcctattctcagttgtccctaggcacaaaaattctgctacttttcttttttaggaaagtgattcccttccagaaaatatttttttcttgcttcaagtagaatacttttttttttttttttttaaatacagggtctcactgtgtcaccccggctggagtgtagtggcaccatcacggctcactgcagccttggcctcctcaggctcaagtgatcctcctttctcagcctcctgagtagctggggctataggtgagcacaaccactctcagttaatttttgtattttttgtagagatggggttttgccgtgttgcccaggctggtcttgaactcctggactcaagcgatctacccacttcgacctcacaaaatgagggcttacaggtgtgagccactgcacccggccagcactctcagaattgatccttgtcatgttcctctcacccatcactgtagctgaagccctggagaagccactgattaccctctaatcgtcctaggtgttggtttctctgttaacataatgtctataatcggaactcttaaccaggaaaacttcccaaacaatataaattcagtgaaaatatgtgcactgctcatacctggttcccccggtactgttgctgcataagaagtcaccccttaatttagtggtttaaaaagatcatcttatttatgctctcagagtctgtgggtttggaatttattttattttatttaattaattaattaattaattatttaagatggagtctcactctgtcacccaggctggagtgcaatggcacgatctccgctcactgcaacctctgcctcctgggttcaagcgattttcctgcctcagcctcttgagtagctgagattacaggcaagtgccaccatgcccggctaatttttttctatttttagtagagacggggtttcaccatattggtcaggctggtcttgcactcttgacctcgtgatccgcctgcctcagcctcccaaagtgctgggattacaggcatgagccaccacacctggcgggtttggaatttagacagcaggagtggcttgtctctgctgcatgacagctggggctgtgaccactgtgggtaacgcagcagctggggtgtattatggtctaacggctcctttccttatatgtctaaccctggcctggagcactggaggatgaggtccgctgactgcagcgtccatcctggtcctccccaggcactgtggcctccctcacagcatggctgccttgggtactcggacttcacgtggaaggccagggctccgagagcaaatgccccagcaagacagaagctcagccgcctttgatg

SEQ ID NO: 33123 - DNA, 2300 bp, Homo sapien
cagggtctcactctgtcacccaggctggagtgcagtggcgccatctcgactcactgcaaccttcgcctcccaagctcaagcaatccttcgacctcagcctccagagtagctgggattacagatgcacgctaccatgcccggttaatttttgtattttttgtagatacggggtttcaccgtgttgaccagactgattttgaacttctgggctcaatcagtccacctgcctcggcctcccaaagtgctgagattataggtgtgagcccctgcgcctggccagggatgccgttcttcactctccagtaagcagaatggctccagaagggagggcgagggctaaggggcagaggcctgaagtcctgtttgctttatcttctggtttcagtgtgtgtgcagggctgcgagcgctggcaggggcatctggctgcccgaggcacacacgggtcatgctcactctcatcctggggctctgagcgagggtgacactgagcccagatgcggtgactctttcttccacagctttgagtaaatttcttccagagacatctgcatcttggcgcggcttggctttgccctcctgtataggttcttattatttatttccggaatttccggagtggggcatttactcttcattttaaaggactggctgtgtgggaattgtttcagaggcggcaaggcacagctcttactggtaaaacagaaagggaagggcatttgtgtggggacttttaaccacaatgaaaaggttgtttgctttatagccattaaaaagaaggggaaaacctcccaccaaaaggcaaaataaccacacacatgagcacacaaagctgcaaaattcttggataggattaatttcgaattccttgattagattcaagttggtgtttcacaatagccacatcattactaattcaaaggaagttcaaggccttgggaaagaaagcctccatctcttagcacagccgtgaaaatatgcattttcctgtaagccttcagaaaatgacgtctgagctagaagaaattaacctaatggcagttcaggcaggaagcttaaaataagcttaactgttgtcttcttcctttttaggttggtttccctccaagctgggatttgaactctcttatctccagggttagggttgcagacggagttgtaaggacagaaagggaagaggaatacacacatttttagctgacggacttggccccagctttgcaggctaactgaaactcccaaggccttgagatttttgaaaactgccatatttcctctagttgaagactcattttatattttttcacatgttaacatttatgaaattgggatgtgtaatgtacgccctgtcaaaaaattttccagcagccatttagaggagtgacacgtccacgtggcctacctggcctgtggccacacctccttagccagcttcgtggaagtatctgttcatccattttgtcactttgttttgttattttcattggtggcacagcacactgttaacttagattcatgtccctaattgccactgaaagtgtctttcacaaagataactctgctttacagcattggagcaaaagtcaccatgcgtgcaaaagattgcctggcacatgccaggcattaggcatcgcccccactgcacagagtaaatgacacacttttcaaagcaaggggaaattggtatgactacttcatgcaccattaaaaaaaaaaactattattcaggctccaaaatctttaaaagcttctagtgattttcaaaagaagctgcttaatgtttatctttaaaataaggaaaaacagaattataagtttggccaaagaggaaatgccaataaaccactaggattctctatgatgccctcaaattacattgtcaatcttaagtgtgctgacgaggccaagctcataagcatggccggaaactggcattctccataccgctgtgagtaactgtgggtgtccaaaatcatgtggaagagtatttagtctctgataatgaaacaggccagagttaaactttggtaatgaaagcagcatataatggcatggataagtgaattctaaagtcatttaagaagacacacagtaagatgtgcctctctctctctctctctctctctctctttctctgtctcttcctttcttttcctcccgtttttctttctttttttttggcgggggacagagtttcattcttgttgctcaggctggagttcaatggcacgatcttggctcaccgcaacctctgcctactggattcaagtgattctcctgcctcagcctcccgagtagctgg

SEQ ID NO: 33124 - DNA, 2300 bp, Homo sapien
gtgtctcaaagaatggtggctggagcctccatatgagtggaggaggccaacctctgacggcaccccacctaggccctcagagccgtcttcagagctggcctgggcctggcagtgagtgtttcctatgtggaaggcaacatttgcgctttgtaggactagcaaaagacctagaagagggcggagcatgggagctcatgtctgtaatctcagcactttgggaggtcaaggtgggaggactgcttgagcccaggaatttgagaccagcctgggtagcatagggagaccccagctctacaaaaaataaaaaaaaatagctgggcgtggtggctcacacctgtggtcccagctactgggaggctgaggtgggaaaatcgcttgagcccaggaggttgaggctgcagtgagctgtgatcatgtcactgcactcccgtctgggtgacagagtgagaccctgcctccagaaaaaaaaggtgatgctcttcctgcggtagaacttaaatttggttaggaaaagagagtggactatacacagctgagaggtgtataggtaaggcaagggataagatgaaagactttacttaaaacaactgccctaaagcaatgtttggtttttcaaaggagcagtgtaagatcagtgagtaacataggagctggaggcagagggactactttaggcgggagtggtctgggaagcccttgtggaggaggaggctaggtcttagagggcggataaggacctgcaaggccagggaatgaagagcagagggcacgggatgagcacggagcaggaggtgtctgcagcagtcagtgggccagactgcaggaggcatacaaggaaaaggctgggccagactgcaggaggcatacaaggaaaaggctgggccagacagcaggaggcatacaggcccagggtgaggcccaggggctgggggtcacggaaggatgcttgtaactctggcatgttctgggcgcagggaatagaggagagaggaagtccatggcaagctgggaaggagagttattgagacatcagcccaaatgccaaggaatagaattttcagagctcaattttggaggaaatgaacaaaagaaggaagggaccaatcaggattgagaagaggattacagtgtcacactgtctgtgaggtcctatagaatggaggcttgcacctgacccatctttgcttttggagcccagattagatgtgaatgcaggcatagatagggtgaagatgagtgggggacagtgtggaaggtactttgttagtgattcccctctggatctattccgatggaccaggagaagtctatcttagaaaggaatctggaagcagcagggaggcattgtgtggactggcggaggaagggtggtcagactatgaaaatgattttcaaagggaaagtaagttaaaggaaaagggggtgatgtcaggtcagcggggaggctggcattgaagaaagacacttgggtgagagactgcattcgggtaaaagcaaaagcaaaggagatacctgtgcaggcttccaggggctctggaagtaaagtcaggagggacgggtagttggtggaaaactttgggaaagccaaattaactgattcctttcgagctttaaatgttaatattgggggttgaaagcgtttgtataacccagattctcaaaaggaatggcttggctatcataattttttcccacaactgctttgctctgcccaccccttggctcttggaaggatcatccccaaaggcgttggggcctctgagcaacggaagcctcaaaacacggccagtgcagtggggataaagcctccctctaggcaaattcctggggaggagtgtgggtcctggtctccaatgtccataggaccctcccagcggagggcaggcctggaccatcctgtgtctccagatagccccctggccggtgcgagggctgggcttgcacaggtggcacagcccctgagtacaccgaccccccagccccctggtccccagccccaggaaaggagagaaggaaagagtcaggcggggtgtagaactctgcagtgcagacaccacactgagtggcaccaacgcctgacgctgtgtttctctccctcaagggcaccatgccggtggaaaggatgcgcatgcgcccgtggctggaggagcagataaactccaacacgatcccggggctcaagtggcttaacaaggtgagtgggtcagggtgggtgtatgtgtgagagaggtcctggctgaaacacgcccatgcggactgctgaaagtaaaatcgtgtgtattcaaaatcttaggcttatt

SEQ ID NO: 33125 - DNA, 2300 bp, Homo sapien
tgaacgagaagttcaaagtgacactttgcattcttcccttcttctccactctcctcttcccgctccaggaaaaataaaggaagatgattgttttggtacaggaaaaaaaaaatgaatactaggtttttaacttgtgtcccgggttgggtaaagaatgacaactattctatagtttgtatagactttcccttagtggtcattgctatatgacataagaaagtcagtgcctgggccaggcactgtcacaggcctgtagtcccagctacttgggaggttgaagcaggaggatcgcttaaggccaggagttcaaggttacagtaagctatgatagcacaacctgagtgacagagcaagaccctctcttttttttttttttttttttttgagacagagtttcgctcttgttgcccaggctggagtgcaatggcacaatctcggctcaccacaacctgcgcctcctgggttcaagcaattctcctgcctcagcctcccaagtagctgggattagaggcatgcgccaccaaacctggctaattttgtatttttagtagagatggagtttctccatgttggtcaggctggtcacaaactcccgacctcaggtgatcctcctgccttggcctcccaaaatgctgggattacaggcatgagccactgcacccggcctaccctgtctcttaaaaaaaaaaaaaagtgagtattataatagaggggataaggaataatgtgtatgtgaggtctatttctgagaccagagccacaaaacagaatcctgcaccttagccattttcttaccacacgcgttttcttggatacttccatttttccagtctatataattcaatacttctgtgacagagaggtgttggagttttttgttttgcttttgttttttcgcaactctttacatacaaacagctatggtctcccaggaaggaacttcctctgttgagtacagaagtctgggaaaagactggtgaaattgcatgcgaggaagaaacaggtctaactaaatgtgaatctatacttttaaagcaagggaccacaaagggtaggtcccaaggaagttgcattgcttgctgcacttgtcacacgggctgtactttcttctctcatttatttccatttacagcgttgaaaactgaggccttaggctttggttgaaaaccgaggccaagggtgaccagccagtgagttaaggaggccccagccgaactttgctggaagtgctccagcataaagcctctctccagaaccagccgccactgagacgtcttgaagtcaaagtaactcacacccttgtccacctcgccctgcggtgaagaaacttcggtcgcacaggctccagaactcatcttggcgtgggctgtgacttactgggggatgggcctccttttcgttctagctcctaaatggagcggagcgccaggtggtgtcagagggggcggcggcccctccaatggtggcaccctcagccacggataaggttccaattaggtaaggacgcaagtaatgctgtcgtttcggctgactgctcctttcattccttggaggtggtcggtgtcacaaaacgaattttcatttactctcaacagtcacaccagccctgctaactggatggtcgcagccccgtgccttcgccggacgccctcctggaaccttcaggccaccctgaggatggagactcgggtgcccgctctcctcccctaccgccgcgggcctgcgccccccgccccggaccccgactcggacgttctagccgcacgtgcgggcgcccctgggtgcgagccgcggactcacgagccgctgcttgttgctcccgccgccgcgacctggggaagcgaaaatgaaattgacttttccgagaaatgatgaaagcggcgctgcccgccaatgagctgctgcggcgaacttccgcacctcccggccgggccgctcgcgccctccctccgcctccacctcccggttgcacaagcttgaaacaaacactggggaggaagggcggagggaggagggcggagaggggaggcgagggagggagcgcggccggaggagggcggggggtggggggatttccagccgcggctcttcgcagtttcctctccttgttttgctttcgatctggactgttctcaggcaagccggggagtaacttttagttttgctcctgcgattattcaactgacgggctttcatttccatttcacataccctagcaacacttataccttgcggaattgtattggtagcgtgaaaaaagcacactgagaggtaacatttttcaaataatagttgtgact

SEQ ID NO: 33126 - DNA, 2300 bp, Homo sapien
gctactcgggaggctgaggcaggagaatggcgtgaacctgggaggtggagcttgcagtgagctgagatcgtgccactgcactccagcctgggtgacagagcgagactccgtctcaaaaaaaaaagacaaatggatagcaaataagcacatgaaatagatgctccacatgattagtcattagggaaatgcaaattggaataataaggagatactactatatatatgttagcctggctaaaattaaaaaggctatcaatactggtaagggtgtagagcaactagaactctctttcattgctggttggtatgcaaaattatatagccacttggaaaacagtttgacagattcttataaagttaagcatacacatacattttctatacaacctatgccccattcctatgtatttatttacccgaaagaaagaaacatatttacataaagacttgtatgtgaatgtttctagtcgctttattcatagtagccccaaactggaaataactcaaatgtccttcatgtgatgaatggttaaacaaatggtgatgcatgcctgcaaaggaatactactcagccataaaaaggactcaactatggacactcataacaatatgggcaaaatcaaaagctccctcctaagggaaagtaaccagacaccaaaggttctgtattgtatgattcatttacatttcattatctgaaaggaaaaactagggaaagaaaataagatgagtgattaccacagtcaggaactagggaaggggactgactgtaaaggatcatgaagcactttttggggtgatagaaaagttctatatcttgatcatcatggtagttacacaaccatatgcatttgtcaaaacttgtcaaactatacttaaaaggagtgaattttacttttgtatattatacccatataaactcgactttaaaaaacataacaaacgggccgggcgaggtggctcatgcctgtaatcccagcattttgggaggctgaggtgggcggatcgtgacatcaggagatggagactatcctggccaatatagtgaaaccccatctctactaaaatacaaaatagtagctgggcatagtggcacatgcctgtagtcccagctactcgggagactgaggcaggggaatcccttgaacctgggaggcggaggttacagtgagccgagattgtgccgctgcactccagcctggtgacagagtgagactctggctcaaaacaaaaacagaaacaaaaacaaaacattataaatgtagaaaagccgctaaaaaaagtgaaggcagtgggcagaggaaccagtaaggagactgaagaaagaatgaggtttacattagggcagagattgctgaattagagacacagagcttcaaaatcctcctctttaaattcagaaggacttgagcttgatttttatttattatttattttttattatttatttatttattttgagatggagtttccctcttgttgcccaggctggagtgtagtggtgcaatctcggctcactgcaacctccgcctccctggttcaagtgattcttctgcctcaacctccctagtagctgggattataggcatgcaccagcacgcctggctaatttttgtatttttagtagagatggggtttcactatgtcggtcaggctggtcttggactcctgacctcacgtgatctacccatctcagcttcccaaagtgctgagattacaggcatgagccaccgtgcccagccaagcttgatttttagctttgccatatactgattgtgtgatcttagggaagttatttaacccctgcagccatgtttatttatccgtaaaatgcacatgataacaatagtgcccatctgtggtgcgcctactacagtgtctacagaagaggctattatattgttggagttgtgtctatggggtaaaagtgataggatgtggtgattgattggatcttgagtgtaagggagtagaagggggcaagggtgattcacaggtcctgacttgggtgattgagtgccaccaactgacatacaaatttggaggaaagacaatgagttcatgtataaacatgctgagatgaaagagctgctctgagggacatctcggtgaaccttccacagagagttgcatagagatgtccagagctgagtttaaagtgaaaggcccattttgattgaacttttaaagcaaacacattttaaaaatcacaatatagaaatttagttgtatttttaattcaggctcgtgttgaatatgtctctcgggggttcccaatgatagtccaatggttaatttta

SEQ ID NO: 33127 - DNA, 2300 bp, Homo sapien
acagtggctgagcccattttgatacagtctggtctaaccaccttgcctggccctctttcagctatcttgcaggtttacatcgtttcagtgactccgtatgtcacctctaccatttcttttctaattattatttgctgaataatcctaaaccaggtctactttttctagatagggcataaaagtaaaaatacaatggatgggcattcactgtgttatgccaggccccgcatttggggcaagacactaaggataccaagataaaccaagtccgtccctcctggagtttgcttgcaaatctagcagggaagatagtaaacaagcaactgcaaaggatatgacacatctctcttagggaatgctggctgcagaaagaacacagcataggaagatttaaccttaaactgtttaatgaaaacagaaatttaagtagcagctcttctaatcaaatgtgatggcgggagaaagggagtgcagaggtgttgcaggcagacactaggtatgaaggtcagcattgccgtgcagaaatcgaaccggtgctaaagataaggaggggtgggggcactcaggacccaacacacgcaggggtttgttagccatattaagtgctgggtttaacctaagggcaaaggacgagctttctagactttcatttcataaagatccctctgcctgtgctgtaaaaagtggactgcaaaggagcaggcgggtctggaagtggagagaccagggaagaggctgctgtggtcagacggctgaaatcagagatagagagacgcggacagatctggcagacatttacaaggtcgacaaggcttggcgactaagcaggaaaagaagtgggtgggcgagagggggctgcgaacgatgttttccggtttcctgcttgggtgccacttactgagaatgggggaagaggcaggtgcagggcacacccaccgaaaaccagagcgccgagtgtgagcagggctcgctaactcctcacggcctgggatttcaaggcgacgccaaccagctgtggccacggatacacagccacaggtatgagctgcgagcactcacgaaactctgcagggccgaaaaggaattggagtttaaaccctgcaactatctctctggaagagctaaaccacattgtcaacccgggataatccaggccccaggcatggaaggcagcagagacggaagcctcgtccaaaattggaaggatcagcccccagggcgagtatctcacagtcagcacccggccgccccagccctcgcagcaccgcttcccggggccactcctccgccggcggtagcgccgtccgtttcccagcttgccgctgccttccgccgcctgacccggccttccggcactcggccggccgccaggtctcccgccctcggagctcggtgccccgtgcccgacctcccggccccgggctcggttcccctggccaggcctcccgctgcctggcctccccggcccggcctcgcgctgcccggcctccccggtcccagcccagcctcccgcccccgggccaggtctcccctccgatgacctgaggcctttccttaggttacccccaggtccctctccctaaatcaaaagccttaacccgctgcctggcttccccggccccggcccaggctcccgcctccgggccaagtctctcgctccgcgggcttcactgctcgcccccgcccgggcgaggtggcaaaacaaacactccgccttccagaccgggcaggtacccgggcgggcgcagggcctgggagaacgcagggagcgggggcagggctgacggcccggagcgagggcggcagtcaccgcacagcctcctcataccttctacaaccgcctcacaatagcacccatccgctaggagccgcgtctgcactgcttccgcggcccgccgccgggagatgtgctccagcgccagccccgcctcccgcccgcccctgtcggcccctcgcgccgcctccgctgcggcccgtcccctagctcccgcccgcccgagaacccagccccaggctgggccccaggaggcgcccgcccaccgcagcgcgccccgcccccgcgccccgcgtcctcacgccctggtcccgccctcgcgtcccgcgccagtcctcccgctttggtcccgccctgaggctcggcccggctcccccgccccggatttgaaatctaggtcttcctgagagtccgcgggcttccgctcccagcgcgggattctggagggaaattgagggagacttggaaaccgcgccaggcccaacgggtacctagaagggagacaaagccaggcctgctgcccagt

SEQ ID NO: 33128 - DNA, 2300 bp, Homo sapien
aataggataaggactagttcaaccacactagtcccctctttgcaaattactgctctgcagagccactgttaaggttgggagtgggtcctatttctcagttttattgaggcagaaaaaggactgtcaaacattggtgttcactcaattcaggagggataaagaaaggcctaagtcttatttgtgggatctgagtttaactcctgtgactgtctttttagcaacagcaaactacttaaccccttttttttcttttttttgagacagagtcttgctctgttgcccaggctagagtgcagtggcgcaatctcagctcactgcaacctctgcctcccgggttcaagcgattctcctgcctcagcctctcaagtagctgggattacaggtgcccaccactgcacccggctaattttttttgtatttttagtaaagacagggtttcaccatcttgaccaggctggtctcgaactcctgacctcgtgatccacctgcctcggcctcccaaagtcctgggattacaggcatgagccaccgcgccgggacttaacctctttaaactcggccttaacctctttaaaccttatcctctttaaattggaattcctatcccgagggattgttgaaaggctgaaacaaacaaatgtattatgaaaatgtaaaagcatgcaataaactcagcaaggggtaaccatatataaaactaagtatatttctgtgcagaatatagtccctatagtcgaataggcgcaagtgttagaaacaggctctgccatggggtccctgaatctgacttctgaatgtcaagaactttttgaaatctgatgcagaatgtcgtgctcacatgtgttggtgaattcttctgcgaaaatgattcacagtttgcttcagggtctgaaatgagttcacgacccaaaataggaaggggatcggtagggcagtgtatatagcacaccattgacgtaaccattaataactccatcttaggagaagaccccatttttacatttcataaggcatttgccaacaagcatactatactttaataaacaaataaaaaaatagtccgcatccagccaggtaaggacacaaacaagcactctcttccattaccagttctcaccacaggactctgtgactataaaagatggggccttcggcagctcccaacagccggcttaattgacgccgtctttgcagaaggacctctcggcccaaaccaggcttcttttcctcttcttcactccctctggattggttcgttaatctctttgccccatctctttttcctcatgatgttaaatgctactttgttgtgggatgcttaacttgtaacatttatatgtggattaagtacactactatgatgcgtgagcggcttgagcctgtgtgtcaggctctgactacccagtgaccagcaagtgctgagaactgcctccttgggaactccacgcagctcgtggcttttgtgatcgaaagagcgtccacagcagcctgacatggtggaaaacacagcatgcgtggacctggttatttctagcctggcaccctgatgacaggaggttaaggcttttgatttagggagagagacctgagggtaacccaaagaaaggcctcaggtcatcgcagaggagacagaaattaccggtgggcgtcccggcctgctcctcttcttcccagagctcaaactgggcagcaggcctggctttgtctcccttctaggtacccgttgggcctggcgcggtttccaagtctccctcaatttccctccagaatcccgcgctgggagcggaagcccgcggactctcaggaagacctagatttcaaatccggggcgggggagccgggccgagcctcagggcgggaccaaagcgggaggactggcgcgggacgcgagggcgggaccagggcgtgaggacgcggggcgcgggggcggggcgcgctgcggtgggcgggcgcctcctggggcccagcctggggctgggttctcgggcgggcgggagctaggggacgggccgcagcggaggcggcgcgaggggccgacaggggcgggcgggaggcggggctggcgctggagcacatctcccggcggcgggccgcggaagcagtgcagacgcggctcctagcggatgggtgctattgtgaggcggttgtagaaggtatgaggaggctgtgcggtgactgccgccctcgctccgggccgtcagccctgcccccgctccctgcgttctcccaggccctgcgcccgcccgggtacctgcccggtctggaaggcggagtgtttgttttgccacctcgcccgggcg

SEQ ID NO: 33129 - DNA, 2300 bp, Homo sapien
gtgatcttttgaaaccccagtctcatctcactcctacgtccacctcctggtagggctcccctttgcctgtatgcatggcatagagggcccctgtgccagtttggatcctggggtgagtagacactgaggcagttaggaatggaaggggtttattagtgttacctgtgaagggtaaagttggaagaagcaggattgggcagaggtggcctcagactgcactgcagtgcctacggttctgaacaacccactgcggagctctggaggaatgagggctgttaaaaggaggcctggcctgtattgggcagaaacgtcgaggccccagacccttgctgtgcttacttgttggctagagactgcccacagctgtggcctctgcccagctgctgcagtggatccagaaggcgctgcagtgggtgcagaaggtgctgcagctggaggctggcactgaccataggagatccatgcagcatgcctatgtgggtgccctgcagcccgtcagtcatagcctttgactcttccctagcgttcgttattttctcttagaaaatacattctatctgtgctctgttgcatgtttcttgaacatgctgggctgttttacaccaccaggcttttacattaacttttccatctgctttaaatgtccttcttcacacttgttttcctgaaaaaggtttttttacctgtcagcgccaagtgtcataactgtgatgcttttcctaataccccagctgtgtctccacatcatcttctctgtcagatgcttgccaggtcatcactctgcaccatctttggccttcccactagacagtgaaccctttgaaggaaagcctctcaattttaaagtaattttattcactgtgctttgcattttgaggttggtgttaaataaatttgttgtattgaacagaatgaaaagatgagttttcatctcccatcagaagttagggctatttttttcctctttaaaggataaaagaaggtgttcccttttctgtcacctaaggatgggcctagtggattagcttttagtacaaatgatggcccgtattcctgggactggtaacttggagaaaagtgcagttctcagacatcaccacaggtgctgcagtaatggaacaggttacttgcttgcctgggataaactcatgtggcctgggtatgggaagatgtgggaggcagcagtaaacccaggaaggtggcagacttgtatgtgacaaataggatatttcctcattaaattgagtctgttttcatgttgaatgagcaagttagagaagacatgtgaatataaatggaatgtgtacaagatattgatggcttgtactttttacagttcagacacttctggaaatgaagcaagtgaaatcgaatctgtaaaaattagtgcaaaaaaggtatgtaggagtattcactcttctactttaatttgtaatatagtttgattggatgcaagtacagaaaatgttctgtaaaatatttcatttcctctttagattggatgcaaatagagaaaacattccgtagcaccatttttcataaagttctatttttaggatatacttttatagtaaaaaccaaaatatttttgtaactgaagtgtttttcattaaagaggtctcacatctctatgtactttgtcaattttcatagcattcttgtactgtggttaggttgtgattttaaaaggcagagtgaattgctgggagtgattattgtaacctttgatttaggtttcctgtcctatccactaattaagttgccgtcttcctattatgttcaattttgaagtgtagaagtgagaaatgtggactatatatatggttttctactattacagtaagaattataagcatttctattttctacataagtactgctgttttttctttcacacagccaggaagaaagctcaggcccattagtgatgactctgaaagcattgaagaaagtgatacaaggagaaaagttaaatcagcagagaaaataagtacacaacgtcatgaggttattcgaaccacagcgtcttcagaactttcagagaaaccagctgagtctgtcacttctaaaaagacaggaccccttagtgcccagccctctgttgaaaaagagaacttggcaatagaaagtcaatcggtaagaacgtctgccatcccctaggagggcaaaaaaagtttattgaaaaattttggggaagaaaatgaagcattttctctttccttcagatcttttcaaagataaattttatattttccttaatgtaataaagatgtttgttttagaaaatctagatggtatgg

SEQ ID NO: 33130 - DNA, 2300 bp, Homo sapien
ttgacctataaaaaataaatttgtggaatatgggttcttgtttttttttttggtaaaaatgcgcggaaagggtcataactatggtgtttcctcagttattttaactatttcctaactcttgtgtttttttgctgtttaatagcgcaagacgttcaaagaacactttagaaagaacacattccatgaaagatgtaagttacctttttgtgttgtggttttctcaaaattgacagtacaaaataacattttttgggtacctcagttttgtagacttcacttggcaagttcaatgtttattgtagtgaaaaagtgtgttcattttcctcacactttttccggtatagtggataaaatgacttttgttaatgttttagaatttcctttatttctgagccgagtttggttttattttcgtttagataattgacttcatgtaaaaattgtacagtgctgtaagcttttttcacttaaagccatttctcctcattgtacttttcaagaattgttttatgatttcatgatactccacttagttcacattacaggtttacttttctttagagtcttagaataaatgtatgttaaaggcatgtgcatttctttaacgttcttgatagctaattccagtttttttttccagtggcttgtgtgattgacattgtaatctcacattaacagtgtatgacagtgccaggcaccccggaaggagttccttctgcttgttctgccctgggctttctctgtcctgcatagtccttaaccccagcctgcagacgatagctctcttcccctctgggaaaccctgggatccccctgcagggttttgctcagcgctctgctcccaccccggcattacttcacgggttctttgggtggatttctctcagctgtcctgccttgcccctgccattggtagccaaagtacagtgtgcctcggagggatttctctaagctccagccttagctggaagcccagagtgcctggaatggattcagctttcctgtccttccctctgcaaggcagtccctggtggaggccccctatgccttgggaggggctggaagacctgccagctctctccacattccacccccaagcactccaggaatgattctttcactgggggcatctgaatggtcaagtttttatatggtttgccaattttatttgacctcctttataccttccagaattttcttatttttgtatctgttaatagtacccttccacattttctggaactaccatgaaagtttttctcattttatgtatgttttcatgtttcattagatttggggtagcagacttcatgggtgtatcagtatattgaactctaaaccctggtgtcctttagtcaggagtttttacacatgtgtacccttaaaactgtttatgaacttttgggtatatgggcatatttccggagacaggacccatcactttccctaggtcagaggtttaggcaaactggcccatgggccaaatctagcctgccacctgtttttgtatatccctgcaagctaagaatggtttttaccttttttaatggttgaaataaaataaaaagactatgtcataatatgtgaacatgatatgaaattcaaattgcagtgttcaaaagtcaaattgtattggaacacagccatgctcattcttttctgtgtggttactgtctgcattcatgtgacagtggctgagttagtagtcaaaacagaaaccttacggcctgcaaagcctaaaagaatttactttcttgtcctttatagaaaaagtttgccaatccatgccttaggttatcaaaaaattctatgtccccaaaaagtgttagcttgcttctttctttttattttaactgaaacattgtaattgtacacatttgtggggtctgatttgatcttgccatacatgtctatgttgtataatgacccaatcagggtaggtagtgaatccatcaccccatgcataaggattgcttccttaggcagcagtgattacaagaatattcttgctgtataaatcaacctattgttctttgtgagagccaactcaatgactcaactttattcacttttagaaagctggtcaaaagtgcaagcctattgacgtgttcgactttcctgataattctgatgtctcaagcattggcaggctgggtgaaaatgagaaagatgaagaaacttatgagacctttggttagtactttaaatctttatcctaacataactctaaagcaacaacatttaggccagatataataaaaaatagaagtatcttcaaatataaaaattagttgcctgca

SEQ ID NO: 33131 - DNA, 2300 bp, Homo sapien
gccaacggcttaggatgcatttcaagggtgagcctgttgatgcctgagtgtttcccatctgaaagacaaaaccacccgcggttttggtttgttttgcttgtccccctgcccaagaacccacaatggtccctggaccctgctgatcggaatagttgcactcaccgacgcagcagcagaaacactagttttcctcccagaccacatggaggaccaaggaaggtcggatttagtggcccttaccaacacattctcgaaaaactgttaagggtcctaagcattctcctgttagtattgggactttatccctgtcctataaagatgttatgccccaaaaatgaagtggagggccataccctgagggagggaagggatgtccaaggctggaagagtgacaccttttatcttcacttacatgaataggaaggatacaatttctgaggctcctcatagcataccttcaggaatagcttttgttaggcctgcttgtctgaggagggatcctaaaattccagaaaagatagtcccccccaccaagattgtgccattgcactccagcctgggtgacagagcaagactccatcttgaaaaaaaaaaaagaaattaaaataaaaaatataaataggccgggcgccgtggctcacgcctgtcatcccagcactttgggaggctgaggtgggcagatcacgaggtcaggagatcgagaccttcctgactaacacggtgaaaccccgtctctactaaaaatacaaaaaaattagccgggcgtggtggcgggcccctgtagtcccagctacttcggaggttgaggcaggagaatggcatgaacccgggaggcagagcttgcagtgagccaaaatcaggccactgcactccagcctggtcgacagagcaaaactccaactcaaaaaaaaaaaaaaaaaaaaaaaaagaacttactcatgtaaccaaatagcacctgcaccccaataatttatggaaaaataaaataaataaaaaataaaagcaatagctttagtaagaaagggcacttgcagcatacctaccaaatatcatataaagtttagaaacatacaataatcaatacattatttggggctatatcaaggtagaaaaccacaggaatgatacacataaaatcagaagagtggttattctttggaggaggaggataccattcagaggggtacccaagagttatatataaaaatgatccatatccccatgtagtgctggttacacggatgtttgtttttatctttacattacacgttatattctttcatatgcatgaaacgtaatatttttgtcgtagtaaaatatacataacaaaatttagcattttaaccgtttttaactttacagtattgtggcattaagtaccttcaccttgtgcatccatccaccactatttccagaacgttttcatcatcccaaactgcttttggtatcatatccaagaaatcataccaagtccaatgttatgaagtttttgctctgttttcttctaagagttttaattttagcctttatagttaggtctttgattcattttgcgttaatttttatacgcggtgtaaggtaagggttcaattacattcttctgcattacacatttttaaacacaaacaaaataaaagaacaaaaggaaccctgtccatttacaaatgaaggtattgggatagcggtaaagtaacatgctaagctcagacagctgataaaggcagcaggggctggaagccaaatcctgtaggcctggaaagacgactgcggcctcagcgacaacagctgcgaacacgggtctccacccaccctcttacctgcccacgactcagggacactagctcctcccctttccccaccccacaaggggccgtcccacgtggctcccgggctttctggcgccggaaaactggcgatgcgggtgggcgcgaaagcccggaaaactttggcatgttttggaccgtaggtaactggttgtgcggcatggactccagctccgttgcgctgtaataaccagacccagttttccctcacgctccaggccagggaggagcccgggggccgctcaggaagtcctgcgcacgcgcgcgtgctcggcccggattggctgttcggagcggcgaggggcttggcgggagcttccagtcgctcgagagcggagagcggcaccatggccccgcgggggcggcggcggccgcggcctcacaggtctgaggggtaagtactgccgaccctcgggagcgcggggccggagaccagcttgaactgcttcctcgcctgccgtggtttgcgcctcccgg

SEQ ID NO: 33132 - DNA, 2300 bp, Homo sapien
ctactttacccattctgcagcaagcaagatttttctaaatcacaagtcttaccatgtgattctcctgcttcattgtccagaggcttcctattgttccctagtctgaactgcttaatggagtgagaggggggggcttctcgaaattgattgtgcatctagtcacctcagaatttttttgtttttttttttcagacagggtcttgctctgttgcctaggctggagtatgtggtatgatcacagttcactgcagccttgacctcccaggcttaaggattctcctgcctcagcctcccaagtagctgggtccacaggcgtgcaccaccaaacctggctaatttgttggtttttttgtttctcaccacgttgcccaggctggtctcaaactcctgagctcaagtgagtctccagcctcagccccctaaagtgctagggttacaggcatgagccaccttgcccagccacctggggatcttaacatgaagattctgattcactaaatctgcaattctgcatttctaacaagcttcctgggaacaccagtgctgccggtctttgtgctacactttgaggagtagggaactgaagggcccctgcttgcctccctggcctcatttcttgacacttccccaactctgttccagccatgcctcagttattccagctcccaaagtgcatcctgcttttgctcactgcaaagcctttggacaggctggcctccctccccagagcactctcaccctggcctggctgctcctacaggattggagatggcactttgcttagaagccttccctgattctctaagccctggaaacaaagagcatgtttgtggcctgggtgagaatgatctttatgctcagtgataaggggtgagagagctggcctataaggtgcagggcagcagccagaggtttcgttctacagcaggttctatgaagaaagttgctgcgtcacctgggaggtgcctctgccaggtgccatctgctgagtccattcctgcctgagcagtaagggctcctgaggtcaggacactggccaaacaaggtcagcctcacagctgtgtgtattctcaggtcaaccaaaagtgctgtcagagtgagcaagttcattacagagctgtgaaaacctttttaagaaagttcttttccaaccacagcttgagggagagttacagacacaagactctgctgtagacattttacttcttatttttctgtccttatttccttaaaaaaaaaaacaccttttctctgggatgtccttccattttctctttctcaggttatgcactcggttttttacatctgtttcagttataaaattactgcttatgcaggttggaagtctgccattccttggctaaagaaatcctgaattttgctagcatgctcctgccaggatcccagcaccagactctcctgaccctttggggagctgagaatggaatctgaagcatgagacattgcatggtcatgatgtactgaccagacctgtttagccatgtgattgcagcttgggtaggagcagtgccagttaggtctggaaaaactaaaacaacattagttacacagcaaataagtttagcagccgggtaacagcacccaggaaatgttgaaaagcatgtgacataagaagagatctaatgtcgttgtttgctacaaaaaatctttctgccctctaactgtaaaaggcgaggagtacttcctttctggattttatttcctctttttcttaaagggaacatccaaaagaaatgatcctcctctgctcccccatgcctgccctcctgggatgtgttaagtctgttttgtagtgttatagttacagaggttgaacaacgggtctgcttaaaacagataacttcattaaactgccaagttgagtgagatattcctgtgtactcagtaattagtaactgctgtaggaagttatataagaaagtgggaaaatttgagacatcagttcttttcctctccgtcatagagaatcatactctgccttatgggaaattgacaggaatggactggataaattgtggaagaatatcatttatgtgaaagaggaaaagggttaagcaagggcaactaaaatgtctagccttattcatcttcttgaactgactttgaagcagtatttacaacgtctgaaagtgaggcgctctgtgctccaatgacatcgtcgaatctccaggccctttcttcatctgccccctggtggacccagtgctgaaaagaaaattcaacagaaaagctccctggagaaaagcttgagtccaataagaaatggcaccccttctgtg

SEQ ID NO: 33133 - DNA, 2300 bp, Homo sapien
ctccagacatcgaggaagaaaacaggaatttggcctttgtgtaggaaacatttcttgaactcttactctgtgcagagcactttggaaggaaaagttgtgttcctgctattaaggaacttgagtcacttggtgagccagatgtgtatgcgcctaattcagacaggaggctaaatgagccagcaaagccttgctagtgttgaccagtcagtggtgccaagtggtgacgctgaataagcacgggctctaggaccccttctctgtctctgcacttggccaaatagccttggacaagttcctcagtctctctaagcctttgttttcctctctgtaaaatgggatcataactgacctctgtgggatgttattagaattaatcaatagtgtgtattaaatacctttcagtgttgtactgggatccatcctggttggaaaccagccatcagcccattcataaccccctcccctctgatcaacagaatggcaccttgaaaattatcgaccggaaaaagcacatatttaagctggcacaaggagaatacatagcccctgaaaagattgaaaatatctacatgcgaagtgagcctgttgctcaggtgtttgtccacggagaaagcctgcaggtatgtgctttctgggtcttgaatcttgctgcatacacattgccattgcctggtactccaggggctttaaatgtgattggaagtttgagacgcctatcacttggctttcatgtctaatctgctagaatatcattgacctgttactgatttttgttgcttggcatttcctgctcaggaaaatttgttctctttaatttccacatttttattttacttagagaggtctgatgtaccaaggggaggttggataaacatactgggggacaggggcatgggtaatatatgtttccaattatgaaagaaaatattgacatgggttataagaaagtttacaattttcaaacatattaaacccagcctattgatgatatgcttcctaatcatttttgagcaaacggtggttgtgaaccaagaatactcaaagttgaaaatcaaaatcagtattgcagtgaaacatgtatggtatttgccaaaatgttggacagatgatgccaaggaagagaggatctggtttcctgaaaattaaccttttggaaagttgggtcaaatggtatttctagttctagatccctgaggaatcgccacactgacttccacaatggttgaactagtttacagtcccaccaacagtgtaaaagcgttcctatttctccacatcctctccagcacctgttgtttcctgactttttaatgattgccattctaactggtgtgagatggtatctcattgtggttttgatttgcatttctctgatggccagtgatgatgagcattttttcatgtgtcttttggctgcataaatgtcttcttttgagaagtgtctgttcatatcctctacccactttttgatggggttgtttttttcttgtaaatttgtttcagttcattgtagattctggatattagccctttgtcagatgagtaggttgcaaaaattttctcccgttctgtaggttgcctgttcgctctgatggtagtttcttttgctgtgcagaagctgtttagtttaattagatcccatttgtcaattttggcttttgttgccactgcttttgatgttttagacatttgacccagcaatcccattactgggtatatacccaagagatttataaatcatgctgctattaaagacacatgcacacgtatgtttattgcagcactattcacaatagcaaagacttggaaccaacccaaatatacaacaatgatagactggattaagaaaatgtgtcacatatacaccatggaatactatgcagccataaaaaatgatgagttcatgtcctttgcagggacatggatgaagctggaaaccatcattctcagcaaactatcacaaggacaaaaaacaaacactgcatgttgtcactcataggtgggaactgaacaatgagaacacatggacacaggaaggggaacatcacacacgagggcctgttgtggggtggggggagggagggagggatagcattaggagatatacctaatgttaaatgacgagttaacaggtgcagcacaccaacatggcactaacctgcacgttgtgcacatgtaccctaaaacttaaagtataatttaaaaaaaaaagaaaaagttgttagattttaaaattattttaggatattttcttataagagaatgcacttatttttctttgagattgcagctattttcgt

SEQ ID NO: 33134 - DNA, 2300 bp, Homo sapien
ccaccgcgcccagccactaaaaatatttagaatatgtaataccatgtcattcattgaacagatacttaccaccgcactaaaagagtagaacctctgtggtcatcactaaaaacaacatagcctggttttttactgagtcccatatcttcaggataaccaagagaaataccacatttccatgttgtacaatgactagtaaatgcacattttttttaagttacctatatttaggaaatttaagatttctggaaactggcctgaaatgctaaaactgaaatgttggatgttgtccatatgttgtgtaacccctgctgtggtgataaaatgtttgttttttccattacccctatagtgtgtaatgctgtgtcatggagctaaaatcggatttttccaaggagatatcaggctgctcatggatgacctcaaggtgcttcaacccactgtcttccccgtggttccaagactgctgaaccggatgtttgaccgagtaagttccaagcagcgaagtcccaggactgagcactgacttggacgcaggggcttgggcttgaattgggctgtgccatgtgccatctgtatgaccctggacaatcctcccaatcttacagaacttcagtttactcatctgtaaagttagaatgcgtttacctctcagagtggctgataaggattataagagaaaatgcatgaacacactttgtaaaccatggtcacaacacaagcataatgtgggaggtcattttatttttacaataaacactttgagcctctgcttcctcatgtgtaacacggactgtttacctcttctctcctactgtttgtctccaaaagttgctaatgggatcacgtaagaatagtaactatgaaatggttttcttcattgtaaagctccttgcatggacatgtaaaacattacttaattggccacactgaaagaagtgactaagccacagcagagcccaagagaacaccagcccctctgcggtgggtatcattgcgtggaccgcacagccagggccaggcgcgaggggcatgagcaatctccagaaagagtgttcacttactctttattttgaggcaggacttttgttatctctcagaacgttcttatgtttttaatggttctttttaaaaggacaactttatcaacatataatactctgtataatttgctgatttaaagtgtgtaattcaaaggttttgagtactttcacagttctccagccatcactacaatcaattttagaacattttcatgacctccaagagaaacccttacctattctttatcagctccccgaccccctccacccttcagcatccgctcatctgtgtatttctctattctggacttttctgtggatggaatcatgccatatgtgctcctttgtgactggcgtctttcacaagcatccatgtagcacgtattagcacttcattccttttaacggccaaatagtattccactgtatgggtataacgcattttatttatccattccttttttttttttttttttgagacagggtctctctctctgtcatccaggctagagtgcagtggtgttatcatggctcactgcagcctccacctccagggctcaagcagtcctcccaccttagcctcctgagtagctgggaccgcaggcatgtgccaccatgcccggctaatttctgtattttttgtagagatggggtcttaccatgttggccacactggactcaaactcctgagctcaggagatctgcccacctcagcctcccaaagtgctgggaatacaagcgtgggccaccgcacctggcctacacattcctactcgatgggcatttggggatgtatgtgtccattgctcctgggtgtataccgaggtgtggaattgctgtcctgtgctgaccatgtggggccgttagaggaccggccaggctgtcagagcagctgtgccattttgtgttccccagctgtgtgtgagggttctgatttctccacactctttgactctggccatcctagtaggtgtgaaaactttctcatgtcttgcctcattagattttcggacaagcaaacaccacgctgaagcgatggctcttggactttgcctccaagaggaaagaagcagagcttcgcagcggcatcatcagaaacaacagcctgtgggaccggctgatcttccacaaagtacaggtaacacgtgactcacagccactgctcccatggaaaccgacttcgcttttcagagttctgggagggccttttttgtgagagggagagatgaaggtaagggagagaataacatgtttttg

SEQ ID NO: 33135 - DNA, 2300 bp, Homo sapien
gtatgactcaatagattagtagatctagctggcttagaaaaatggaagcatctggcttgaagaaatcgaatttattcttatacctgcttgtgtccagaagacatgctgactcaatccctgtgctactgacttttttttttttatataaataaagatggcttcttagagttttgtggtctttcaaggggaaaacagcattctccacagctggactgtgactgggcttgtagaatttagtttttttcatcccaaatgaacacatcaaaatgtttgttttgatggaattttatcatgaatctagaactgcaaaacaaataagaaataggttccttcctgtatttatgagttcattcaacaaatgtttgctgagcacccactatatgtcagacactgtgttggggtgccaaagcacagtgactcggcctctcttcctgaggtaccacgtaaggcaagacagacctaaacaccggtgctttctctgtcaagtggtaagtgtgggcgcagggcagaaggattatgggagctcagtcaaggagggctccctggaggtggcacctgagtagaatcttgaaggaaataggggcggggaggccaagggaatgcccacgttcacacctgtgtctgggagtggagcattttcatgtggtggagtggcaggaaagacagccttcctcatgcgtcacatgtgcctaaggagctgggacctgatttctatgttgttggctgaaaattccttctgggaaaaaaccgaaactcagaagcctagttccaggccaagtggatgtgagtgggttgtgcccccttcccccggctgtgcctttttctgtcctgtgtgtcagagttctgcagatgatttcattagaaaggtgcagccggaggcagtggggtacccctgggtatggtagtgaaagagtgatctttcacctttgtccagtaggtagggcagtggctatgtggccagtgccttcagacacatcttactgcatcttgcatgtggcagtgtggccagttattgtctcacttctttcctgcacttttctagagggattttatcaaaacagttttgctgctagacaaggtacttcttcccctattccagggcatacagtgccctgctgccagaggggtcttccttgagccccacagccgctgttttgctgagaaactctcagtggctgctccgtgctctccagccagaaccatctgtgccagtcagatcgctctcactacccctgcttttgatcctgccatcccctctgttagcatctccctgcctccctctgtctctgtctctctctctctctttctttctctttccaaaggcaatctcagttacaccctcccagtagcatctgtagctaccttggccgatggtgggctttcttatctctgggtcagtccctgtctgataattattgctaattatcttttaacatatttgcctcaattcttcaggcggattttaatttatctttctttctctctttctctcctttcctttccttccttttttcttttctttctcaatctctcctctttctctctctgtcctctcatctttctttctctctctctctttccttccttccctccctccctccctctctttgtacatgcatacatacatacatacaggatctcactctgtcacccaggctggagtgcactggtgtgatcacagctcactgcagcctcaacctcctgggttcaagcaatcctcccgcctcagcctctcaagtagctgcgacatggtgtgtgccaccatgtccagataacttttgtagaggcagggttttgccatgtttcccaggctggtcttgaactcctgggctcaactgattcccccaaccttggcctcccaaagtgctgggatcactggtgtgagtcagtgtgcctggccttaatttctttttaagaagggggcatgtgttttgttctcattctgaatcccttatagcacctggcacagagtagtagctaacacagatgttaattttgctgcgtcaaatgttttcactttgaatctctcttgagtattgttctccttattgattacatgatgacatcctgttttctctccctgacctttactgtttgtttagtgggtgattattgaacaaggatgctttgcttattcgatggtgatcgttccactttatgatacccttggaaatgaagccatcacgtacatagtcaacaaaggtacgtctgtgatctttgcctggattattggcatagttattggttaggttcagtgactttacatttgcttacatttgatttgacaaagattttacatg

SEQ ID NO: 33136 - DNA, 2300 bp, Homo sapien
tgttcatgatggaaagaggcgtagctctcctctgttcccactctcctttttttttttttttttttttttgaggcggagtctcgctctgtcgcccaggctggagagcagtggcacgatcttggctcactgcaagctccgcctcccgggttcatgccattctcctgcctcagcctcccgagtagctgggactacaggagcccaccaccatgcatggctaatttttttgtatttttagtagagacggggtttcaccgtgtgagccaggatggtcttgatctcctgacctcgtgatccacccgcctcggcctctctaagtgctgggattacaggcgtgagccactgtgcccagccttacatgttcatattctgtttatttccatagtcaccacgggaagatgggaagatcctgactttgggcagagcacctgagaggaccccaggatctaggtaccttctctgcgtgcagtttctcaaacaagtggagcttcctctccatccatggccctcggaggaggaaagtgcctgcatagcttggggccagctctggctactgtgaaaggacatttgatcctctctgctgttcagttgtgctctcttctcctggtgtggtctcttgcttcagggcttactttgtggttagctgagtccagtaaggtgaagagtcttctggattatttcagtggcaaaaagccttttatttccttctttagctttcgtaataacaggccgtgcttgtcttgcctaatacccttagaacatgctgtcatgttcttcaacttgcggtcatagagacacaattccgactcttcctgtgctgaacatcagctgaaataacatgccgtattgatccagttcatgagtgagaagtttagtctacacaagccttttctgtcttgctctttgcagaaggattgcgtcagcctaaaaagcggatctttttgtctccatccgctgccacaaagctgttgacggaggctatctgcccaagttggctgccttctctagctcttatcagtaaacttatctgcctcattgtgacatatctacaacagttgcttagccttattcaatcagtattggaagacaagtggaatcatctttcttctcataggaaattttttgaatggaaacttgccctcttaaatatgtaccgccaaaatttagccctgctgtcccacgcaaaggctgtacatgacctggatatcgtcatggggcatgtcctaactataatcatcattttctcaagtggatgtacatgacagatctttgcagctgtgtgtgaagagagaagggaggagagctatatgttttgttttgttttgttttgtttgctctggagaatgttgggcatatcctgttgtcagcattccgtacatctcaggtggccgcccactagctctgtgtttctgggagcattctcctcactagagccctcgcgtgggactctggatcttgtgcttgagtcttgtctgtttccctggtttggaagattctcttttctgtcatagaaaactcacagaagttggagtccagccctggtatggggctctgggctcaagcctttctgatatttgctgttttacttaagaaaagtacttatttgatctcttcccttcccccggggcagccttgatttgttttaaatgaatcatcagtcgtctgtccaaatctcactgtatctcagcgtcttctaaagacagtagcccttagagttgatggcagtcttgggctgacattctacataagtgaaacaatttgagaaatataaaacatgatcaaaataagagcaagagaatatttttatgtcccctttacatcagtggctcgcacccttttctttttcccccagtcagccaggagatgttctctactcctttctggtgtgcggtgtaggagtctggtggcgggtagaaggagactactgaagttggaaaatgcttaataccccctttctttttggagaatcactgttctatgaatatatcctcaagggacttgctgcagagacacagtcagaatcacagagggtctgacacggtcagaatcacagagggtcattcatgactcagtagatgtttgttaagcacctgtccttggctcgggactgtgttaagaaccaagggcatataaagacagatgggaggagaccctggccggggagaggaagaagcatctacataggtactaagtaccattcgctgtaagtgtaagacaggaggtgctaagtaccacacaggggttacaaataaagaagtcctggagttcagaggaaggactgattgcttctcatagaggggatt

SEQ ID NO: 33137 - DNA, 2300 bp, Homo sapien
caggggtttgttgttgttgttgttgttgttttgagacagagtcttgctctgtctcccaggctggaatgcagtggcgtgatcttggctcattgcaacctccacctccctgggttcaaacaattcttctgcctcagcctcccgagtagctgggactacaggtacgcaccaccatgccccgctaatttttttatttttagtagagacagggtttcaccatgttggccaggctggtcttgaactcctgacctcagttgatctgcctgcctcggcctcccaaagtgctgggattacaggcatgaaccaccgtgcctgggcattcaggtatcttagaatgggaccttacttggacattacctcatgattacagaggtcatcaagttaaaatgaggcaattcgggtgggccctagtccagtatgactggtgtccttatagaaagaagggatttgcacacacacaccacagggaagatggtgtgaggagacatagggagaagatgggcatctgcaagtcagagtggccgggcacacatgctctttcatgggcctcggaagcagccagccctcccacgccgtgattttgtacttctagtctccagaaccaggacagaccatacatttcggttgttgaagccacttagtgtgtggtacttcgttccagcagcccttgaaaacaatagaccacagaacttgggaggtgcctgcagaggttctggggctgagggaccggttggagaagaggaaaaaggagaggcaaagatgacaaaatcacggatggggaggcgagatctggacagaaaaaccagggattagccaagcgggaaccagtgaaaacgaacgtggagtccattttttctagatctggaagatggagatctaaaaggactgagctgctagagaggttgctggtgtgtgcgttgtcctcaccccactgcaccactgcgcccagcacactgtgggagacacccagggaaagtccttcagttatttgtgggagtgaactgcagtgtggctgaggcctggagcgaaccacggtcagtttcccctgcctgcagcccaggcatagccctgcgttggttgtgcccacactctgggggcagcctgagtgccaagtgtggtactgctctcactagcatttaacctctgtgccccagcttcctcttctgtgaaaggacagtaatgacagtacctacctcactgggttatgaagattaaatagaataatgtgtacgcagtgtttgtagcaatgcctggcatcaagcactgggtaaacagtatctattattatcaaaggcctttacgacaacaatcattcttcaaacggccctccagcgaacgctgggcgcaaactccacggtaacggggaccaatgttgttagaggttgaggttcctggtaggtcccaggtgctaaaaggaagagcagcctttgggatgtgagcccgaaaaccatcgtgttggcttctgaagccccaagatgggcatggcagggacgcggaagccctcagaaccgcggaagccctcagaaccgcacagcaggtggccgccgtggtgcagcgcgcagtcggccctcagctcccctgcaccggcgcgagctgcgggcgctgcccacgtcaggctctgcagacaccagacagaaaaggtcttccggccagggagcgtgggggaaaccctgtggggccgcgcccgtcagtgtcaaggaaaaacggagaggaaggcccttgcctccagggccctcgcagcagaattctgcccggcctgccaggaggccagcggggcacgggctgagggtgcaggatccggagggcgccgcccgcccctcgggcatcgcggggcccagggtccgcggggcctctgagctgaggcggtccaatgtaccctttgtccttcctcagattcattatgaaatccgaggcagtctgggcgactccagcggcgttcgcccgccgcagcctctcgaccgccggccacccgccagccacgcgcgcccagacaggagggcggccgggcgctcggcggggcggggcctgccgggggcggggcctgcgggcggggcggggccgcgggagggcggggccggcgcggcgagcgcaccagcagcatcctggctcagccgcggcggtggcgggggcgcaaccagcgggccgaggcggcggcgccagcggcgccttaaatagcatccagagccggcgcggggcagggagtgggctgcagtgacagccggcggcggagcggccggtccacggaggaggtgagtgcgcccgccgtgcggagccgcgcctgctcccgcggcggtgcccgggcc

SEQ ID NO: 33138 - DNA, 2300 bp, Homo sapien
aggtgtcagtgctagtgaggggctctaaaagtgaaaacttcattaaattcattgcaaatccacctttctactccaattctcagttgtgttcctttatttgcaaaatacaaataatatttgctttgcctatttgaaaggttattgtgatatataatgaaatttgtgttttttttaaatttatattattatttaatgcctgattagagtttttgtgtatttcatgcgttaagagttttacatgtattttccaaaattggctacaataatacctcccttcccacattctcttcttatggtgactctgacactcctccactgagaggacactttgctccctctctttgaatttggatgtcgtcttgtgaccgcagcagaagtgatactatgactccaagagctacgtcataagtggcaatacagctttcacttggctctcttgaaatcaaactgctgtgaggaaattcaagccatagagaagcccacaaaaggaacagacagctccctccaacttcccagccatgtgagggagccactttgaaagtggtctctccaggtcccattaagctgacagggtggaacacagacaagctgtagatccatgagcaaaagaaatgactattgttgttttaagcctttagattttggactggtgtattatgcagcaactgataactgatacaccatcccagctttccagtgaaatccctctccactcacgccaaaatgagcttccccctgttctgcagtacactttgcaattccccaccactatggctttctcatgccatctcttccagaatgttttctgcctactgaaatacgacttatccttaaagtcctctctcaaatgctgcttcctctctaaagcttctctcactgcccccgccggctttcctatctccctcttctgaaatcctggagacctttgattctatcttttatacagtacttattgccaggattgagatttaggatatttatcaactgaccccttcctggattatcagccctgggagcactctctgccttgtggcaaagttggttccacaccttttcagctcctcttctagcctagaagcaccttaagggcagggtgcctcatatatttttcctccatgcaaaacataggtttttgcacatagtaaacttcacacatcatcatcattattactattactatttttgagtcaaagtctcactcttgtcccccaggctggagtgcaatgacgcaatctctgctcactgcaacctccgcctcctgggttcaagtgattctcctgcctcagcctcccgagtagctgggactacaggcacatgccaccacacccagctaatttttgtatttttagtagagacggagtttcttcatgttggccaggctggtctcgaactcctgacctcaggtgatccacccatctcggcctcccaaagtgctgggattacaggtgtgagctaccgcgcccagcccatacattattttataaataatttgttgggacttaaagacggagagataatacttaggggagaaagaagattaaacctttaaaattataaattactgagaaataagatcatttttcttaaactgggattctgaagtcacagtgtttttgatctggcagcttagagatcatttaattgggtctcacaattttttttttttttttgagacggagttttgctcttgttgcccaggctggaatgcagtagcgggatctcagctcactgcaacctctgcctcccaggttcaagccatttttctgcctcagcctcccgagtagctaggattatgggcatgggccaccatgcccagctgatttttatatttttagtagagacagggtttcatcatgttggccaggctggtctcaaactcctgacctcgtgatcctctctcctcggactcccaaagtgctgggattacaggtgcgagccaccacgcccggtgattcttacatgtttgtgtgcaaaacaatgccttgaggaagatgcgggaggggcacacaggttctggagtccccttccagacattctgaacaggcagatctgggtgggctcatgcagtcgcctccttaacaagctgcccacgtggtgctgatgtgggtagtctgaggcccacggtgtcagaagccctggttattcaggctcctgaatggtgactggtttgtcccctcctgctggagtcatgtgtcctctgaactggccatggagcagaagaggttgcatggccagaaggaaaggaaaactggtgaggagagccacagctttggggctggatttgaaggagaaatcactgc

SEQ ID NO: 33139 - DNA, 2300 bp, Homo sapien
gaatattttgttatccgagaagcctggctttcgacaaaccgtaggattgctagtatctctttatggagtggacttgaactgtttattgcaactgtgacatgtggcaaatcattttactgttctgaggctttacttccttctagttagaatgagcattaggccgggcatggtggctcacgcttgtaatcccagcactttgggaggccaaggcaggtgaatcacgaggtcaggagttcaagaccagactggccaagatggtgaaaccccgtctctactaaaaattcaaaaattagctggatgtggtggcgggcacctgtaatcccagctactcgggaggctgaggcagagaattgcttgaacccgggaggcagaggttgcagtgagacaagatcgtgccactgcactccagcctgggtgacagagcaagactccatctcaaaaaaaaaagaaaaaaaaaagagcattaaatatatgacatctttaaaactgtgtggatttagaactgaggtatcttctttgttacctgaggagggaaacatgcttatggggctaatgtcattttaattttggggtaggtctgtctgtcttctgtggggtgggggagagtgaaaattttctctgctgtaggtgaagacctctaggctttattttcaactcatatgcctcatgctattgttcgagaatcatcttttctattcatataagctatatcatactgatcttttttttaaccttatttattattttttatttttgagatggagtctccccctgtcacccaggctggagtatagtggtgcaatctcagttcactgcaacctctgcctccagggttcaagtgattcccctgcctcagcctccagagtagctgggattacaggcgcgcaccaccacacctggataatttttgtatttttagtagagacggggtttcaccatgttgtccaggctggtctcgaactcgtgacctcgggtgatccgcccgactcagcctcccaaagtgctgggattacagacatgagccactgcactcagcccccctttttttttttaactttaaaatccacttgtgacacttttgtaaaataccatcaaccttgtgtattaagctactgttgtgacagccatgataatttccctctgaaaatggtttggagacatgaaataataaaaataacctttaaaatgcattatcactctgattctattaggaaaaacggaagtcactggatttaaactatgtcaatgccctgtactttctgtctgtcagtaggtgctgtaactgttggctaaatgattatttttcatgcttcctttctcatttctgcttttttagatatttaaaatgtccttgtttcttggtgagcagaattatttcctacctcatgaccatgagtcatgaccttatactcttctttcagtacaggagaaagcttcattaatttactaatgcattcattccacaagtaaacttctgcaatcctcgtttattcatatactttgacaaaaacaaagagacccacaagctttttgagtcttcacaacccaaaacatgtatttgaaactgaaaattcaatcattccatgtttataggcatattgcttgatagaaacatataaatcattacctgaattttttttttttttttttttttttgagacggagtctcactctgtcacccaggctggagtgcagtggtgcagtctcagctcactacaacctctgcctcccgggttcaagctattctcctgcctcagtctcctgagtagctgggattacaggcgcccaccaccacacccggctaattttttttttttaatttttaatcgagacggagttttaccatgttggccacgctggtctcgaactcctgacctctggtgatccacccgccttggcctcccaaagtgctgggattacaggcatgagccaccgcgcccagcctggattttttttaatccaacccagttccatattttcctctagagagactgactcaccaagcctatctccttttcctggaaacacaatcaaattaactttccagtcaccgctgtgtctaggtgtggccatatgagtagttctcaccagtggaatgtagtgaaaacgagatgctgtctcttagggactaaggaagctatctttcctcttccgacatttgctgactggtcgatgctagatgatcttgagaccctgtgctgaggactggagaactacaggaaaggagcagtatctctgaattatcgtgtggaaggtcacttgtctagcccctgatgactgtgaggtaagtcgttagggat

SEQ ID NO: 33140 - DNA, 2300 bp, Homo sapien
ttcagcttgatttcataagagaaagaaaaacagcaaccctccaaaagtagaaagtacatcatccgaaacctaagttcctttcaattggataaatttagctttttgaaaagcttcctacctggtctttatttttctcatgtcctttcagaccagtgaaaacgtaaccactggcatctgtcctgggcttgcttttgagacacacgaacctatccatctttttcattctagaaaattctcacccatccttcaagatcagttcttgagtgaagtatttgctgactcctgaggcagaggtagtcgctatccctttgtgtatctccttgttacgacaaaacatatatcgatttttgatggtgatttcttggtcacatggaacatggaatcactaaagccccttcaaaatcctcttaagctggccgggcagaggggttcacacctggaatcccagcactttgggaggccgaggccatggatcactggaggttaggagttcaagaccagcctgaccaacatggtgaaacccccgtctctactaaaaatacaaaaattagttgggcatgatggcagttgcctgtaatcccagctacttgggaggctgaggcaggagaatcgcttgaccccaggaggtggaggttgcagaaagctgagattgcaccactgcactccagcctgggtgacagagccagactctgtctcaaaaaaaaaaaaaaaaaaaaaatcctcgggcggtgggcagtggctcgtgcctgtaatcccagcactttggaaggccgaggagggcagatcacctgaggtcaggagttcgagaccagcctgaccaacatggtgaaaccccatctctactaaaaatacaaaaattagccaggcatggtggcacgtgcctgtaatcccagccactcaggaggctgaggcaggaaaatggcttgaacctgggaggcagaggttgcagtgagccgagattgcaccactgcactccagcctgggcgacagagtgaaaccccatctcaaaaaataaaaaaatcctcttaaatagcctctcttctcccacatttccattccctatggcagctgctcttccctctatttctctttaaaaaacatctttgggccaggcacagtggctcatgcctgtaattccagcactttgggaggctgaagtaggtgaatcacttgaccccagtaggaggagtttgtagtgagccgagattgcaccactacactctagcctgggcaacagagcaagatccgtctcaaaacaaaaacaaaaacaaaaaaagcaaaacgtcttcagcccttctgggcacacttctacgtccccgctacccaaaactgcactggtgcactggaagagagttcagtgaaagctacatctgtcctcagcccaaacgataagccacggtgcctgagccatgccctcatccagcatgacagtgagctttctagccgaagtctgtggtcccaagtcaacgatgagggactcatagcagaaagatctgaggccttgcacatacgcacgttttaaaaacaatgaaacaatgaataaaagttctgtagtgacggccagtagtgacagtccatgaggggacatcctggtactttcccctgtttcatacttttcctgttactataaccatagtctctaccttctctagaaagatgactaaaacatgtttaggacacctgggcagctgtactgagataccagcatgtggcaatccagccattatgggagctgcactactaaagcacaggtgcgtcctgcccattcttaagcccaattaggaggcaggggtctttgatggtggaacagagtggaccctgctgtgcatgatgtacccaggctgtgtcaactgcatttgtggcttgtcccatgaccctttggcccatgctgctgtgagggtggctgttggtcagggttgagaggccagagaggagtgggcaggcagcttcaggccccacgttggtgttggcctgggcacctgttggatcaacacaataactgtaccctggagttcctggaagctgccttctgctcagccaggcctgcttgtgggcggagcccatgccagctacatgtgtcaaggaagccacagcttggctagtgagcaatgcaattctgggaatgttcaggctctctctgttctttcctctcttgcaaaccatgggcacccttgggtcccttggggtcactatgttacacctgctttttatctgtctgggcaagagctgctcaagccacaccttgtgacactgaggtaagagcagaacgttgcagagtgtgcaggctggagtgtgtgcta

SEQ ID NO: 33141 - DNA, 2300 bp, Homo sapien
acttagagtgacactgattagcccaatgttttcctttttttacattttggacatatttcaggctcaacagttttcttttttcccctatctggtggcctgactcactgattttttctacattcttttttagtatgaccatgcttcccacagttaaaacaagctccaggaaatggagcatttcctttatctactctcagtcctgccattgcctgtgctagcagagtagctttatgcagattacctccgatgccatcacaggcattgatataatcaattaaatgcactttccccctgataggtcgcagagcagcctggcaatcgggattagcattgtcgaaagctaataactgcaacactatatcctgagcagccgaatctgcaatcatctttttaagagacttctgtaaccgagctataaaatcaacgtatggttctttgggtcgctgttttatagcactaaaggaagggtattgttctccacttgaagtgattttttcccaagctctaatgcacactcctctaagctgttctatggcatcatcccccatgaccagttgtgcatgtaaaccagcccagccgccaacccccaaaagttggtgtgcagttatattaatttgaggttgggcctgggcattgcgagcagcctgaatggaagcttcatctgcccaccgagttttaaactgtaagaactgagcaggagttagacaagctcgagtaagagcgtcccagtcagtaggaatcattcgactggaaacagcaacattctttaacagtcccattacaaaaggagaacctggtccatactgatttatagcttgtttaaattctttgagtaatttaaaaggaaaaggctcaaaagtagctataatatttccctgttgatctggggggtgtattctaacagggaactgccaagcctctaaatcaccctcttgtctggcttgctgaattcctgcctgaatagaactaagagcggtcgctcgaggcactgctcaaactgtcactggggcaactactttttgcccagcgtcctctggaaaagaaagatctggagggtctttttcttcaaaataatgaggagggggtgcagaagggtagggatgaacctttccttcctttgctgctttagctttagctggtaaataaacacgctctgtaacctcttctgttacttcgctatattctggttcctcctcgtcctcagtgtgaaaaagttccaaggtggaacgaaccagaccccatacctgtcccattgttaccctgacacttccgagccccccttcttattcaccatggggattgctttaagagtactcgggtgtcctccagctacttttcctttctaaccgtcgctctggcaacccttcaacctggattcgagcccccaatggatggacaccacttgctgagaccagctcggtcagggaggccctaacccagcggcactagaggaattaaagacacacacacataaatatagaggtgtgaagtgggaaatcagaggtctcacaggcttcagagctgagagccccgaacagagatttacccacgtatttattaacagcaagacagtcattagcattctttctatagatattaaattaactaaaagtatcccttatgggaaacaaagggatggaccaaattaaaggaataggttgggctagttatctgcagcaggagcaggtccttaaggcacagatcactcatgctattgtttgtggcttacgaatgccaggtgttccttgccctcattcccgtaaacccacaaccttccagtttgggcgttaaggccattatgaacatgttacagtgctacagagattttgtttatggccagttttgggggcaatttatggccagaatttgggggagggggctgctgccaacactgcgggctctctcagaatgcagaggcttctgctttttcacgaaatttctctttgcaaggctcaagaacatccaatagagatttcccatcacaaagactgggtaaccctttcctgaaaagaaaggtagaatcatttcaacaacccctcttccttccttagtaacatagaatgttgattgtcctgagttccagagcctcaaagagcacccagcataactgtgggagaatagtaagcattggacacaaaatggtaaggaaagtgcttgaagcgacattttctttttccctttactatcccgagatgattaatcttttgaaggttgaaagttttttgtgtttgtttgtttgttgttgttgttgttgttgttgacagagtcctgctctgtcgccaggctggagtgcagtggcg

SEQ ID NO: 33142 - DNA, 2300 bp, Homo sapien
atatatgagaagaaaaaacttagaggagaaaatgaagtttgtgtaagtttcaatgtagcagtattagttttccttccttccttccttccttccttccttccttcctttctttctttctttctttctttttttttttttgagtcagagtctttctctgttgcccaggctgaagtgcagtggagtgatctcagatcaccatgacctctgcctctcgggggtctcgtgcctgagcctcctgagctgctgggattccaggcatgagccatcacgccaggctaatttttgtatttttagtagagatggggttttgccatgttggccaggctggtctcgaactcctgacctaggtaatctgccagcctcagcctcccaaaggtatgagccaccacacccggcctatttttcatcataaaaataagacacaattctaatgcacaattaaaaggaaaatggaggtataaaagcaagtgctctatattacaggatgggatacagtacactattataattaaaaaggtttactgtgtggattatgctgatccatggaaatcagtaagtgaagttttgataaagtggagcaagtgacgaatacactgaactgtaaggtctttggagatgggccacgtctacttatattcaatccacagggctacacctagttcttggtacacagtacatgctcagcaagagtctgttgaatgaacacatacatggtttatctgtttgtctcttccgagttcttgacttctgtctgctctgacctctggcagctttccactagtttctagctttcattctgcttacctggatttcggaactctagcctgccccactcttagataaacgcatgccctctgtggccctggaaccttagtgacttctgctataccaaagtctccacgcccagggtgacacgcagctgcagctccgtaaacctctaacatgatgtcagcaaatattaaaaaaaaaaagtttataaaacaatgaataaactttgttaaaggtacaaatgaaaattagcaaacatgggaagataattgagtgaagagtttaaagttaaaaacgaattgcagtcattctaggggaaggaacagttgtatttgaaaacctgtatggttacatgaactgcctaaaaaacaagctaaggaaaattaaagctcagatttatatattttaagaaattaattgcaattaatttcctgggattaaatagcatttcctcaaccccagctgtcattaaaaagaggcaaatacagccaaggactggatctccggaaggctgacagcactgaccctcaagaaggcaccggctgacagacagaacattctgccctaatatgtgctgaaattccgctgagagcagagtggtacattgaaccctttaggggcttacaaaagaagtgtcctgtgttttagagtcacagagttttgcagaaacaagtatgaattcacctagtggccccctgcaccaggtctttcctgtgggcactgagtgccagacacatcaatatgtaatagcagaatgaatgactgaacgaacgattgaatgaaaagaaatgagaggcagcaggttgtcagattctatgaggcaatcacagcatcaggtgaccttagtatctatttgagaggactgccatttattctcgggagcgcacggctctaaagaggcccatatccaggcagtgagctctggtggggggcgcctttagatgcaagaaggaggaaacagctcgaaatccctgggcctgagcgcggcccgtgcaggccggagggtcaagaactctccaccggcggcagcggcccggtgtctgccccggcttcgccccggcctaaggctgcctgtgctataaatacgcggcccacatgccgcggtgacacggtgttccctgggctcggcgggacagataacatgaatgtgccctttaaacgtcccaagttgcagggacagcccccggcccagcctcgctcccggaagcgccttcgcccccgatgccctctgcagctgggaggagggggcgccccgcacctgcccagccaatgcgcggcgcgagcgccggccgcgacccgcctcctctcgcgagagcccggcggggatataagggggagctgcgggccaggcggcggccccctagcgtcgcgcagggtcggggactgcgcggcggtgccaggccgggcgtgggcgagagcacgaacgggctgcctgcgggctgagagcgtcgagctgtcaccatgggtgatcacgcttggagcttcctaaaggacttcctggccgggggcgtcgccgctgccgtctccaagac

SEQ ID NO: 33143 - DNA, 2300 bp, Homo sapien
tcatgctgtcaaaatagtagtgatagtatcattgcatgtcgtacccaagatggtcactatagttttcaatttgtgttattttcatttctttataagtgttataccatgagctcagctcctaaatttggctggctttgtttttcatttgctttagaacttatgtggcatgacatagctcgattgtatgagatttaacacttattatgaaacaaatcttgaaatttgttttcactggtagagctgatctagatttgatgagcagattgagagacgcttctattggagcaattcttgtaattcaccagaggtatctagttgttgtataagtgcactgagttagatcttaaaagtttgatcaatcattccaaaccatttcaaatatgaatattagaaagttcaacttagaagcttcccttttgtgttttcatgcattcaggtaaagtcctatttatgactcttagaaatgaggtaggttttagagctagtcttctaactcgtgaatagtttaaggaccacatcagttgcaaaccaagtatttgttgaatcagtaaaatggcactatcagcatgaagagccgagaagcagatcctgaggtgtgtcggacagtgttttaggtaattcagtatttattatgttattagagaagacttagcgtaagaaagaaatgctttagaaattccagcaagtatttataaggcctgaaaaaactaaaatttgaacaaaaagggaaataaatcacacatttgttgaggctgctgctttaagtattagctaattttcttgttttggtttactttgatttatttgattgaaccctggaagtattatttttaccagtcccacatttaaagacctagtaatcttgatggaattggtaatggcagatagggtttaatgttgttgacttttcaaattagaattttttttctatgaaacttaggcttttatataacaaagtatgttatctcattgttaccgccgtttttcactactagccttttcagtatgcccttaaaatgtattggaaaggttccatgttaaatgacaaatatctttttcagtatgaatttttgatctgtagccacaataagattttcatttttcagtgctcaggctctgtagcatgtatgctgaatgcttttttccttagcacctttaacagtaaggtgttactgcattttacaaaacatcaattcaacatgtcttggatttagtttgtattcatagattttgttaaggatcaggcctgtgaacatgggcacagtgaggttaaataattcacctggccacaacctggctttgaggttctgcttttgggggccataattttcattcaatgttattcgatgctctgttctggtgaacaagttactatacctgctgtgtatataagcttgagctatactaaaccaaggctttattttcttttgttttttaacttactgtacttttactgtttatataacctatatttcaagagagagaagataatgctgaattttaaatttagcatttgaacatctgtccaatagtgaattaatcagtttttttaaaattgatttttaagttgttccagaaaaaaatatatatatatgttttatatatataatctttttatatatataaaaaatcttttttataaattttattttaaaaatcttttaaaaaagatttttatatatatataaagattatatatttatatatagtcttttctgttcataatggcattagtctctgagtacattttatattatctttgttgccacatgtcaggatacaacacaatagttttataaataacaactgtactttgattttaggtactaatttaatgctttagtttttactactttgaaaggggaggttcatctaagtattactgataacagggatccaacttaaagtaaaagttggaaagggcaagagtcttttaagcggaacttcaattctgttgtcatggttacttatatataatgaatataaatagacaaataggacttggaaaatgtggtatattctaagtcaagatgctatgaagttgttatagtttaagggacattcttaagaaggaattacttaagtacattactcttctcatttcaaggacatgaaaaagtaaaggatggtctggcactattttattttattttttttttgacttgtactgaatatatgtactttgaagatttacatctataactagaaagtatgctaatccgaggtctggttattaggccagattcttgttcagttattttttaaactaatgttgcctcctttttagtaagattctacga

SEQ ID NO: 33144 - DNA, 2300 bp, Homo sapien
attctatgttcaagtttttcagaacatgccatactattttccacagtggctgagtatgctacattctcacaagcaatgcataagggtttcgatctttccacattcttgccaatccttattttctatttttttgactaaagccatcggtatctcattgtgtttttgacttgcatttccctaattagtggtgttgagtatcttttcatgtgtttattggccattggtatattttctttggagaaatatctactcaagtcctttgtaagataaacttttgaccacagtttgtttatttatttagagacaggggcttgctctgtcgcccaggctggagtacaatggcgtgatctcagcttactgcaacatttccctcctgggttcaagcgattcttctgcgtcagcctcctgagtagctgggattacagatgtgcaccaccacacctggctaatttttgtatttttagtagagacggagtttcaccatgttggccaggctggtctggaactcctgacctcaggtgatccgcccacctcagcctctcaaagtgcggaattacaaacgtgagccaccgcgccgggccaaccacagtttaacaactatccctggaaagtggtgccaacacagttttattaagcactttaaaagaaagtgaaattcttgctttttttttttttgagacacagtcttactctgttgcctaggttggagtgcagtggcacgatctcggctcgctgcaacctccacctccggagttcaagcgattctcctgtctcagccttccgagtagctgggactacaggctcacgtcaccacgcccagctaatttttgtatttttagtagagacagtgtttcaccatattagtcaggctggtcttgaactcctctcagggggccccacccgcctcggcctcccgaagtgctgggattacaggggtgagccactgcgcccagccaatgctgtcttttaggcaacaaaaagagaattgattatacttttggtaattaagaccaacaagtacaaaatgcattgtgaaggacgaaaatagacaatccttactggaactccccgggacaggcagggtaagacccatatttcctacccttctttgcacttagatgtgaacaatatttattaactactggattgtataccattgctgctataacaaattactacaaattcagtagttaaaacaacacaggtgtattgtcttacagtgcttaaggtattaagtctaaaatcaaaatttgcaggctctagttccttcctgaggtttcaggagagaatccgtttcctccttttgcagcttctacctgcactccttggctcattgcctctgacatcactccaacctctagcttctgtgctcacagctcccactactgactttgaacttcttgtctccatcttataaggacctttgtgattccatggggttcactggataatcctggttaatcttcccattttgatccttaatcacatcagctaaatcctgtctgccacataaggtgacatattcacgtgttgtggggactaggaggtgcacatttttggggtgccatcatcctaccatacctgagagttcaacgagaagttattgtattcaatatattctgcagagatcatttttaccttagattgttttaactacccacctcgtttaccactcggcaaaggtctttccattctgaaaccagcctctggtccacagaactaactagtggtatgaactgaaatttgctgatagaaaatatcacaaacacacagccgccgttcttttttattcttggtttggtagagaattacaagataatcaaggcagctttccctattaacgcacgagaacaacggggcctacccgcgccgccctaggcagccgggagcagcagtaacgcctctagggcgccatggcaaccacgcgggctggaccgccttcttccgcggctcttctagtgtgcgcgtccctggcccggcctccactccgcccgcgtggagccccggcctggccgcctgcccgccgcgctctgtgacgcccgccgcgagggccgcacgaggcccggcgtgcgcccccgcctctcccgaagcgccgggccccacgccgcccctcctttccctttccgctctctccgcctccggaagcgcgggcgcgcggcgccgggagcccgttcagggccgcgggagtgcgccagcgccgcgcgtggggctgtggtggccgcggctctcaggtgaggggcgcgcgagcggctcctggctccctgctcgcggggcgcccgccacgctcctttccgttcgca

SEQ ID NO: 33145 - DNA, 2300 bp, Homo sapien
gaggggctccaattgggtgaaaattaacaactattttagaggcaaaagggcttcttcaaaattaatcatactgctttatttattttattttatttttgagacgaagtctcactctgttgcccaagctggagtgcaatggcgcgatgtcggctcactgcgacctccacctccggggttcaagtttcactatgttggccaggctagtcttgaactcctaacttcatgatctgcccgcctcagcctccgaaagtgtagggattacaggcgtgagccaccgtgcccgcccctattttcttaaaaaaggaggagaaaggaaactggtaacttattttgatcatccccttggcatggcaaagtcacatctagcatgaggcactcttcatttctgacttagaaggtttaagaaagaatgaaatgaggccgggcgcggtggcttacacctataatcccagcactttgggaggctgaggcaggcggatcacgaggtcaggagattgagaccatcctggctaatatggtgaaaccccgtctctactaaaaatacaaaaatttgctaggtgtggtggtgcgtgcctgtaatcccagctactcgggaggctgagccaggagaatggcttgaacccaggaagcagagattgcagtgagccgagatcgccccactgcactccagcctgggcaacagagactccgtctcaaaaaaaaagaaaaaaagaaagaaagaaagaatgaaatgcccatgaataccaattgatactaaaagcaaaagctacatctgcttctttattagtcttagcagtaattgccagtgtttaagtagcatattggcatctacttagcaagcgttatctgtatattactggctgggactatgacagaagaaaaggcaaatatatactctaaaaattatttggaccacgttcctttgcgtggctgatagcatttgaactgaatagttggtaaaaaacaaaaaacaaaacaaaacaaaacaaaaaccagaagtggagccaaagtgattatgggcagctgcgtgcaccctgttgcaccaggccgacttctttggacctttccatagctaggaattgcaggcttcacttactccaccgcacgtgtctgattccttccctaaggcggcagggtgggaaagggaaggtcgttagaaactgtgacagggagtctcgggaacggttgcctatttaaatagcgagtgaaaaccaggcagaaatgtttgccggctgtaagcaaagcgaagaggttactcgtcagtgatgagcggagagggagaattacgggatcacctgagctcaggaattaccagcgccgctgacacctgcagcaaaattttccatgaacagacggcatcctgtagaggaggaggggagcgtgggaaagagaggtgtgcaccgcgctgggtcgcgccctctccccgtggggccccggcccggaccccgcccccgcgctgtgggtgggcgcctcccggctgtcactcagcggccgcggtggctccgggccccgcccgacacgcacttcagggcggccccgccccgcccgcgtcaggctggccaggcttcagtcacaacacggtggggctccctggctgcgcccggcccggcagctacgggcccagcgcctggtggcggcgctgaggggtcgccgagaggggcccggcggcgtctgcgggggccgctccctcggtgggccgcgggcgaggcatgagcgcgggctccccctgcctccggagcgccggcgggggaccggggggcaggagatgtgcctgtccttagcggcccaggaagcagcatgcaccccgatgcgaccgacagtggcggcgccggccccagccccgcgcgggccgcaggcgccggcggccgtcctgtctcgggcttcaggggcgagcggcggccggagtccccgggggacgcggaggcagcagcagcggcggcgccgggggccccgggcggccggagctggtggaagcccgtggcggtggccgcactcgccgccgtggccctctccttcctggggcccggcagcggggaggcggcgggggccgcggggctgagctccgtcctgttcaggctcagcctgtacctgagctgcgcggcggccgccttcctgctggggatcctgtttgccctcgtctgccggagcccgcgcgcccagccgcccgacttcgccgccgcctggagccggctggccgcgacctcagccgcccgccgcccgccgggggtaagtacccgactcctggccgcccagctccgccggccctccccgcttccggtgccagctcccgcgccccgagc

SEQ ID NO: 33146 - DNA, 2300 bp, Homo sapien
atagttttctttgctggtcgagtactggcatacagtttgagggaaaaaaagaatgtttttattcgtgtgttttccttctttgtctctgaaatgttctttttcatctttgtaatttctgattgtggtgtaatttaaagagttgggacttgagattgaaacagaacaggacttgagagagttacttctaccttttattacctctgtgactttgacagttcacataatcattcagatcttaattttctcatctatagaatacacgtgatgatgtctactttttggtgtaggtgggaggattaagtcattgtacatttgaaactttttaaataaaagattaatgtccttttgctcactcaaggaatgagaacccagaggtacgtagtaggaatcacagcaaacaaatgattgatccacacggaacacagtaaggatgctgcaaagactgatgctacaacccaccagaaggctagtagatgcctcctgccacagaagcagccccacccctcgtggtgctttcttggctttaaagcaatacttgatgtccactttctagaggacatcataggaatatcctgcttggagttagtggaaggattccagggagagatctgccattccttcttccatagatcaagctgctttggccagccctctggcctttggctcagtcagaagtattttccctaacttagctgtaggagggagaggaacttgtggcagtctgagtaccaggctcctttattatctgccttccactgttaacggagaagggactgtgtaccgtttgagagagattttgatattgtttaaataagcttctcttgtaaaagtggtttttttttccaacttcctccagtgcttattagctaaatatatatttaaaaaaagaattacctttaaaagtgcttgacatgataaaggagtagcatcttaatcttactatattgaaatatcaacctagctggcagcaaagctagagtttaaaataattgaagatgccatttttaaaaagtcagcgtatcagtatatgcataaaggcttattctaaaaatttcctttcatgttgctggctttacacattaggatagaattccttcaggttgtacaagacagaggaaacctttcttttctagcgttatacactctagaaactagtttcagtctccagtgcaaaataaatttcagttaacacctgagaggcatgggtcctaaaggtactaatatgcactagtttcatttcctgtgcagtacctagtatgtttctctccctctgcttcatgttttttctcattgttagctactagttactgtaaaaatctcttatactttgcctcctcatctagaacatattagaaaacgcagcatcccaggctttcttgaatcactatcaagatactatgggaagggaagtatagaaagttctgttttccagtcctcttcactcagatcctccaaattaatgttcctgggatggagtcagtacagggaagtgcacaaccaaggttgtcaagactggttgaaaaatactttggagcctcacagaaggcaatttgccatcaaattagataacgtcgagtttatagaccctctagctcactagaaatacctgtagactttttatcctattatctcccagtcagaaagcaggctggcaaccctggtttatgctttgttaggtttttttgaaaaatgaagctgcaggtcatatttaagaaaacatctagaagacttaaaaattactaaataaatactcgtacctttttagattgttgctgtgattttggagttatatagaccctttgatgctactgaagttcgttgttatgatttcatttgaaatccaaaaaaggccatgcatttgcatttattctagcaaaagttttccagatgagttgatggttgaggaaatttgattatttaggagatggcagttactataaccaatgtgtttctcatttgaaatattttttacctaatagtacataattgaattgtttctagaaacttctttccttctttttcactctctttatttagacatgaagaacagccaagaccttttgtgttgcacgcatgcttgaggaactcagatgatgaagtaagatttctacaaacgtgttctcgggttctggtgttttgtctcctcccctcaaaggatgtgcagtctctcagcttacgtataatgcttgcagaaattctcacaacaaaaggtagacttatacagttgatttcactaattcaataagtgtgcaaactaatgtgctacatgcagaccttgtttactgttgaacatatgggat

SEQ ID NO: 33147 - DNA, 2300 bp, Homo sapien
gtttttatttacattatggttatggtctggttatgattcaggcatattcatattcataattttgtagtaatgaaaacatttcaaaatagtaccatgagggattgcagcactaacagagttagagaaacaatgtaaaacacgatcgtttataaacagaaaatgaaaaaatagataaatgatgaaaactttaaaaaatatctttggagtattccaactaggaggccgatgcaccaagtaggaataaggtattgcaatctaggacctggataatgctagtgaaaaggaagggattgataaggaagatcgtgaaggacaacagcctgcttagcgactcgcggaagatgggaacaaaggatccaagagaatgatagtgctggtgcgatccgctgactttacagaggagggaacagctgtcagttagtgtaaatcaccttgatcaaaaggagtaagtatcaagcacgcataaatgcagctcaaaacactttgctcagcgaggtcatcccttccagtctactgctgtgtcccattgctgcaggctggtgagatcaagtttagggtgtaaaagaaaaagccctagcacagggacttgggggccttggttcaagttctcttgtgctgctagcttcctgatggaatccgcacaagtcattttatttctctaggactcagttgttttcatctttagattgagtgctctagataatcataaagggttctcaatgaagatactgaaggagtcaggggttatgtaggagtttggtcttggacatcctggatttggggcaagaggggcataggaaactccttgtttggcatttctaagctgggattcatgctgtggagagagaataacctgaagagaaatatttggaagttaccattatagagacagtagttaatagtcttctgtttctgctatttccaagtcaaatatcagtaaagctgatgctgccgcattattagagcagaacaatgtattaacaatctgaagtgacttccgctaactcattataccctctgctgtctccccattaaagttcatatgtaggtgctttcaattttaaataattaagttataatttaagtacggatactttttttttttaagaaaaaataagaacaaatttagcattcctcgttgtccttactttttcttttaactcagtatgtagtaacttattggatgttacaggaagtcgctcttgtatttctgtggtctttggagttttgatgtatggctggcaaataaaaggctaatttatagaatggttctagatagctgcattaaaaatacctatgtcattgtttctcagattgaccttccctttaatttatttcaataagaatgtgtttccccctcccataaaagtcattaaagaaagccaaatttttagcgttaaaaaatctccccaaaatataattgttgagttgtttttggagatctttgcattttggaggtagtgtgatctagtgaaaatcagacaaagaaccagagaaaagtaagttgtaagtaattttgtttccaatgttctttctccttattgctgcattcttttttataagtgggaaactgaagaagtttaaaagaagaatgaacagatggacgatcctaggaacgtttagtattcaacctagagataggaactgtatttgtgaatgtagtatacattaatacacacaatataaatatagttttgttccatataaagatgtttctggtgagtcttttttttttttttttgagacagggtctggctttgtcacccacgctgaagtgcagtggtgcagtcacggctcactgcagtcttgacctcccgggttcaagtgatcctcccacctcagcttcccgagtagctgggatgacaggtgcacaccactgcatccagctagtttttgtattttttgtagaaatggggtttcaccacgttgctcaggctggtctcaaactcctgggctcaatcgatccgccctcctcggcctctcaaagtgctgtgattaatctgagccaccacacctggcctggcaagtgtttttgaatcataattgatgttgtgatgcaagagatgatatgcaattgtgaaaatactttgagggtttaaagaaaaaatgccatgtagcagattgggagaaattacctgattgttaactctctgaaaccttaaggggttaaccgctgtctcgctccattcctgctgctatgacaaaataccacaaactgggtatttactataaagaagagaaatttatttcttacttatctggagtttgggaatccaggatcaagcctgcggcattcagtg

SEQ ID NO: 33148 - DNA, 2300 bp, Homo sapien
gggatttttatctgtttcattcctagaactgtacctgataccaagtaaatgctgtgaaaggaagataaaaacttaacaccctaattcacgatgccaaatgaaaaaagttaagctgaaagctgagtcatgcaggaagctgtctttccttttgttcctcagcagaagctacagatagaaggttcaatatctccacaggtagctactctgtgtttgccttatcttatgtaaagtacagaggattacataattgactgttgccctgcctgctcctttttgtttggaacacgtggattaccatactctcctcctttcccctccagcccacttttcccctttattttattttattttttttatttttttttttttaaaggacatatcatatttattcatacacatgctggaattattggtgcagacatttaaatacattttctttgagaaagtcctttttttttttttttttttttttgatggagtttccctcttgttgcccaggctggagtgcaatggtgcaatctcagttcacaacaacctctgcctcctgggttcaagcaattctcctgcctcagcctcccaagtagctgggattacaggcatgcaccaccacgcccagctaattttttttatttttagtagagacggggtttctccgtgttggtcaggctggtcttgaactcctgatctcaggtgatctgcccgccttggcctgccacagtgctgggattacagtcgtgagccaccacagctggcctgggaaagtccattcttttttttttttttatcacttttcccctttaaatattgaagcactcaaagtcatctttggagaaaggcacagaccacagactgtttctgtgactccttgtttatttcttccaggcatgtccttaatcttggcaaaataaacttctaaactgattgagacctgtctcagatactttctggtttacaatgccaaataaatctttgtccagtgagtgaatggttaataggaaattggtattttttcagtatgtgcattttaaatattcagtaagctttattctatttaaaatgtagtaagaggtatttcagtttaccaggagtactatattacatcaactctgaccttaaaaaatgcatgttttcagctcagcatcactgatcattagagaaatgtaaatcaagaccacgatgagataccatctcatgccagtcagaatggcaattattaaaaagtcaagaaacaatggatgctggcaaggctgtggagaaataggaacgcttttacactgttggtgggaatgtaaattactttaaccattgtggaagacagtatgacgattccttgagaatctaaaaccagaaacaccatttgactcagcaatcccattactgcatctatacccaagggaatataaaccattctgctatacagacacttgcatgtgtatgtttattgcagcactgtttacaatagcaaagtcatggaagcagcccaaatgcccatcagtgatagactagataaagaaaatgtggtacatatacatcatggaatactatgcagccacaaaaaggaatgagatcatgtcctttgcagagacatggatgaagctagaggccatcatcctcagcaaactaacacaggaacagaaaaccaaacaccacatgttctcactcgtaagtgggagctgaacaatgagaacacatggacacagggaggggaacaacacacaccagggcctattgggggtgggggcaaggggagagaacttagaggactggtcaataggtacagcaaaccaccacagcacatatatacctatgtaacaaacctgtacatttacttaaataaataaatagtaaattactacaataaaattttactttattcctttaaaaaatgcatttttaccctaaatgtagaaatcagtccattggaagttaaagcaaactgacatttaaaattcgattttaaaaaaagttttcttaaattctcttaatagattcttcagtttgaagatatcttggccaatacgttctaccgagagcactttggaatgtacatggaaaggatggacaaaagagctctgattagtttttgggaatctgtggaacatttaaagaatgctaacaaggtagtatatgtaggctgaaaggaatattaatcactagctgatgtaaacttggcatgtgaggcagcatgtctgtttttctcaagataagtatacattaaaaatattttaaaccaaatataatactgacattatgttctagcccataatggcaaataaaattacattatatttttacagaag

SEQ ID NO: 33149 - DNA, 2300 bp, Homo sapien
ctagaagggaatacaacaggacttccaaagtgctggtaaggatctctttcttgatctgagagctagttacatggatgtgtttggcttgtgaaaatctatcaagctgtaaacttacatatacatttctgtatctttcatttacttcagtaaacagtttttaaatggattgctttaatggcagactagatgtggctaaagagagaattaataaaaagggagagattactgaagagattacccagagtgtgtcagagagaaaaaaaacgatggaaaatctgaaaggcaaatttaagagacatgaggagaaggtcttatcaaaatgctggagagaaaaatgaaatagattggggcctctgaagagcatggtgggttgacttgtgtttccaaccaaagatatatctgagtgctaactcctgaaacctgtgaatgtgaacctctttggaaataggatattttacatgtaatcaagttaagaggaagtcatgttggattagggtgggtgccaactccaatgactggtgtcctcataagagggaggagaggacacacagagatagaggagacatgaagggaaggccatgtaaacacagaggcagaggttgagttgtgcaactacaagcctaggaacaccagacatcaccagaaaccaccagaagctggtggggaatgcttaggatgatttttccctagggccagaggaagcatggccctgccaacaccttgattttggacttctaggctccggaactgtgagagaggaaatttctgttcttttaagccacaaagtttttgatattttgttttagcggccccaggaaactaacaaacacaaataaattatccctgagaatgtttgggagctaataaaagacgccaatccaagacaggaagctaaaaattcccaaaacataataaatatctagtcaatccaataaatacccagtaaatccatcaaaaaggcaatatttattgtattgcctggacacggtgactcactgcggtaaccgcagcacactgggaagctgagacaggaggattgctggagcccaggaacttgagaccagcctgcataacatggagaccccatctctacaaaaattttaaggaattagctggatgtcatggcatatgcctgtagtcccaagtacttgggaggctgaggtgggtggatcacctgagcccaagaggttgaggctgcagttgagagctatgattgtaccaatgcactcttctagcctggatgacagagtgagacgctgtctcagagagagagagagagagagagaagtgcgcaggtgctgggacacgccagctgttctgcttacctgtccttaactagccctgtggccttgggcaagttacttaacttccccactgtcccttggtttccccatacgttaaacgagcctcataatgaaccttatttcgtaaagttttgtcggcgctgcctagaaagccttacaacaaaggtcaatacttggcatttaataagagctcagtaaatctttgatttagttttccaaacatctccaaaacttcttttaagctacagcagcaaaaaccatgtgcagtcttctaaccacaaaaggcaacatgagttttaaacaaagtaaggtattgttttctgatttgtttcatttctgatgcccttcctgaatatgccagttttttcttagcctttttggataagtagcatattgagttaatgtcttcaatgaaaataaaacttccacatccaatctttcagtcataaatgagtgctatctgcaccatccgatagggattgtttttcttcttaataccttacctaatattgcttcaccctaagtaaagctcattgggaaatttcatattcactaaaggcaaccataagatttggggaatcatataatcaagaattgtatatatctaaaaaggaacattataaaatcctttaatgcagaccacttatagtccaacttaaagatgaggaaattgactcttaaaaagattaaatgactcttccaaaatcacaaagataattcagtgatttttttcccctactaaatgttccttttttctgcacttcattctcacttaagcaatttattgtctaaaatagcatcatggaatgatataaaaatgcagctttccaatcacactaagggtctctctatttcttctcttgaccaccaatcaggaacctttgctggaagcttgtttctgattggtgaaagtaagccataacagtggaatgccaaggagtaaatacaaaagtgtagcaacaactgagtttgctgtctcactaccctcagcctagg

SEQ ID NO: 33150 - DNA, 2300 bp, Homo sapien
tcggcctttctctatttcacatcacagctgcatgtgtatcacacactgcccccagactgaactacatatagtgctctcaatactggaagatattttacacttcttagaaatactcttcccttcctggactccttagcaaactcttactactcaagattcagcccacacatctctcatctattcggtcacttactcatcatccaacgttttttttaacactcgctgtaaatggcatcctcgttctggaaacgcatctaccagcaattaaaacatgtagaattagcactgcttaggagaacgcctataaaatatgcatcttagatcatcttccgttttagaaaattgatcccacctgctacacgcctggtgaaactccagttacttgccagtaagatattgtcccccaaatgtacttatcctgtttttgtgcattataagctttgttcagtttatagtttctaggcccattactaaagtcaagtcagatatccagctgagatacaacttttttttctgaaaacaatgtgagcaatggacaggtacgctgtgattaaagggagaaaagctgtaacgactccccaaatttcctttccttatgaaatttacgtatgtaacaggaagttaaaaaataactaccacttaatgcatactgaacagaatcttgtttcaaagaaaagatatgaaatatggaggcactttcaccacacaaatatcccactacatatgctaactgcagtatttatgttcaaaactgtaagaacgtgtctgataccctttattagttaggaattcctgaaaatgaacttctgtgcaaacctgaagcttcaacacgtgttttaaaaagcagtgcttattgaattgataaacaaaagcgaaactggcaatatcaacgtgtgctcacctcacaaatctgacaacagtatctctacactgccgttctttaaacatcattaaaagatattgtgaatagtttaaatattaaaaatgtggaatataagaacgattctatatatttgaacacacatttatattcaaatattcatatgaataaaaatgcttaaaactaccccttgggtaactaagtataacaacataaacttgcgattgcaaattttatggctcttactacaaaacaaaaagtagaatgaaaagaccacttatctttagaggacaagcatgaacttgttttctaacagcataacaataaacgtatttatttctccgagctttcaaaggcatcaacagaagggaatcactaaaaatgtaggggaaaagaaacactcggctggagctttggtttctaagcagatccttctggaaagacgcttagggagagtctagggagcagctctgacgtcagtagctgccatcggaagtcaggtcatgttctacaaaaagcagtgacgcacgcccgacagcacccgcggggccggacagcggcttcaccagccccgcgggtccgaatcgcacgcggccgggtccgctctcccgggaggagagcccggcgtggaccagcgtgacgaccccagcgtgctgcggcctctccccgagggcccctccacaagggtccctgcgcgggccgggctcggccgttgccactcgggacagccatcccctcgagttcgcgctcgccgtccccgccttcacctcccgggttgggaggcgggcgactgcgcgcgaggtaaaggaacttgcgttccccggcgccgaggcggcagcagcgcagtgcacagcggcttctgaaggcggcgtcgacggggagctgcgcgtggctcccagtttcctggttacgtgcgcgccggcagagccaaaacctgcagccgaaactcccgcttctccgtaaggattaaagggcgggcgcactaccgggagacgtgtcaaactcagcgcgcctcatggcggccgcggagccccacccgctcctactccagtcctctcacgcccactgacttaccctgcgcacgcgcgctgaggctccgtggggccgccgcgggccccgccccgaggtgggagggcctgacgcatccacagctggccaatcggcggatggcctcgcgcgcccgccccctccccctgcccccggcgccgggctccacgtgccagtgtttgtgtacgtgcggccgtggcggggctggacagggtccgggtcgttgaggattaggctgctcgggcgtaaccggagctggggcgcggctgccaagggccggcccggaagtcccagcggtctttaaattctcccgtgctagggccagcctgcgcattcttacctgtcggggtgcggcgagtgtctcacctctctg

SEQ ID NO: 33151 - DNA, 2300 bp, Homo sapien
ggcgacaaaagcaaaactccgtctcaaataaataaaaacgtgtagccatatgcacatacattaaaatgtaagcaaataaaaagagttcttccagaaaagtttacaatttaaaattcaccatgctttaatattcagtggaagatgcaaactacagtaagaaaactctttaggaaattagaatgcttgtggacatagctcctaagtatttcaattgctgcagggagacttttggtaatgtagcaattacttcttttgaaataaactagatctgtgctgttcaatatgatagtcaacagccacttaaggctagagtatttgaaatgtggctagtctgatttgagatacgctgtcacaccagattgtgaagacagaataaaagaaagtgtaaaatatctaatcagcaattgctttgattacatattgaactgataacattttggacaaattgggtcaaatactaaaatttcatgtttcgtttattaatgtggctacttaaaaacttcaaatttctcatgtcctcacatcaagactggaaaaaaactcttaaattacatctgtgtcttgcattatatttctgttggacatcgctgctatagacatgtttttaacagctgaaacaactcttggcgtctgagaaatgtttgtgtgtgtctgggttggaggggacggctgtacacagcaacagttacctagttacctgctggttgaggtcagcgcccgtttgcagctgccagagaagaaagcaagcaaggccgcttcctgcggctaagtggacaggcgactgcttgcagggatccgggggtgcgttgaccgaggcccctgtctccagcaaatgcttcagaccatccacctgcaggaagagaacagatccagcacccttcccacctttgtccagtcccgcgcccctccgggctggaaacctccccgcccttcacaaccagctctgaccaggcagcgcccagtggtccgtccccgcattaacgagaagacgaatctagaagcttgagcctgcaggacaaaagctcgggctctgtgagcccgaatctcacctcggggttgcaatccagcaacagcatttcccgcctaaggcagatgacaagagtccttggaagtgcagagaggtgagacactcgccgcaccccgacaggtaagaatgcgcaggctggccctagcacgggagaatttaaagaccgctgggacttccgggccggcccttggcagccgcgccccagctccggttacgcccgagcagcctaatcctcaacgacccggaccctgtccagccccgccacggccgcacgtacacaaacactggcacgtggagcccggcgccgggggcagggggagggggcgggcgcgcgaggccatccgccgattggccagctgtggatgcgtcaggccctcccacctcggggcggggcccgcggcggccccacggagcctcagcgcgcgtgcgcagggtaagtcagtgggcgtgagaggactggagtaggagcgggtggggctccgcggccgccatgaggcgcgctgagtttgacacgtctcccggtagtgcgcccgccctttaatccttacggagaagcgggagtttcggctgcaggttttggctctgccggcgcgcacgtaaccaggaaactgggagccacgcgcagctccccgtcgacgccgccttcagaagccgctgtgcactgcgctgctgccgcctcggcgccggggaacgcaagttcctttacctcgcgcgcagtcgcccgcctcccaacccgggaggtgaaggcggggacggcgagcgcgaactcgaggggatggctgtcccgagtggcaacggccgagcccggcccgcgcagggacccttgtggaggggccctcggggagaggccgcagcacgctggggtcgtcacgctggtccacgccgggctctcctcccgggagagcggacccggccgcgtgcgattcggacccgcggggctggtgaagccgctgtccggccccgcgggtgctgtcgggcgtgcgtcactgctttttgtagaacatgacctgacttccgatggcagctactgacgtcagagctgctccctagactctccctaagcgtctttccagaaggatctgcttagaaaccaaagctccagccgagtgtttcttttcccctacatttttagtgattcccttctgttgatgcctttgaaagctcggagaaataaatacgtttattgttatgctgttagaaaacaagttcatgcttgtcctctaaagataagtggtcttttcattctactttttgttttgtagtaagagccata

SEQ ID NO: 33152 - DNA, 2300 bp, Homo sapien
ctttatttaactgatttcttattaatagctatttaagtggtttccatttatttttctgtgatgaacaacggtagaataaatggacaacatgaagctaaatttgtcctgaactttcttgattgtttccttagaataaattctcagaagtagaattgggacaaagggtatatgatctttcaaaagattacaattttagaataaataaaaacagtgacccttatagaaatgtgacaaaggatttgtaaaatgagaaaaactgtattggtacctatttaatactgttctgaggattggagtaagtatgtatgtttagcatagtgccttttacatgtttttgttttattttattttgttttttggagacaagatcttgctctgttgcttaggctggagtgcagtggtgtgatcatggctcactgtagcattgacctccccggcccaagcagtcctcccaccttaacctcccgagtagctggactacaggtgcagaccaccacactcagctaatttttttttttttttttggtagagatgggggtcttcctatgttgcccagtctggtctctaactcctgggctcaaagtgatcctcctgcctctgcctcccaaagtgttgggattacaggcgtgagccactgcaccctgcctgtgttttacatttgaagagctcagtaaatgttagtacttattcatttatttcaaaataggggtcttagtgtgtactatggttcttcagcctgtttgagagatatgttttgagagtctcatgaaatttttgaaacctcttcccaaaagaaatctcccgctctctttctcccttcctgtctctttctctcgtgtgtgtgtgtgtgtatatatgtatgtatatatgtatgaatatgtgtatctgtgtgtgtatatatgtgtacacaaacaatgatacatgtcatttgtgatatatcatcaactacctgaaacagtatatggatccaagtaaagaactgattagttccattttgcaagtgctcttttccctttataagttgtaagcattgtcctgtgccttttaattttcagcaaaaacatgatttttttatggctatatgatattcctattttttttaaccaatctattgttggcagttaggttaatatccatgtacccgaatctttgtgtgtttttcagatttttcttagactaagtctgagattctaaatgcatatcactagatcaagcctatgaatataaacctttgattcttactgccatattctctgaaggattccaccagttgatatcccaccctcagtatgagtttcctctcattgtcttgactccctggtattatattaggttcagtgccttgtcacattcttaaactagttctttactgttgatgttttattgtcattgttaaacctgtcaagattataatttggaaagattgtcttaaagcagtagttctcaaccattcacattagaatcactggcatgggggcataggatacttttaaatatccctgtgccagctgggcgcggtggctcacgcctgcaatcccagcactttgggaggccgagacaggcggatcacttgaggccaggagttcaagaccagcctggccaatattctgagatcccgtccttactaaaaatacaaaaattagccaggcgtggtggtgtatgcctgtaatctcagctacatgggaggctgaggcaggagaatctcttacacccaggaggcggaggttgcagtgagctgagattgtgccactgcactccagctgtgtgacagagtgagaccctgtctccaaacaaaaaaccaaaatccctgtgcctaggccttagaccagttaatcagaatctctgggggtacagcccaggcctcagtatttcaagctccccaggtgatttcagtatagaacaaaggttgagaacccctgatttaaaattttggggttgcttttgtttttgttttttctataaaacaaggaattaactcatgaaataatttgaagaatcaaggttaattaatgtcttaacactaaacttagattctaatttatatgaatatgagtttgttttgttttacaagggagtttgtctttatctttatttgttctaggtgatttcagaaagtatggatatactcttcagaataagaggaggccttgatttggcttttcagctagctactcctaatggtaggtcttctgaaaaattcttttttattagaaaattgatagtgaaatatactgagattatttccactttgcaaatgaaactgagagagagataggatgaactaagattatattgttagt

SEQ ID NO: 33153 - DNA, 2300 bp, Homo sapien
gcaaaatggaactaatcagttctttacttggatccatatactgtttcaggtagttgatgatatatcacaaatgacatgtatcattgtttgtgtacacatatatacacacacagatacacatattcatacatatatacatacatatatacacacacacacacacgagagaaagagacaggaagggagaaagagagcgggagatttcttttgggaagaggtttcaaaaatttcatgagactctcaaaacatatctctcaaacaggctgaagaaccatagtacacactaagacccctattttgaaataaatgaataagtactaacatttactgagctcttcaaatgtaaaacacaggcagggtgcagtggctcacgcctgtaatcccaacactttgggaggcagaggcaggaggatcactttgagcccaggagttagagaccagactgggcaacataggaagacccccatctctaccaaaaaaaaaaaaaaaaattagctgagtgtggtggtctgcacctgtagtccagctactcgggaggttaaggtgggaggactgcttgggccggggaggtcaatgctacagtgagccatgatcacaccactgcactccagcctaagcaacagagcaagatcttgtctccaaaaaacaaaataaaataaaacaaaaacatgtaaaaggcactatgctaaacatacatacttactccaatcctcagaacagtattaaataggtaccaatacagtttttctcattttacaaatcctttgtcacatttctataagggtcactgtttttatttattctaaaattgtaatcttttgaaagatcatataccctttgtcccaattctacttctgagaatttattctaaggaaacaatcaagaaagttcaggacaaatttagcttcatgttgtccatttattctaccgttgttcatcacagaaaaataaatggaaaccacttaaatagctattaataagaaatcagttaaataaagaatactaccaaacaaactagtatgtacccatttaaataaaaaatatttaaagatactgaagataaaagttagacaggaaagaacaaattttaactctgctacttactgtacaattttacacaatttaacttatcacttaagtctgtttctcttctgtaaaactggaaaaatacacaacttcccagggttgttatgaagattccacaagacatcattcataaaagcactagtcttcctagacttccgaattagctgagatactctctgaagaaataatactgaggctgagatctgaagggtgagtgaaggtgcaatagcccattccaggcagggccatcgatgagtgaagatctgcttaaaagaccacttaggtgactaccccagatggatagatctcaaggccaaggatggtaagagtggcgacagtgacaacagacagacatttagaagtagcatctataggacttgattattgactgcatgtcggggagttgagaagagggagatgtcaaggatgatttccaggttttgggcaggcacaacaggatgtatggtggtgccatctacagagttgggggttcctggaggaagagcaggtgtgggctgtggggaagtggaaatgctcagtttggaacttgctgagcttgaaatacatatgagctatccaagtggaggcacggttagcagatttgtgggtctggagctcagaagaaaggtctaacttagagataaaattttaggagaacgcatagggtgtaaagcgtccctgaagagcaccaccatttaggatagggattggagaaccttgctgagcaatgagacaggagagaaaccaggggagggaaataccacgggaactaggggaatataatatccgaagaaagttgcgcctgtcccaggttaagcccttcttgcaaggcttcaaaaacgccgaagtctctcaaaatactttcacacagagaagtagcagggggtgcgtgtccaaggtggccgaggcggggtgcacacttgtgtagggcactttccccccggcccagcgcggagacaggcgaactggagagccgccctgcccacgcagctcgcagctgccatcttggaccccggcaggaccagctcctttcaggcgctgtgaagcccgctcgtggcggctgccaaagtccggggaaaaacacaggggtcggtgacgagcagagatactcaccatgtccgcgacgtggcggtgacacgggcgctgacgcctgcccaaaagttccgggggccggccctgaagtggtgtcaccgcacggcccaggggcggggccc

SEQ ID NO: 33154 - DNA, 2300 bp, Homo sapien
gtttcgctcttgtagcccaggatggagtgcaatagcgcgatctcggctcactgcaacctccgcttcccaggttcaagcgattcttctgcctcagcctcccaagtagctgggattacaggcgtctgccaccacgcccagctaactttgtattttttagtagagacggggtttcaccatgttggccaggctggtcttgaactcctgacctcaggtgatccacctgcctcggcttcccaaagtgctgggattacaggagtgggccaccgcgcccggctggtaagaaccttttaccttaaatttatttatttctttgcttattaagatggagtctcgctctgtcgcccaggctggaatgcagaggcgctatctcagctcactgcaacctccgcctcctgggttcaaggaattctcctgccgcagcctcccaggtagctgggactacgggcacctgccaccacgcccggctgatttttgtatttttagtagaaacggggtttcaccatgttggtcaggctggtctcaaactcctgacctcaagtgattcacctgcctcggcctcctaaagtgctgggatttcaggcgtgagccaccgcgcccggccttttaccttaaatttaaagcaagctgtttgagtgcctctctgcaagcctgcctgaaactggctcacctgagcatgaatcattgctaatacgtaacaccaaaggggcaagtgaagattcattttaaactgaaacataactaaatacaacgcccttccccacatcctacctcttccattaatcagagatgctttaaaaccaaacttcagtcaagatttagtactttcatttaccttatatttcaaagctccacggcacaagggcaggagctgagacaggttcctccctctcacggtatccccgcatctgcgcagctcccggcacacaagcgagccagggaggagggagggaagaaattcttgcctagaactttcccatcacttaacttttttcttattaatttttttttttttttgagacggagtctctctctgttgcccaggctaggagtgcagtggagctgtcttggctctctgcagcctccgcctcccgggttcaagcgattctcctgtctcagcctcccgagtagctgggactacaagcacccgccaccatgcccggctattttttttttttttttttttttttttttttttttttggtatttttagtagagacaggggtttcaccattttgcccaggctggcctcgaactcgtgagcgcaggtgatgcgtctgccttggcctcccaaagtgctgggattacaggcgtcagccaccgcgcccggcccgccactacttaactcttattgagcaacatttacaaaattattcattcacttatttaacagatattctgcaatccccttcggggcaagcttgctggtagaaactagaaacagatttaagaaggcatagatgctgcccgcaaggagcttacaatctattagacaagaaaatagagcatagccgaattatggcacgttcccttgcaaaaggtacggatggagcgtcaggagaggtgaagaaggggcagaaaactggaggaggtgatgaggagtctgtttcccagagaggaaacggaggctgggaggtggcaggtatctaaggggcaacacctggcgtccgcgaggaccaagtcacctttcttgaggacacccactccgacagccgagatcaggttgccccagctcgtccaggttgccccagcttgtccacgttaactgcgctgcgggagcggcgagggttcccaagcgcgcgacacgcctgggctgcgcagcgcctctgcacgttccaccacagctggcgtttattgtgtgatgtgttgccccgggtacgggagaatccattccaagcacgctgtgggaggatacgaggagattcgaatccgcatcgaagaacacacagaaggatgtgtgagcttctgtaggacagaaaagacttaactaatagaatttaccaaacataagtcttcggctacccgccccgcctcgccgtccgcgagggactgcggtgtggtacgctccgtgacgtcatgccgccgagcatgtcgggagttgtagttggtccgcccgggccccgcccctgggccgtgcggtgacaccacttcagggccggcccccggaacttttgggcaggcgtcagcgcccgtgtcaccgccacgtcgcggacatggtgagtatctctgctcgtcaccgacccctgtgtttttccccggactttggcagccgccacgagcgggcttcacagcgcctgaaagga

SEQ ID NO: 33155 - DNA, 2300 bp, Homo sapien
gaactcttgacctcaagagaccctccccactcagcgtgccgtagtgctggggttaagaggcatgagccacagcacccagcaagaaggtgattttatgagaataggaatctcgttttattagggtattctatcctaatttattgtcctcataggtaatttgatttcttttcaaaggtgcctggcagttttctcccagaatattttggttagatgggacactcccctatgcaaacagcatttacatttgcgtccaagaaggccatccattgttaccttcctgagaaatgaaatgctaagtgaatggctgagggatttttacaaaagtcataaataataaaaagagctaatatacataaatatttaaatgtctcagttcaatttttggatatccaattacttctacataataatacaaaataaaacactgatttggagatatctcgaagatacattgttaaataaaaaaagcaaggtgcagaatagtctatatagtgtgctcagcatgaacaatgtgattcttctgagacagcatttaaaaaaatgaaaaaggatatctatgaaaatattcacttgaacatacctgaacattctttgggaaacaaaatgattatctctttgcctgtggaagaagaattgggtggccaagtataggagaagacttcttgtgaaaatgtttatacttttgaatttggaactatttgaatgtattaccttttcaaaaatttaagttggccaggtgtggtggctcacagctgtaatcccagcactttgggaggtggtggcaggaggattgcttgatgccaggagttcaagacaagcctggacaacatagtgagaccctgtctctacaaaaaatacaaaaattagctgggcatggtgtcctgcccgtatagtctcagctacttgggaggctgcggcaggaagttaagcccaggaggttgaggctgcagtgagccatggtctcaccactgcattccagtctgggtgccagaaggagaccttgtcaaaaaaaaaaaagtttaaaaaactcagtgatactggccaggcgtggtggctctcgcctgtaatcccagcactttgggaggctgaggtgggtggatcacaaggtcaggagttcaagaccagcctgagaaatatggtgaaaccccgtctctactaaaaatacaaaaattaaccagccatggtggtgcacacctgtagtcccagctacttgggaggctgaggcaggagaatcgcttgaacctgggaggtggaggttgcagtgagctgagatcgtgccactgcactccagcctgggcaacagagtgagactccgtctcaaaaaaaaaaaaaaaaaaaaagtcagtgatacagattcacatttagtagccaggtgaattaaggattgtgtgcacttcaaaaacttctccatgtttccaaagctctcctcaaatagagctctcctagatctaaattatgaaagaagttctaaatacttattaaaacagcctttaaaaaattactgggctactagtatttcactgtataaattccacagcttaaaaatctgttctcctgttgatggacatttgggctattttatgtttttgattattatgaataaaactgctatgaacattcttgttaatgtcttttagtggccatagacactcacgcatcttgaatatatgccccagagaggaattgcttcaatttgagtgtgaaacacccttctcttcgacctgcgcacacactctcactgacatctcacacatgacctacgcgcacacccttactgacatctcacacagtgctttctagtctgtagttggagaaacattgaattagatcattttaaggtctctaccagctctaaaactcagagtgtataagcaagaccttacatattaacatgttttgatgaaaaccacttaggtcttattgtcaagatagccattcacacagagctttcagggaatgttttgaaacagtgctttagagctcaaaattcataattggcccaaatcatatttggaaattgttatcttatttttcatgtcctttaattgctagtcagctcaaaattataatatgcctaatttatctttaaaggaccctttaatgaggctgcaagcaaaaataaacagatgctacctggagggtccaaagaaatgtcagatcttcaggcaggttattttgatccccattttgtaaggatttttgaaggtgaaggctacataaatctgaatcaagtgaggagacgggatatggtggaagcagccaaaaaaaatctaggcaaagcattcctccctagtaatgga

SEQ ID NO: 33156 - DNA, 2300 bp, Homo sapien
cacacaaagagtgaggttaagagccgaaatgtaataggcgacaagaaagggaataagctctccgctacagaaaggggtccccgggttgccaattcgctgtgaaatattttttatagaattttatagatgagctaatggggaggcagtctgatctacatagggcgtgaaaaaccagttaggaccaggtgtgccatctgcatagggcatgaatctctggcagcccccaccccaatcttttactacgcaggtgggttctctgactgagcttttccatatcgcccatctctttcttactgtacacgtgctaacaaaaaaggggagatggagattccatggtggacatgcctggcccccaggtagcccttttctatcagcgcagctgctggcatccacccgcacgctgccccccaaccccctgcgccctggtgtgcacgcttccagcttcctgatctatctttgcaaggtttgcaggctttcaggctgctctttgttagaaaaaaaaatgatttcttgagctgttttttgttagaagttctgctgaagactcttttgccctatctgcctaaataatttctatctcctgaatcatcaatatcaatcagcaatgcagaccataaattctcaaaattataatttattaaaattgtctacaatgccacaagaaagtcaaatcttctagagcccatttttttctttctttctttcttttttttttttttttttttgagacagagtgtcgctctgtggcccaggctggagtgcagttgcactatgtcgactcactgcagcctctgcctcctgggttcaagtgattctcctgcctcagcctcccgagtagctgggattacgaatgtactccaccatacctggctaattttggtatttttagtagagacaaggtttcaccatgttggtcaggctggtctcggactcctgacctcaggtgatccacccgcctcggcctcccaaagtgctgggattacaggtgtgagccatcatgccggacctagagcccatttcttttcttttttttttttttgtttgtttttttttgtttttttgagacggagtctggctctgttgcccaggctggagcacagtggcgccatctcggctcactgcaacctccgcctcctgggttcaagcgattctcctgcctcagcctcctgagtagctgagattacaggcgcgtgcactagagcccatttctataagaaacaaattagaggaagtaagcactgaaactatcataagaagtttcatttcaatgaaagcaagccatcatgtattacttattatatattatatgttattatatagcaaattatgatatcctggtgattgtgattttgaattttaattttctatgtgtgatggtttactacaaaataaataatatatactcgtttaaaactttaaagagcaccattttctgatgggcaggaggattagctgggggcacgcacccagtccttggttaaaggaggtcaggtttcccgtgaacgcaacatcaatcctgcacgtgatacaccaggtgcgtaaaaattaacatgcttagacaaaggaagcccaccgtcgcttcccacagctttcatgagcatattttaatacatgtttaggttaattcattattgaaaaataggagtcttcttttcattgcagcaaacaaaagtcctttcacaatattggtcatgggccgttcaaatccccaaatgctgaaactcctctgagggatgcgctgaaatgagaggactaagaattaaaaaaaaaaaacaacagcgatgaagtggagatgtggaaaggcaaagggaaagctctcaggcgtgtgtccgtccccgggcggtccctttctccgcaccgctttggtccggcgggtaccgcagcgagtccgagtgtgagcaagcccgtcccggacagccgcgcgcgtgtgcggggaggcgcccaggtgggctgtcccaggccaggttcccagggaagctctcggggaagcgtccggagtgaggagggacccaccgggaccccaccagggaccccagccgagcgcgcgccgccgagggtgggggtggggccggcgccccggccacccggttacctggcgacaggatgccctgcgcggggcggcggagcgggtgcgtgcggcggcggttgcgagagagatgagccgcggcgatgagcccgggtaagagttggacggggcggggctcctaggggagccgcgggaacggagggcagcagaagggcattcagcaggcggctccccgctcgaaaacccgggacatcccgggtccgcccttctgcac

SEQ ID NO: 33157 - DNA, 2300 bp, Homo sapien
cggcacatcctatacagttcttctgccttgaatgtcctccctcctgtgcccctcccaactccagccacttgcaacattctcttacccttcaaggtccacctctgacaccccttcctctagaacctggacacacaccccaaggagagttgattacttcattcttattaacactgtccccgtttccaaagaaaaaaacaaatgaggccgggcgcggtggctcacgcctgtaatcccagcactttgggaggccgaggcgggtggatcacgaggtcaggagatcgagaccatcctggctaacacggtgaaaccccgtctctactaaaaatacaaaaaattagccgggcgtggtggcgggcgcctgtagtcccagctactctggaggctgaggcaggagaatggcctgaacccgggaggcggagcttgcagtgagccgagattgtgccactgcactccagcctgggcgacagagtgagactccatctcaataaataaataagtaaacttaaaaaaaaatcaaagtcatgcaaaaagaacctcttcttagaacagtacccaaacccaaagcaggattttctaggaccatttaggatgcagccagtgcttcttccttagaattctccctcccagctagtctcacctctaccttaacagtcacttctgagcactttcctgctggtctccgtgaagagcaggatgtaggaaaactgcccatctcatgtccctgctttccacactctctgcaaagccttaggaactcatcaagcctgggtgacagattaagactctgtctccaaaaaaaaaaaaaaaaaacaaaaagaaagaactcatcagatattatgtggatattgtatagatattggctacatctaaatgatgccaaaatgaccagcaaaaaggcaaagaaaaaatcagctgtttatataagccagctcgtgaagtaaggtaaaaacaattactataattacacaacaccaaatgacttgtctgattttttttttctgaatggacctctgtgtgtgtgcacgtgtatgtctgcaccacgcagacagagccagcagctgactgaagaaatgtgctctgcagtgatacagccacagcccaaacaggcagtcagcaggacacacaatgttcagctcctcgatggtccagcatagatggggcactgggaaatgtgtggagctagaaagtgcttatcccctgggacttttatgtaatccaccacagcggacaaagtaatgcccatcctacctttgtgatttacatttgcccaggctggttcgctttgcttactgcttactgcttactgctttctgcatctcctttctctttcctccatcagtcttaaaactgcttccaaacagactgccctcttaaaagtctgctgcagctctgtcctcctggaccaatacgaccctatcatatggggcattaagtccaagacccttattcttgagtgtttaaagcatttcttatttctcttccctcattctcccctctccctttgggaatcacaacatcccaacgcgtaacaccagaaatacttgagtccacactgagactaccacaggaccccggccagactctcctgcactttgggaggctgaggtgggaagattgtttgagcccaggagttcaagactagcctgggcaacaaagtggagacccggtctctaagaaaaataaataaataaaataaaaatttaaaaggacattaagtaatttggccaaagccgcagaggtcgtaagtaaatattaacgcactcgaaactgctaaataacttattgtatcgatgatgctcgttttaattgaaagcatggaggctgtggtctggctgctttcgcttccaacaaagtgcactgctgcgctccaagcagaagataaacagggagacaggtgtgacttcaagagagcgacggacgctgtaacccgaagcccccgcgcccgccgcggcccgggaggctgccccagccggccgggctgcgcactcccgcggggctggcgcggctctcgcttccaaagttggagctctccggggtgggagggggcggggaggacggcggggcggtgacgtcacccccagcggggataaagcgcccccgcccgggtcggggccaggacgccgcccggcgcggagtggctgccctgcgcggggacacttagagcccggtgggcgggaggaaggcggcatgccccagacggtgatcctcccgggccctgcgccctggggcttcaggctctcagggggcatagacttcaaccagcctttggtcatcaccagggtaggtgtcggcattcttgc

SEQ ID NO: 33158 - DNA, 2300 bp, Homo sapien
aacttgacagaaatcaaggtaggctactcaacgatgtttctttaccttcttcctaatgaaattcccttgtcatcagtcagtagatatgtacatttcatttggcttctacgatcttttaacttcatagatttttgcataaatgctatctgacagaatcacactatctaggggtgcttgtgatctgtgagataaggagaggctagtctgctgaaagtgttgtcgcaggataaagaccaaattaggaaacgcccctgttttctcaacaactagtctgtacaaaaaaagagcaaacatatgtacaaaattctagaggctacgtacattgtgaaaagatcaatatcactgtccatgaaagagatgccataaaaagttttatctgtaaggtgctcaagatccaaagatgaacagttcttatgcaaagtcataagaaatacaaagctagttttcggagcaggtgtaattcaggcactgtgaaccatattaaaccttccaggtcccaatatcattttttaaatttctgcttcagggcagaaaataaaacctgaatgatttaacattgcttctaaaaagtgcctaatttattcctaggaaatattttacacacaccaggaaaatcaggctcaacatattcctgtcctcaaatgtagccaggattctgagttccatagaagaaaaataattattatagtaaaaataattgtagtaatcctaatccttgctaaaaccaactttaatacttgtgatgcttctgtactctatttctataaaataatgtgtgagattctattacatttccataaaatgtacaacatatcatatggattatatgttctcatacaatctcaaatgtgtatgtgtacacacagtgaaatcttacctactagtattgcttacagatactttcaggtgtctgttagaataattctttgcacctctcactaacactgcttttacttacattttttcagataaataaaacactaagagctcattgttcatgatgctgatcattacattttaatataaaatagcgatgcaactttacaacacaatagttttcccctgtagcctagctcagcctcttgtattgtcatgattattaccgaaggcttttatttacttactgtttgcacttctaaaaaatgcaaacaaattgcagaaaaagactcctatttgaaaactcacattcaatcagcaaaatcacactcatccaaattaactcgcctcctcttgctttaaaggttgtaatcactgtgcatattacaacatgtatgtgcaggcaaacaatagctaaagtacagttacagttgtcatattgtgtaaaccaagacactaggcaaacttgtgaaaagaatacacactgccaagcgaagaatatgaaaatgcaaaccacagcattccccaataaacaattttctggtcgtcttgggggagaacatcgcctggggggagatgttgaaatggagccacgaggctggacagcctcctggagacactttttttttttttttttgcctcaaatatttgaccatttttaaatatcatgatttttttctttctgatcccacattttgacgtgtcaaagcttagagcaggaagtaggaatccacactttcacggagggggaccagcctgccatgtcgtccccaggctcacagcagcggcggctactctgctggtggtttggtggcaggtggagatggtgacggcgcattggaaaccgtaaggcatgacaacgggaggcccgcggggtgtttcaggcgcgttgacgcaggtgcatggctggcaggcggcctctacagaaggagggagcgcaattcacagcctcttgacgtagtttccggggaaagtaccaaagaatttggttcttcttgaggtccctgaaaatagaagcgagtcatgaaaggggggtgacaacgatatcagttcatacacatgggcttgaatacttcccatttacaaggcctcggaagacagcaagccccgaggggtttggaaaagaaggcaggcaactcacatgaagcccataggcagacaaaataagcagtgttagctggttgcctgacgctctcactgcccctccggcataaatgctgcgctgccatcgcggcaggctaaacagaaatgctgagcctcccaagctaaagggaaagtcagccctgctgaggaggggggcggaggagctcagtcactgaggctgccacaccagagtcgggggtgagggatcaaggcgaggctgacaggtgacagggtgagtggaaaatcctaagagcaaagcttctcagggaccagcaacccgc

SEQ ID NO: 33159 - DNA, 2300 bp, Homo sapien
gagagatctgaattttaattacccttatattgatgagttaaaatttcttaaaaagcttccttatggccggccacggtggctcacgcctgtaatcccagcactttgggaggccgaggcgggcggatcatgaggtcaggagatcaggaccatcctagctagcatggtgaaaccccgtctctactaaaaatacaaaaaattgtttgtattttgtacaaaaattttttgtacaggcatggtggcacgcacctgtagtcccagctactctggaggctgaggcaggagaatcgcttgaacccaggaggctgaggttgagaccacaccactgcactccagctgggtgacagagcgagactccatctcaaaaaaaaaaaaaaaaagcttacttattttatacaaatttttcatgaaaaatacatttatacatgatatatatcatatacacataatgatatcaatgagtcccaccctgaaacatgagaatttttttcatttccaccttaaaggactttctgagtggcagtcctgacaaaccatgatataaagagtatatacaaagtgtcattctttgtcaccaacattttcaaattaattgcagaaaaatataaaggcatattattaatcataccagaggaacggtaataatgatgatttttttaaaattcctgtgtattagaagtaaatggactatatactgcatgtctgtactctgttgcttctgaaagtattctagaagttactaaaaaacatgaagaactcgataagcctcatctaaattatatccttagggcagtttttgtcatcaaagagtaaaaagtcatagtttttgatattttaaggtaaaaatgcacataggaaatcgtactaataattttacagcatttatttattcagaagctttcatgtccaaaggcttggatgtgaagatttttttaagtgatttttggttttgcttcatttttatgaaatcactgttactgactcaacagtcatgtctttgtctggaaatacatttcaaaacctataaataatagtagtagcagtatcacaagaataatattgatgtaaatgatgacctgagggaaattactgaacttgtctcagctcctgccccttatctataacactggttcttgctccccctatcctgccctccctcaaagattactggaaggataagaagagataatgcatttagagcacttcctaactcagaggcctccacacagtcatttaacaaatgccattcttccctcagccttcttcataaaatggtgaggcccttgttggtataggtctgttccccgcacacctacacagtttccaccagctcagatggaaagtaaatgagttaaaagggacagtgatggcaatatggtctctgtgttacagttggcataaatatacaacaagacacatgaatttatgattccctgtgcaacgaatacgttccatgttaccaaattttctgtgcagattccacagacacatatccccagcatgcgcagtctctggatggcaccaccagcagctctatccccctgtaccgatcctcagaggaagagaagagagtgacagtcatcaaagccccgcattacccagggatcgggcccgtggatgaatccggaatccccacagcaattagaacggtaggaaatgccagcgtgtgcgtctgtctggggctgtgcacagactccacaaaggacggattgtccacggctttgtgcattcctagggtcttatataaggaggattgccctccgtgccatccgacttctcatgaatgttatgctgtgtgtggcagagaaagaaagctgttgatgggagagaattacacaatctgtttttccatttgaatgaaacatcatgaacattgcgattttgttaaatggtaaaactgtgttgtgtggtttagtttgtttgtttgtttgtttttcttttaccttttaccaaggaggcttagggcaatagagagaaaagagaaggaacaagacaatggaaattctttggctgcattgaattcccacatgcattgcgaataaagcagtgatgtgttcgttttttgaaatagatgtgtgttaacaccgggagattggaagctgtgatttgggagttgggaggtgagatgattggagtgaagagagttaatgtcatggaaaggaaaagctgtctgaagaaaaatacacattttaatgtccctcttcagccgtgcctgctgagagctctcctgggatgataagtgaaagtgtttggatttttttttaagttttaaaactctgccaaagcattgctcagtgtatctg

SEQ ID NO: 33160 - DNA, 2300 bp, Homo sapien
gattgctagaaacaaaaataaatgggacagtgccttggaaatatatcagatagaatatgactggtgatagagtcctgaaaaagaagaaaagcctgggggttctgcagaagatttacgttgttcatggcattaatcatggtagattcccagaggaggtgaaatgttatggacgggtggaatgtgatccattttactgaggaagtaaaactattcttgccttgaaggtaatgtttaaagtcaaagaatttttaattaggtgcggattttttaaaaagaatttttaatttacaaataagattgagttaaagaatcattttctgccgtagaagcaataggattttttaaaaattctattttaaattgcataaaaagcatcttaaagtaatcagataagttgagccataagtaaatggatatttaaagatcttattaaaatagtctacctgatttagttattattctgaccctatatagcaattcacagggttttgtttcaattaagtggctctaagattatcatttaaaaacaaaaagtgtaactctcccgtttgcagctctctgcactcattctatgactggaaggtggggcttgttttgacaatgcttccagttagggtctcttaagtgatttgcatgttattaacctggatagccactaatagggcttcacttcctcgatttcatacatagccccggctcatataaaaaagagttcttcaggagagcagaaaaatcggagcacttgcactatcggtgaaatgtgtagaaagataacagaagctaccctcctcaaaaaaatgatgagtttgatgaaaagaaattaacaagctgtgtgagtgtgctgcacatgatcagccatgcttgctaagtctgtctgttggttgttgctatggctacgaaaagccagtggaacccaatgagctgtctgcagcagagctgagaggaccagccattttacttatggaaaacagtgtggcatattctgctgagcttcgccctggaagaagcctcttttatacatctcttcagggaagagagaagcaatgggcatgttagtatacaatgatcacagccacgcaggcctgcaagctgccttttggacaggctgttgactgccgttccaattagctgattggagaatgtggaatgcagagtgataatgctgcatatctgctatcaggcagcagcaaaggtttttgtcttgggaaggcaagctttccctgcaatattatctcagcagctccctagctgcttaccctgaaaacgagggatccaaacggagggtgttgcactctgctaacgctggtcctgtgcgtggctgtggcatatgagcggcaggtctgaaaaagcaggtgtgtgctgggacgggcactggactggaacgcaggcggacgctctcgggtttacctgcttcctgttaacagattgtgggctcccagggcatatgtctgcacgctgaggccgaggcggagaaggggcttcctgagcgtcccagtacactgacagaggtaagcttttttgacctttttgaaagcacagcataaaaataactggggcaaaacttagcctgaaagatttacgttgattgtgtgatttggatttaccaaacaaacatacacagacacatacacacacgcatacacacacatttctagaaaatagtatcagagacatagagttgtttcagtgaattttggttctagcaattggaagataaaaaacatgaccgatatgctttggggttttaaaaccaatatttactgtttgagcagactacgatggcttgttctgaaccgtcctcacagccaacaacatttctcgcttgtgaacaatggattctttcgtgacctgcactttgacttgtattcagagaactacatgaaaaagaactacatgagaagcatttctttttaagcctcgtaaatgatttatttaactcttaacacagctatgtacacacttaaattgaagaattctgttctctatgtgggtcataatagccagtggattttgtacttgcttaccctggactgagtgtcttggtgtcctgtttgatttagttggggtagttgtaaagcaaacagtgtaggtattggaagccgttcacacctcctttccgagtatctgcatgccttgctggcccagagcacaagacccccattgtgctcccccggctcagaatccaaggaaagaaaggaagcgaagcctctgcattgagttctaggacagctgaggtatgtggcagtaaaacttcttttcttgcacaatttttctcacaagcagataggtttcagagataa

SEQ ID NO: 33161 - DNA, 2300 bp, Homo sapien
gactggtctcaaatcctgggctcaagtgatccacctgcctcagcctcccaaagtgctgggaataaaggtgtgagccacggccagagattcttatgccttgccaaccaatcaatcaagtgtgagggtataaagacattttcagagatacaatgaaaagaaaagccaccctaaaacatcaagtgcacctagagttttcttgatatccttttgtaacatgccagcattttgtcaaaatcactgaagttcttctgaagtgatgagtcaacaaatgtgtgatgttgaaaagtaaattaaaacacagatttcacaccagccagtcatcagtccctattcatacagtgtcgtaggtcctcatttagaggcattgagaaattagaatattccaagcatggagggcaaagaagacatggaccagattggcttccagagagttgatagaacagtctgggagtcagacataaaaggagaactgctaagaagtcccagggcgtgacaaggcctgtaatagcagaggtggaccccggtacaggggagtcgcagaagaggtcgctcagaccccacctgggagagtcatgagtgaggtggtccatttgggccaggtgttggaagataaaagaggaggcagattgggatggaggttaaaggtgctggggcgaggagcagtcagattgagaaggtttttaatagtagcagcatctgcagggcaaggaaatggtgtgtaatgcaggattctgaaacgtgggcagtgaatagtagaatgggaggctgagggcgaaggcaggggcacgctcagcaacagcaaatgcaaaataacttcagggaagggaacttcagtgagaaaaggtaggctggctggaggcgatctgaagcggtgaggactctcccaagcaggaaagcgccacccacttgtcctccatggatacgctgaccctgggtggctcagacctacctaatgtgaatccggttggggaggaaggggagcgggcatccccaaatctacatccacaggattcctatgcagtcaaaatttgggaattaatactgaaggcaggagtgttaacatgggtagggaaacgcaatactgacggaatcctaaatcaatgactacttagcaaatagaacatctatatttacaagtccaaagtgttaacataactatttgaaacagattgctagaaacaaaaataaatgggacagtgccttggaaatatatcagatagaatatgactggtgatagagtcctgaaaaagaagaaaagcctgggggttctgcagaagatttacgttgttcatggcattaatcatggtagattcccagaggaggtgaaatgttatggacgggtggaatgtgatccattttactgaggaagtaaaactattcttgccttgaaggtaatgtttaaagtcaaagaatttttaattaggtgcggattttttaaaaagaatttttaatttacaaataagattgagttaaagaatcattttctgccgtagaagcaataggattttttaaaaattctattttaaattgcataaaaagcatcttaaagtaatcagataagttgagccataagtaaatggatatttaaagatcttattaaaatagtctacctgatttagttattattctgaccctatatagcaattcacagggttttgtttcaattaagtggctctaagattatcatttaaaaacaaaaagtgtaactctcccgtttgcagctctctgcactcattctatgactggaaggtggggcttgttttgacaatgcttccagttagggtctcttaagtgatttgcatgttattaacctggatagccactaatagggcttcacttcctcgatttcatacatagccccggctcatataaaaaagagttcttcaggagagcagaaaaatcggagcacttgcactatcggtgaaatgtgtagaaagataacagaagctaccctcctcaaaaaaatgatgagtttgatgaaaagaaattaacaagctgtgtgagtgtgctgcacatgatcagccatgcttgctaagtctgtctgttggttgttgctatggctacgaaaagccagtggaacccaatgagctgtctgcagcagagctgagaggaccagccattttacttatggaaaacagtgtggcatattctgctgagcttcgccctggaagaagcctcttttatacatctcttcagggaagagagaagcaatgggcatgttagtatacaatgatcacagccacgcaggcctgcaagctgccttttggacaggctgttgactgccgttccaattagctgat

SEQ ID NO: 33162 - DNA, 2300 bp, Homo sapien
ggtgctatcaactacactgtgtaggtgatatttgtgaatactggaaccatgcagagtgagaactgccatacatctcttattttgacaaggccattaatgatagtgtttaaactgttcttctccctgcacacccattgtttccatcagtttactttttgccatgtttgcttgtctgtctgttatttgcctgtttcttttttgtttgttttgttctatgctttgatgttagagatttgtctgatctgcttacatgtaagagaggggcaccaaaattcatgtgtagagcttattaatgtggcctgaacttctgggagatctagcccagccatatcttagagagtaccctgtagtgatgcctttacgtcttatattttgggatggtgggatccctgaagagcgctcttcacatctttttttctggagcctattcaccttgctacctggctcccaggagttgagtggggaaagaaggcccagggtttttatatctgtttctgattaacagcaatatttttagtttggtacctttattcccagccatgccagtccagaagccctctgttagtctctccagagaataagccttctgtgttctgcagggtgaatgatgggcagtcaggccacctgctgtttttagccccaatttcatctctgccaattccagagcatattggggctgctggcttggaaatgctgctgcttcttgactctcctcattgctcatttgggatccagctctctctgtccagctaccactcacccatctgctttctttttctaaattgggttgctgttttctcctatttctttgtccttgtgggtttatggttcttaaaataaaagctttattgtcattttagtggggctttgtgagggagaaagggttaaatgtatgtggtcaattcactatcttccatttgatgcctctcatttttaaaaacaaaacaaaacaaaacaaaactgtctgggtgtggtggctcacgcctgtaatcccagcattttgggaggttgaggcaggcggatcacctgaggtcaggagttcgagaccagcctggccaacatagtgaaaccccatctctactaaaaatacaaaaattagctgggtgtggtggcaggtgcctgtgatcccagctgctcgggaggctgaggcaggagaactgcttgaacctgggaggtggagggggtagtgcgtggagatcacgccactgcactccagcctgggcaacagagcaaaactcggtctcaaaacaaagaaacaacaacaaaaaacaaaaaacaaaaaaaaacagaaagaacaaaacaaaccaaaaccccattggggacttttcaataccctgttctaggtccttgaccaaattgaatccagtacatggacaggagatgatgaaggtgtacttttgttcttttctcatttcactacttttgtagagtaaaagatttgatttttctttctgttacttgtcttctagagatgctaagtcaggctttacctttttgtctgtcattggtctttatgtttttattatcagagctatctaaaatcaaccataactgtcttaagagcattttgtgtaaatgatttataacactttcttgagatggcttcagcagccttattcaactgcatctcctggcacttttaataagcctcttaatatattctgtcatccccatctgttttgatttaaggttgattatacagacacgcagtgctgcaaaaagccacctgatcacttcagtagggtgttaggcatgcattaaactccaggtattttcagggaggaatcatgaagccgctcctgttaaatcatatccattttattacgtctctccttgtggattacgtagaactttggaaaattaaacattagacatcttcatagaaaatcatgtcactgatttttaaagccagctcaatttaacctgccactgattccctaaccagctcttctctgactgtatcccgagggaaaatgtattgaacgcagcagaaggttaaggcagaggagttcggctagaccgggtagcagccaatcagatggggagggtccaaggatctgatgcctccaggcgagcagcgccaagctgagctggttagtctccttttattgtggatgaacaccacgtacatgccgtaaatgctccctaggctggctgcggctacaaggcagacccgggagctgagaatagaggaatacctgcccaagcaactcattctgcacagcagccgacaagacagcgattttcctgtgctggaatgtgcccatccaaaggtatcacttccttttcattgagtttct

SEQ ID NO: 33163 - DNA, 2300 bp, Homo sapien
atgaaattatgcttttcatggaaagtttgaccgtattaatcttggcagggtttgggtagtgtttttgggactctgaaaggactctttcattttaattcccatgaaaggctttatttttacatactgtattaggaaaatccgaaaagaagaagaaagctccatcgtccttctgatagtgtttcgtggaaatacaacagcccagtcggaagtgcatgttccggtgtcatcttcacaaccactgtcatctgtgcgtaaaacgagcccttcaaccttcagtcattaattaattgttcatttcacacttagtcctttcataaattcatgtttgcacagtacattcatacgttgacattttcacctcaaggcagtttttatgcaaagagaattatctcactcagcgattgatcccacagtgagacaaattcccccagctatcttcttctaaaactcctaacttttataaagcacagtgactctttcaggccactgcagtggtggcccagtcgaaatgctatgctagctttctggaagagttaattgacttcaaggctaggtaacgtgccctagagaagataaacaactgggaaaaagcatctcgaagcaggcgattgctccgcacttacttaccccaagatttcgggggacagtggggacttatattcttaatactggatttgaaatgtggaatgttgaaggattgagaagtactaagggctgagacccagcaccttctgtgtatgatgagcacataagtcatccttctttggtgaaaacagcctccaagttgttttgccaaaccaagcctctctaacagtaggagattgtcaaggcttcaattagtaaatccctaagcaccaaagttaatgatgtgagcagtgaaaagcggtgggaaactcattcccagggaagggaagagtccgatcagccgtcatcgccgccgggcacaaagaagggctggagtccaccaccaaaagaggtgtttgcattgccaccaaaaaaggaagcaaaactatttaatcattattcttgttaggtaagattcagtaacatttttccaagcaataaaatactacagagaacacttggatgctgactgctcttaagacagtagctcaagtcttaggcacaatcagggaaaatatgaacatatagttaaggaattaacgaaaagagaaggataaaaaataatttttctttgataagcaaagttgggaatctctgactaatataatgataaaggctgtaccatttaataattgagaataatgtcagtgcttacagaaagagggaggtcaatttgtataaaaaatagtacactaccgaaatactacaaaactaagcatgaataggaaaagtaatgatggaagcccacatatgtcaaaagttaggttaaagcttcaggccctggagacttccaagccgggttctttaatgagtgaatgaagttaataaacatgtagataccatctgaaggaagttatgaaagcctacagactctgggtattttatccttaaattacaaatgaggaaagagttcctgatggaggactctggatatccagctaaacctccctccctttactccagagcaaccacccttgttgctgggcccatggctgcccagtcagataccacatttccaagtcatccttgcagaaccgatgcaacggttctcaccaatgacatgagaataaagtgatgtttgccactcccggtcctggccttcaagtatcgggcaagcacccttccatactttctgtctgtctctctctaaaatgctgaggtcctattggaccctggggaaaacaccccagggaatggaggaaaagaagatggaaggagctggttccctggaatgcccccatggagagggccacaccgtcaattcagacccctcaccgcagtgcgcttacgtgacagtgaaagaaacgttggtttttaaatagcatgaacatggtttcaatttgttttacgtctgttgtcttggcatcattttaaatggcattccctttcgctgtccaagtgaattacacgtcaccctattttaactcggggtatcatggtacctctttatatcggcagcttagtttccctgcaactgatagagccagaaccaccacctgcaactcggatgctgacacaacaggacctagaacctgtccactgagtaagcggccaggaggcagcagaggaaggcatgtttatttcagggtagggaaccagtgagccttgttatgcgcggggaaatgtttgcaagactgtcccctgtgagtgaaacgtttggaagactgtgccctgtg

SEQ ID NO: 33164 - DNA, 2300 bp, Homo sapien
atttatgggcatacatttttttttaattctctctctctctttttttgagacagggtctccctctgttacccaggctggagtgcagtggcgcactcatgactcaatgcaaacttgaatttgcctggactcaagtgatcctcccacctcagcctcccaagtagctgagactataggcatgcaccaacatgcccagctaatttttgtaatttttgtagagatggagttttaccacgttgcccaggttggtcttgaactcctaggctcaagcaatctcctaaagtgttgggattacaggcatgatccactgctcccagccttaattcttttaaaaaggggaaaaatgaggtttttcactattgctccaatcaccatcatagctaaataagttaatgcacatagttaagaaatgtacagtagagagaaaacaatctgtgttgtatttagaaactagcaagaattaaggactaataatatctgaatatgaactggtattaagcccaaactactgcatcaggagaccatcaataaaatttatttatcgagagccattcattagtcaaccaaagtcgtgggaaatttaatctgtataaggagtcataaggcataagggataggtatgaaggattgttgagatgatgtgttttatttcgctaataatgcatatgacaccattccaatttttttaaatttaaaacaacaatcatttatttgcttgcttctcaagcctgggtaatcgtgtttggcaatgagaccttgttgcatgcttgctaatatcccactggtcaaagctagtcaaatggccaagcctagagtcagcgtgggagaaggccacacaagggtttgaattctgaggacgagtctctttcattgaaggccaaagaaacagtctacctcagagggttgctggggagctataatgcaaagaataaacctcaccctgccttcaaggcgctcacagagaagaaatcttttgaatattagtgaagttttcctggacatcccaatggatagatgtgagggacagtcacgtactcaggacatctgtttgcttatggtgttatgttacagatgtcacaaatgaaaatcagagacatgtagccctgagcccagtaactataaagcggtctagctgaagctggagcccacaagagggcactttgcaccatgatgcacgcttgtttcttgccatcagctctgcaatgagttcaagctaatgccatgtcccagccgtccagttgttttatgacttgtgtgattgaagcatatggtggcttgtggcatgttcttaggcaaaccactcacctccctaggtttcgttttcctaatttctcaaacaagggagttagattaggtggtctatagttccttccaattgtgatatttcactatataacaatatagttataatagatcatagcacatctgtaatgaaaaaaagtgagttcatttcttaacaagtacatttacttaactagttggagtcattaaagcaaattaagaacgaaattcttagttaatctgaacttttctgggcatactgatctgttccctaacgcgtctgaccgtggaaaagtggatcagcaggagtgggactggctctcagctttgccatgtttggctctttctctgctgtgaaactcagtttcttcctggatcaagaggttaatttctgccggtgttattttacagtgttgcaaagagataaaagccagacgaaagaagggaaagtacttcagctttgattagggatttttttttctgtccctgtgaccatacactactcaattctgacagcttcgcatgagtctagcagaaaattgagggattcactgttattccttaacttgcagaggtccagacccgcccacatcaaatggtgaggtccccactttcaactttagctgttgctaaatctgtgaccctttcaatgaaatccaaggatctcagcttaaaaaaagttaaaataaaataaaaactaggtgtttttcagaggcggtttgaaacgcctctctgaggttgtcagagattgtttttgttttctccctttgcccttcttggaatgcaccaaacataaaagcattttttttcaagctttactttcactttcgagagtgccgtctatttgccacacacttccctgatgaaatgtctggatttggactaaagaaaaaaggaaaggctagcagtcatccaagtaagtgaaggtgttcatttcacgttcttactgggcagggtctctcttgctgagtagagtttgctagcagaatgcatgtggttttagccttctttggtctttcttt

SEQ ID NO: 33165 - DNA, 2300 bp, Homo sapien
ctctgcttcataggactgtgtggtaaagaatttaggaccgtgtctggcgtaggcagtgctcaggaaatgatcagcagcagtatgtggttataaaaaccttcctataatgaagtcagcttaaataactgacaggactgtctctttttggaatcatgatcttcaagctaatcattttctgtcacgggagagcaacaactatctggaccggtggcacaggggtaaaagaatttaccaagacagttgcaggtggagaaaggcacatttattcgtgaaagtaggaaactacattgcgagaaggcaacgggcatatcagcaagagaagctgactgcaaagaaacaaaggcttgctggggattttacagggtcttgtttatgctgtgtgctgaagagggctttgagctgcactgacagcgcccaggttgcagtgggctaactcgcaggggcctggtgatagctgggcacaggaagattgtcagttatttgcacaggagggctacgtgtcctggatcatgaagacagactaataatttacctgctcttttgctttctctcggtcccgccaactgactacttttccctaaataggactctgcattttcacatacaggtttgtctgtattttacactcattttgttccaggctataagactactggaaatccttaattacaactctattttttttttcagacataaaaataaatggcgtacaaatttatcctaagatattaagatgttttgtgcaagctcttcattttattttttaaactgcatttttctatgattaagacatttattgtagtaatcttattaaatatatgaataaatgagaaaataataataaggggtgattttaaaaaatcactcaaatgtccatagtcagaaacaaccactgttagcatttgggtatatttatccctggcttttctccaaataattataaggaaaaacgatagcttaaattcttactgtactgaaattcacactgttaaggcacttaactgtgtgtcaagtgctgtgataaatttttaaaaatattttatgtatatagtatttttaatcaatattttattttattttattttattttattttttgagactgagtttcactctttgttgcccaggctggagtgcagtggcacaatctggactcactgcaacctccgactcccgggttcaagcgattctcctgtctcagcctcccgagtagctgggattacaagtgcctgccaccacccctggctaatttttggatttttagtagagacaggatttcaccgtgttggccaggctggtctcgaactcctgacttcatgatccacctccacctcggcctcccaaagtgctgggattacaggcgtgagccaccgcgcccagcctggagggggctctgatttgtaatgtgtcacttgggggacagtagggctaatgcaaaaaaagagagaagtatagaagaaagggtgctttatcataaacaaatgagttaaaatgcaaagcagaaaattatgaaattaagtatgataaatctgcatgatagcattattttacaggcattaaaattaagctttggaatgcttcttaattgtatgggagatgttcataatatgatattaaatctaaagagcaggagacatcaatcttagctactcaggaggctgaggcaagagaatcgcttgaacccaggaggcaagggttgcagggagctgagatcgcaccactgcactccaccctgggggacagagcgaaactctgtctcaaaaaaaaaaaaaaagaaaaagaaatcagagccctttactcctctggcggtttcgactgcctgccggaactggcctccattctctctggattcctcctctcccacctgctgttctcttgtccccgaagtgagtcccagaacagccaaggctctggtaagggtgtaggacggagcagaagggagctggaaaaacacgatagtaaaagaaagtcaggagaaaatccgggtggaaagacgagagggagagctagagctcagagttccagaaaggaaagtgtgccgtcaccgcctcatcataaaagccatccacaacttccttccatgaggctcactgagaacagcggcaccaagacacaaccaggaactgccccaggagtgacttcacgagcagtttattcattgcaattgttctcatggtgataaagaaaaagtaccaggagatggatcctggactggaaggtcagagaagcctccctgaaaaggtggcatctaagctgaggctgtgaatgctgagcagaagttagcccgtggccaggggaggt

SEQ ID NO: 33166 - DNA, 2300 bp, Homo sapien
ggctcactgcaagctccacctcccaggttcacgccattctcctgcctcagcctcccgagtagctgggactacaggcgcccaccaccacacccggctaattttttgtatttttagtagagacagggtttcaccgtgttagccaggatagtctcgatctcctgacctcctccgcccgctcggcctcccaaagtgctgggattacaggcgtgagccaccgcacccggccgcatcagtgctttgtgagtcagattagtggggctccacacagagacactggtcagctgtgaaggtgctgggcccatcagatttctgagtctgaaatatcaggaatcctgagttctggcagcaaacaagtgctacccccaaggatctaggtgagctgactcgaactttgctccacaatggccctcccttgctgttatttcaagttccatatgttcagattcaatggagcgactagccccttactcactgaaagcacatactctagaaataacttctatttgcattgaaagtgacctgatatattaaggatttaattactccatgaatcagaataagatccttgtaagatgaacaaaatctgtgggaaactgctttgcagtcctgaatgagtgctacatgaaaacagtccagtgttcggagggaacgtccagacttctgaggctacctggtgagtgctgcagaaggggaacaagggagcacgagaaaagttcatggttcaacagcagcctgttcctggtgtctctgcgttgtgacggagttggcactgcttccctggtttgcccccaaccctctccctcttgttaccattgctgctctcagaggtgtctgttcttaattccctttttctctcattttgattcttcgctgtgtgctggtgcttcacacgctgacgactgcgtgctctcgcctctccgaacatccaagggcctttaaaatctcaccctagtcacccatgtctcttacttcccttaggcacacaaatgctctgctgtccccaagcgaatgttgaccacgatggctgccatcacctgtgcttgtcttccagggcactcacgggacactcagcatatgacgtgaagcagattattccatgctctgggaagagaaccgctctttctttgcatgtctgtgcttaatgcaatcttgaagcagacaagtgcccagtacatgttggtggcagttagatgtagaaaagggatcatgacagaagacttgttaactgcctccaaataacgcaaaacttagcattacctggaagtttaccgtggctcagactccagtttgataacttacaaaagattcaagtatataagcatgaatgtcagtttattcactgccagacttaattcatctcttttccctaccccacatcaggaaatgtatctcctgagatcctctcctgaatattaatggacaaactccatcaatatctcattactatttttttgacacagggtctcactctactgcccaggctggaatgcagtggtgcgatcacggctcactccaggcccaagcgatcacctcagcctcccgagtacctgggactacaggcatgcgccaccaggcccggcattttttttttttttaaatatttgtagagatggggtctccctatgttgttgcccaggctggcctggaactcctgggctcaagccatcctcccacctcccaatcccggtgctgggattacaggtatgagccaccgagcctggctgcagtatcttattttttaactctgttcaacactgaccccacacccctttagatgctcgcacctatacgctctacctttcacacatatttttcagattaagcaaaatacaatttattccactgaatagaaaacgttgccttccatatctgtctttgaatttgtagtcgttccgattataatttgagttctcaaacatttgaattacacagtctcttggttcactccgacaggtgtttaaacaggtgtgcgtaggtctttctacttcagctctcagagccggtcttgtttgcaggttagtgggtggcgcacctcgcggttgctcccaccccacccttagtaacagggtttgagtaggaccctggggtgggggagtggatgctgctgtttcaagctcgttcgcccaaatacatctttctacccaccttccctatcgtcagagaggtggcctgaccccagcacgtgcaagcttgtcaggctgggtaagttccagaaccttctggagccaggattctctttcccagccctgggccctgagctcggcggatgggatctgcgaggctcggggcgcaggggaaat

SEQ ID NO: 33167 - DNA, 2300 bp, Homo sapien
gagcctccacaccagaccaccctccacctgtatgccactgagcaaccccacggggagcagaagaaacactcaacctgccgcaattcctgagttctgtggattatgagcataacaacatgactgttgatttaatctacatttggggtggtttgttatggggtaatagatatctgggacacattcacacatatacatcctagctgtgtgacctcgaacatgttacttaaggtctctgacatcagtatttttatcaacaaaattgtaataatagtgtctacctactatgggtgttaaatatatgtaagaatatatgtaaaataatatatataaaagtaaaagcagctagcatatgtttggatcttaaatgactttgtgttcgatttttactttttttttttttttttttttttttgagacaagagtcttgctgtcttgcccaggctggtcttgaactcctgggctctagtgatcctcccatcttggcctctcaaaacactgcggttacaggtgggagccatcacaccagactcctttcttttgtttccctggcatgcccatcctcccacccctggcaatataaataatatcagcaagtctgtgtgggcttaagataccatagttttcctgatagatatgtatacacatacacacacatcacacatatacacatatacatgtatcaggatttaaaatctcattaattttataatttataaccacttaccacttttataaaagtggggaggattccagtgttcttagttcaacaatggattactgttttgtttgtgtttgtttttttgagacagagtctccctctgtcgcccagcctggagtgggtggggcgatctccgcctcccaggttgaagtgattctcatgcctcagcctcctgagtagctggaattacaggcacgcaccaccacacccagctaatttttgtatttttagtagagactggggtttcaccatgttggccaggctggtcttgaactcctgatctcaagtgatccgcccacctcagccttccaaagtgctgggattacaggcgtgagccaccctggctggactactgtttttgttattggtagtgatttcttgtcaccgtgctagggtggtgcatcagaaataaactgggctttttagtaaaaactcggaaatacatggtttacctctgtaaatacgggatacttggcaggagaaattgtacctgttgaaacttagatggcctcagctctcaaaagagactggctacggcaggacggggatgagtgttgtaccggcacccagtgcactaactgtcattactaaaatccctgtcgtgggaaaggcatgcctcgtgcagtgcccaccctctgagactcaaaaatgtagttcacctccgcgacctcaccccttcttcccttagcatgtgaaaatgacggcttggcagtttcaccagctcacaggagagcgtccagctgctctgctcctggtataatcctgggcctccaaaactgaaacgagcacatggtaacgcaagcggcaggcatgctcggggtgtgcaggagatgcaccggcttgtgtgagccggtagggcaggacgggcgtggaagggtccacgtctttagtatgcatgcttagatctagcgttcctgttgatggagtaatggttctcgcattgaccagatccggggcttcattttttaaacctcattcgtccactccccaccccagcctggtgtgcgcaccctttgatggggcggggataggcgagatggtcctgtggttctctgccttcttctggtgaattaaaatccgatttggaagagagaagggcagccagcaccagtatgcacagcccccggccccagagacccgggaaggagtagggaggccgggccgtgcgcggaggagtggccgctgggttggaaacccggcccggcagggagcggggaaggcgcgctttcccggaggtcggcgcggggccggggccggggccggggcccggagcggggatgggcgggcgcagccgggattagctggcgggcgagggcgcagcgcagggaggaggaggggaggcggcgccggcgcgggcggggcggaggatctggagagggaaggggcgtgcgagccccgcggaccccgggcgcgcccgggccgcctgagctgggccagccgcgcggcgggcgcgggcgcgggcgcgggcgcgggcgcgggcgggtggggagccccagccccggggccgcgggggcgcgtgaccggctgtctgcgtggggcccgcgcgcggtgcctctgcctgacggtgcccgagcctagcgcg

SEQ ID NO: 33168 - DNA, 2300 bp, Homo sapien
catagctcatgaagctgacaacccgcagagttataaatgttgtgggtagattgccttcacactggccttgcaatcatctgctacactgagcaccattacatttcatggtggacattctaaggtgtgacactgtgtactctgctgtcaggaggctttccggggagaagggtcttgccaaggatttcttgcactcccagccacctgactggtttagtctgaaatttcagtattccagggtagtatgagaaaggccctatctggtaacaaagaaagcataagaaagatggctaagggaacaaagggacaaggcttttattttgttctttacccacagattgccttcaaaataaagataaagcgtctaagcctggcagtgcaggtctctttaagctggctccatacccacccacctcatcctgcacctgtcactgcgtgggaccctgtgctccaggcaggggcacctcactgccccctgagctcattttacccctcctggctctgcagcatttctgaccatttctgcccaggccgagactcactgctgcccagagcaatctcccttctctccttctggaggggaggggttgtatgttacccgcctggttttatccacagaggttagcagagactgatacagacaaaccctttttctttctaattttagattcaagagcacatgtgcaggtttgttaaatttgcctgacgctgaggtttgagtttctattgatcccctcacctgaatagggaacacagtacccaatacacagtttttcaaccattactccccttccttcctccccctattttagaatccccagtatgtagacaaattgtttacttttatagctgtaattaaccttattatagctcagcctcaaccctttagagaggaggaaactaaagcccatgagacttgcttaaagatactaagtgaacatatttattttttaaagtgttaaagtgattaaacaatgtagacgtgaatgaaataaaaagcgtaagttccccatcttcattcccactccatagagctgatcagtatttttacttgcagacattagtggagccgtagagaaagaaaccttttctccaaaagaaggcattactttacacactccgttctgcaacttgttttgttcacttgctatttcacgtcagcccatgcagatgacttaaaacaaattcaaatggagaaaagccttaggcatgtttttctctgcactaaagaggccctgcaggtggctgtggccaacttatgcagtggcttcgagtgaacgaacgtaattagtaattaagcaaagcgggcatccaggacattcagtttcatcttcctggcactttagtgtttaggaagggcctggcctctcggggagcgacactcctcgcccggccactttgtaagaagcatcgagcgtggaaaaggggctggggtcagcactggggccctctgccgggaagagagactggcggccagcacacgcgtctccccaggctgaaatggggcaccctctcgcggcccttccctcccttcccgggctgggtggcaggtcttggctcttctgcgagtaccccgcggctgcggtctcccggcacccgctgagcagcctcgcccgccttcctctcccacccgcccctgcgtgctctccggggctccggcttcctcggtctggtgcctggtgcgtattttggaaaatacctggctcataaccacctcattgagctcccagtgtcccagtgggccagcggacacacacgggtagctgacttccctaacgtgtccccaaagcctccctggattacagcgcccgctgctccatgtgaccccgcgggagccaggacgcgccccgcctcccggggctgcaagttgcgcagggagcgagcgatgcgcagcagagctgggctccgagccggatgcgccttcctttcctctccagagcaggctgcccgcccgcggaatcccgcacgtagagcaacctcgcagcaccctcagaacagccccgctggggcgcgccgggctgccgcggtgacctttccgacgcccctgaccccgcatccggaggcggccggaagtgtcgccggcctcctcccggcgcagcctccgggcctccagtgcaatcactacgccctggggcccggaaaccgttttccggtctttcgctttcggctggggcgtggaggccgcggtgctgcgtaggccgggccgggcgcaggaacagccccgtggcgccctctctggccgccgcccgggcgggaaacgtcgttccggggaccgggcgaccccgcagcggggagcgcgccag

SEQ ID NO: 33169 - DNA, 2300 bp, Homo sapien
cacaattttcctatgtgtaaagcgagagatggactacgttggtggttttaaacttttttaagcagaaaactttactgaaaataaatcttaagcagaaaatggacatctaaattagctgaaaagtagagaggtgttaagtgtgtgggctctaagatcaaatcccagctaacatgctgggaccatgacctcaagcacctcacctagccgttctgggcctgaatattcttattttaatagcacaagcctcatggaatagttatgatgattagatttgtaaaggtgctctgagaatcgtgattggcccataagtatgcggcacataccgggtgttattattgcatgtcggagtagagagatctcacatcttcaccttgcccatgtactacacacacacacgcatacactcatgtaaacccatgcacacacatgcacacacttacacacacacatatgctcatgcacatacacatgcacagacacatgtatataccaacatacacacattcacatatacacacatacacaaacacatgcacacacctacatacactcatgcacatacatgcacacacaaacatatgtatatccacatgcgcacacacgtgcatacactcacacacaaatatacacacacacccagatactcatgcacatacacacacatgcacacatatacccacatgcacacatgcatgcatacacatgcatgcacacatatacccacatgcacacatgcatgcatacacatacatgcacacaccaccccccacagaggcacacattcatgtacatttatgcaatcatacaaaaacacatgtacacacctacatacacacatgcgcatatacacatacatagatgcacatatatacacacatgcacacataaatgcacacagctatgtacactcgtgtacataagcacaaaggcacacacaaatacatgtacatatccacgtacacacattcatatatgtgcacaaccccatacacatatgtacacacatgtgcacacacacatccatctcctaccaggaacctctcaatctcacgtaaacaatcagaaccagactaatgatttttcttccaactctaacattccttgacattctaattgttttcttctttgcattgaaagggaggcagcataccaggtgtgagtgtgatactgtggcctcctccacaggtcggtgcaggctgtgagtgacactgtggcctcctccacaggccggtgcaggctgtgagtgtgatactgtggcctcctccacaggctggtgcaggctgcaactgcccaggttccagctgtgagctaaaagtgggcgtcctcccctgctccaccagtgtgcctcggtgctttacgtttgccttatcatgctttctgcagttggcagatgaaatgaaatcggaagttcagcagactcctcttatgcatttggatcaggcttccgctcataaattcaaggaaagctattaaaattgtttagccagaatacttccttccgtacttagacaactgagcacaacgggccggagctcatctggagttccgagtaggttttgtaactgcaagtgctaggaaaatgcagaggcgccgacctcaggacctgtaggctgtgtcttttaagaattgcagaataagccccgagcaattcattttaggagctgttttataaaacaagtactttgaagatttctgcacagagaatgaaatattacaaaaatcacttgtgccacataggaaaaatggaaaagtgagatcttttatagaggaaataatttgttttttctttttgtcctcaaagtttcagagaggtagattactgttattgactttccagatacattttttttttttctgaagaactcaccacttttgcatatggaaatgtgctagggagatgaggaggtagataagaagccaggtcctgaaatatcaaatgggtgggaaagaaggttgcccgagacattacactagcttaagaggtggaggcggagacgttacgctaccgctaagaggtggaggtggagacgttacgctggcgtaagaggtggcggtggagacgctacgctggcgtaagacgcggcggtggagacgctacgctggcgtaagaggcggcggtggagacgctacgctggcgtaagaggcggcggtggaggcgctacgctggcgtaagaggcggcggtggaggcgctacgctggcgtaagaggtggcggtggagacgtttcgctggcgtaagaggtggaggtggagacgttacgctggcgtaagaggtggaggtggagcgtccttactgcacagg

SEQ ID NO: 33170 - DNA, 2300 bp, Homo sapien
gatttcttttttttttttttttttttagatggagtctagctctgttgtccaggctggagtgcagtgtgcagtggcgcaatctcggctcactgcaagctccgtctcctgggttcacaccattttcctgtctcagcctctggagtagctgagactacaggtgcccaccaccacgcctggctaaattttttttgtatttttagtagagatggggtttcactgtgttagccaggatggtctcgatctcctgacctcatgatccacccatcttggcctcccaaagtgctgggattacaggcatgagccactgcacctggccgaggatctctttatatttaatctatttggagttcttttgggcttcataaatctggatgtttatttcatttatgtctccaaattttgagagttttctattcttatttttttaaataagtttctgcaactttctctttctctacttcttctggaactcttctaatgcatattaattttcttaacagtgtcctataagtcttgtcagctttctgcaatttttatcattccttttattactctgactgggtaatttcaaatgacctgtatctgagcatgctgattctttctcctgcttgatctagtctgctgctgaagctgtttgtgaattttttcaattcagtcattttgttctttagctccagaatttctgtttcattcttttttatggttcctatctatctttttgttgaacttctaattttgctcatgtattgttttcctgattttgtttactgtctatctatattgttttgtagcttattgagctttcttaaggcaattatttttagctcttgtcatgcagtaaagatctccatttctttagggtcacctcctgctgctttatttccttcctttggtggtttcttgtttccccgattatttgtgatcagtgtggccttgcactgaagtaggcacctatttcagtctttacatactagcttcagcagagaaagccattcactagtcagattgaccagagattgttggtgggctgtctgttggggtctatgcacaggatttctgctggagttctaaggtgggaagggctggattctgggttcattcactgtggttgtctgtattctgtgcacaaggactggcttgaagcatggatccttgggggctgacttggcactgaaatgagccttaagcctgcgtctgcaggggccagcctaacatggggatcacctggcacctgagttcatggggataggcctgttcctgagtttattcaggctgtcctgggaacaaggtccactggggtgagcccagcatctgggtccacatggcccagcatggagccaagatctctggaggctgacctggtgctggatctgcaggggatggcctggattctaggcccatgggtgccaacttggagcctggggttgctggggctaacgtggaggctagatagagtcttgggggccaggctagagctggagcaggcctgaagtctaggttttgtgtggccatcttggagcctgaagccccaggggctgacctggtctggggtgagcatggggctgaggccacagaggctggtctggcctgtggcaggcctgaatcctggtgctggggtttactggagtgggcttggtgcttgggatctgtggtgaagttaggttctatcttaactgtccctcctccatgcaagagggcatctctctccatactgtgctgcccaggcttgaaggtgagatgacaccggtaatgtgaaattgtccttcctatacacttctatgtgtcttttcttatttctgtgctgcaaccaggtggcataacctctcacctgattccttagctctagtgaagttattttcgtgcatggatacttgttcgaattgatgtttctgcaagggatgagcgctagaaactcctgttctgacaaactcctattcctattcttgctgacatcactccctgaaatagttaatatacttaacagctgaacacggataggatgttcatggaatatgttgacaggacaaaaagttgaaactgttggcagaaacccaaagtcaatattgaagccaagcaaaatattgcctgcagtgccacattagaacagcttgaagaccgttcatttttaagtgacaagagactcacctccaagaagcaattgtgttttcaggtagcaaatttttattattctgattgtttccaaataaactataatttttaagtataattttttactttatgagaaaattaatcatttatattctaatttcctgagtatgtagagagtatagataatgttc

SEQ ID NO: 33171 - DNA, 2300 bp, Homo sapien
ggctgtattcctagctattcaggaggctgaggtgggaggatcacctggtggctgcgttgagtggagatcacaccactgtactctcgtctgggcgacaggagtgagaccttgtctgaaaaaaaattattctacttttatttgaatagacaaaatttttttgaatcctgatactatttcaaagaccttaaagatttcactaactagctaaatcaaacttaggaaaatattatttggttttccagtgaagcatttctcttatttagagcctttctgtttctctcaatagggttggagagttatccttatcttctttttattggggcttaagaagagagatgaggttccatggagtaaacaatacaaggatataaggacctcatataatctcacgtatccattttccatgaaagccattcttggcacgaatttgccattctatgtttgagcctcataaaaggcaatgcatcataaatatgcactttttgggtagctggaatgtactttaaacgggaaactcaagaaaacagctaggaactctttatgccaggataagtcaaatgcactggcaatagatcaaataaaaatatctgagtaaatgccttccagatagaacatcaccctagttcttcagcactttacaaaaagatctgttctcagttcacattctcttaattccctgtcatttctccccggtcttccaaatatgttttttaaattatgattccatgtataaacacaagatcgtattttgcttttctatgaaaaattgagagccttctctgaaccataaacgtatctttctccaaaatgtattcaaatcaggcatattgaaaactgttttgtgttcgtgttgtgaggttttttaggggaccgcacagaaaccctcagcactagttagtgccttgtgttctaaatgaggaaacggaagccaaggacctgcaggtggctggggactgtgcacaggctggttccgctcaagtcacatgactcgtcagccagtgagtaggtctgggtagcagttggcatggatgaacatgccctccataggctttcagaccttcttcaaggccaaagggaaggccttcatggaaatataattatgtgaaacaccccagaattttttcacaaactttcctgcctataaacgccaggtcctaccactgtccagtgtcccacttcccactgtccagtgggaagactccctccaggacaaaaccaccctttccttcagggatgtgacgtgctgtgctttcgttgacagtcatgcagctgctagacatgtcacttcctagctctccattcgggtctgtgtcccaggacctaaagaaagctaaaagaagccgggcgtggtggctcatgcctgtcatcccagcattttgggaggctgaggctggcggatcactggagatcaggagtttgagaccagtctgaccagcatggtgaaaccctgtctctactaaaaatacaaaaaaagaaaagaaaaaagaaaaaaaaataagctgggcgtggtggcgcgggcctgtagtcccagctactccggaggcggaggcaggacaatcacttgaacctggaaggcggaggttgcagtgagctgagatcgcgtcattgcactccagcctgtgcgacgagagactctgtctcaaaagaaagaaagaaagagagaaagaaagaaagaaagaaaagaaagaaagaaagaagaaagaaagaaaagaaagaaagtaagaagcaagcaagctgaaatagcttatttttctgttttaaaaaatagacttttagtgttcacaagtaagaataaaaaaaaaaaaagcttggccttaggaggaatcctatctgcttaggcctctgagaggcagcgtcacctgaagggaaactgactgggcaagagccaggctcttaggagctgtctgtactttgcttcccatccgtccgctctcccccagcagccaaagtctcctccctccattatattgcaaatcaatgaatccattagactttccatgttttctttttagactttgagattcaaggtcagctagaattaatggttaacagctgacaggtgaaagtgtggttaaatgcagctttggctagcaggcacacaggcaaaatcaagttctacatctgtccctgtgtatgtcacttgtttgaatacgaaataaaattaaaaaaataaattcagtgtattgagaaagcaagcaattctctcaaggtatatttctgacatactaagattttaacgactttcacaaatatgctgtactgagagagaatgttacataacattgagaactagtacaagt

SEQ ID NO: 33172 - DNA, 2300 bp, Homo sapien
atcactcatcaagacatggttagtaagcttataaactaagagtgctaattaatatagaattacatagaggataaagtgtgtttgctttgtgcatatagttaaggaccctgggtattagtctccattattaattatactcacctcatcactagggaccatctaacacgcgccagggcctgggactatgacgagaacaaggcaaatgcctgccttcatggaactcacattcttctttctgttgtgatcttacatgttgaaataggtgtctgttcctctttccttcaagtgtgctgtgatttataagtgtttccttctcccatcctagctttatcgagatataaagattgtgtatatttacagcgcacaatgggaagttttgatatatgcacgcactgtgaaacggttaccacagtcaaagtaattaacatccatcacctacatagttattggtttttcttgtggtgagaacatttgtctcttaacaatttcaagtatacaataatacattattattgacagcaccgtctcatacatagatcttcagaacacactcatcttatctgactgagactatcctccctttgaccaacctctccccatgccccatgcctccaactcctggcaatcaccattgtactctgcacttcgacctctttgaaacaagtaattctttcaaagaactcctgcactggtcagcactggaaaaagtgttgctagttaactagctgatgtgtagcagaatgagttgcattatctattagaaaatatggagattgtaacaggaggtatttcttctacttcctaagggctgaaatgttcctagatatttaccttgaatatgtcattttaattttctgaacatagtccagttatatgtcgctgcataatgctggggacagcaagtagatggctaacacaggagagccattacccatggaagagagatctctgtcttctgtactaaaagggcaacgacatttcctctattagatgtgggctctcttcctttccttgccttgatgtttctttttctttattcattccccctttggttaattttcagaaaaaccatatctccaaatatgtaaactgaataaactggtgtcctatgtttgagataaaagttattttttgtcttgtaagcttgttgtactttttctccattgctgtgtaactaatgccccctggatttagtggcttcaaacagcacactttgatccattcacagtccctgtggctcaggagtccaggcgtggcttagcagcatcctctggcccaggttctctacaaggctgcagtcaaggctgtggccagtgctgcggccatctcacagctgaacgtcggggatcaggggacgcattcacatccaggctcgctcatgggactgctgacagtcctctggtcctctctggctggtccagggacatcatttcattgttatgcgggtctccccggaggccactcacacccaagatggaagccacattcttttgtaagagtgaccccttactctgccatattctgttcattagaaatgagtcactaggtctagcccacactgggggaagagcttccactgcagtgtggctcccaggagaaaggggatagtgggagctcactgagaagcagcctaccacatttgttattattttcaatgtctaacaaaccatggatccctgtcaattcttcaatttcaaatattttcccttaatcaccccttactttccatttcactgccaacacctcgatctctgtcttcctcaccataaggcagattcgtaacagcttccataactcgccatgagccccgcagagccctggttccccgctgctcgttattattcctgaaacgcccagtaccacttcctgttcttactcatttatttatttggaacacttcaggaattcgcgtgccgtcctggcacaggggccctgctgatcttccctgtaccgttccaatgttagtccatgcgctgccgaagcgagcacgcttcctgttcttgttcacgagcctgcaacgcccaccgttgcctgcttccaactgtgcctcacgttccttccaacggcgccttccatcccagctgggcggggcttcgccgtgttaccttctcaacatggcgagcttgctggacgtcacgtcgccttcgccttttccgctgcggactctgctcaccgacctcctcagtagagccggccctgctcactaccgcgcccacgtgtcctgttgtgcttcattcccacaggccgcataaggtaacatttacatatgttctggctgcttgactgattctaatttccct

SEQ ID NO: 33173 - DNA, 2300 bp, Homo sapien
tgaatataggacttttaacttttccgtagtcaaatctatcacgaccgagaaacactatcacttagtaatgaggctccttgcttggcagtcagagagacctgagttccaatcctgcctctacttgttaccagctgtgtgactttggtacattgcttaacctctcagcaccagaggtttctcgtccataaaatggtcgcagcagtgccagaccttctggaattgttaacacattgtgcaaacaatggttgtaagataccgatgccagagatgggaagtgacacacgctgtccatggcagctgctaccttttctatggttaggattatttcctgtctgtcttttttccaggcttacagagtgcttctctacctcaagtgatatgtatatttacctacattttctttaaatgcatttttgttttcgtgatctatcccagccctactgatttgaactgttcactttataaaatctttattttatatgctttttcaaattgtttatgagctcaatactgttttagttttttttttttttttgaaacggagtctcattctttttggcccaggctggagcgcagtggcgtgatctcagctcactacaatctctgcctcccgggttcaagcgattctcctgcctcaggctcctgagattacaggcgcccaccacaatacttggctaatttttgtgtttttagtagagacgaggtttcaccatgttggccaggccagcctcaaactcctgacctcaggtgatccacctgcctcagccttccaaagtgctggggttacaggtgtgagcagccgtgcctggcatacttattgtaatttttttttttttttttttgagacagagtcttgctctgtctgccagactggagtgcagtggcacgatctcggctcactgcaatctccgcctcccgggctcaagcaattctcctgcctcagcctcccgaatagctgggattataggcctgtgccaccacgcccggctaatttttgtatttttagtagagacggggtttcaccatgttggctaggctggtcttgaactcctgacctcaggtaatccgcccacctcggcctcccaaagtgctgggattgcaggcgtgagccaccgtgcctgtaatcccaggcgccacttaattgtaatttttaatgaacattttgatactggtaggtcatacttctctcctattcatcttattcaaatccttttcctacactttctttttactctttcaaagaaactttaggttatttgatatttttcttggtctggcataaagtatatgaggaaaatgaaaatttcaggcttcgaagctaggaacactgtttgtctctccgtttatttaaatttcctttcatggttttcataaagttttttcctcactgcacacaactggttaggccatttcctagcacttttacattgctgccatgtatccgatccacctaagtgtgctttctttctcatttttactggtacttacagaagtacatacatttttatcatctgcaaatattgagttttacttttttctttgaaaatgtcatttcattatcggaaacatctagcaccatcttaagcggtgcaatacacaacggaagacagtccttggttttttcacattttactaattatgaggctaacaggtgagatagtatcttattcccattttgcagataaggaagataagggcggtggggcacacagctggtgaactcgccccaatcccatttcgcatttgatcccaggcagcctggccctgctgggtgaaaagtcccatcccagagaggaaacacaatgaacggcctcgccgtgcgcccacgaggagaggcctctgggacaccgtccccagggcgcggcggctgggcccggcttcccgcaccggggcgctgtcggcccgtggtgcggggttcgagctgcgggcggggaatccaagcgggctcgcggcggacaccaggtgtcacctggccgtggcgtccggcgcggcgtgggcgtccgggggcgcggcgtggaggagcgcgcgggatggggcgtgggcgcggggagcgccgggcggagccttaacaagtggtcgggcgggcggacgaggcgggcgatggccccgcggccgggacgcgcacagggaccatgcagggcaacggcagcgcgctgcccaacgcctcccagcccgtgctccgcggggacggcgcgcggccctcgtggctggcgtccgccctggcctgcgtcctcatcttcaccatcgtggtggacatcctgggcaacctcctggtcatcctgtcggtgtatcggaacaag

SEQ ID NO: 33174 - DNA, 2300 bp, Homo sapien
gggcgcttgctcaccccagtcttcactgaccacccacccgggcccattctttatatgagttacaaaaatcagcttgggtggactggatgtagaggccgtgctggaggaaagcgttttgtttctggaaccgtctccccaaccccctccctaatttccacgagcctttggggacagggttagggagggtcgattatttaaaggacaaatgtggaacttgaaccacatttctctctctcatataaaataattcgatttgtggtagctaataggcatgtccatttcgttctgttggcgcttaaggatcagtagaatcgtggcagagtcctaagtctgaaatctccatccctggctctcggcggctcctgtggcgacgaagtgcaacttcttccaggcagatagatttctcagggagcctggaaaatcgggattcccagacagatgtaaaacatctagtaagccctaggaagcgttattacttattaattaatggtaatcttctccaggaattctcttgtgccatttaaaaaaaatcccgtgattttacgtcagggaatggtatctttgtactttttttactgttcttcttttccccttttagcattactcccgcttcctcgctcccaggaaacggctggagttccggtgtgtttgggttttgctgagatttacaattcggcaagcggcacaagccggttgggcttggagatcaggtcacccactttcgaggtgttccatgtatgaaattgacctgtaagcacttggagcaattatggccgggacaaacacgtctttggatgatggagtttgcatttgctggatgtgtgaatctatgtgtattccaactggtgggcagggaatatagggctacgaatcggcacactcatcttgcaggcattatttttccttcccagccacaacctgctagacacctttattattattattttttccggtcacctctaagatggcttataaggtgactgcgttaactttgaacccaggaaattctctttcacacttgactgccctgccgttcccctccccgccaagctcccctcaccagtcccagggaaatcggatctctttgtcttcccagtgttaaaatgcctgagtcccacaaactttccgagatcaagtccgccctcttgtccgggctgcgtcccagcgcctccggccctccgggcttcggccgagtccgccctgcgccgagcctgcggctggagccctgcccgcaccggggatgggctccgcgcccgggacgctcaggctgggcgcccggcgcggggagttctcggagcgggcttctcggcgctggggcttcccctctgcctaggaacttgcagttgtcggcctggggtcacgctttggggcccctggggccgactcccgggctaggaagcccgcgggacgccgcgactgccttttgtcccacaggcctgggcgtccggggtgtcagcgggggaggccaggcgcccgcggcggggagggcctggggtctaactcggcagaaaaaggtcgcgggggaagcgtttccattttctggggattgaaggaggaagtagattccgacctagctgcattcctttggagacctgaaggacgacttcagcccaccaaaccttcgcggacccagagccgcgccattcaaatgcagattcaggggctcccagaaggctatggaaaagctaaagggatgcctctgggaagctttctcattaggccccagccttttttttttttttttttttttagctaagctaacgtttccctttcttggcagggagctttccccaattccttgcacagcgcctgtggctggccgtaactaacctcggcatcacaagcctcgccctgcccctcggagccgcgctagaccccgctgggcgccttctcgtctcccagcacggacctggtgttcgcagggactggggctctttgggtccgggcgggactgcgtggccgagcccgcggtcccagagccggcagccggggaaagtgggctcgagtttccgcgcccgagaaatgagcgccggcgccggcgggcggggccggggcggagggatctcctgcgctcggggagcgtgaggcgccggcgccgagctgggcggccgggcgcggggagagggcgcgggagcggctcgtgcggcaggtaccatgcggacgcgcgagcccggcgagggccccggcaggcccggtccctgctcgggggcgcgctgagacggcgggtgagctccacgagagcgccgtcgccacttcgggccaactttgcggttagttcgctggggcgcgggccggcgggc

SEQ ID NO: 33175 - DNA, 2300 bp, Homo sapien
tctacattgacttttcactttgatcttataaacttttgtgattcagagcataaaccattcgaatgggaaggcatctcgtcttttcttcttcctgaaggcatactcaccagaaaacatagccgaacgtcgctgtttcgatatgtcagtatattgcagtatttttaaaagtcaacaatatgaccccatcataccaatatttgttgaataccttgcagcctcaagatccattcgccttcatagctaaggatgctcttagtccaaggaaagcttccaactgatctccttctgtaaataggcaaaatgtattttagtttccaccacacatgttcttttctgtagggcttgtatgttggaaattttatccaattattcaattaacactataccaacaatctgctaattctggagatgtggcagtgaataaaaaagttatagtttctgattttgtggagcttggactttaatgatggacaaaacaacacattcttaaatatatatttcatcaaaattatagtgggtgaattatttatatgtgcatttacatgtgtatgtatacataaatgggcggttactggctgcactgagaatgtacacgtggcgcgaacgaggctgggcggtcagagaaggcctcccaaggaggtggctttgaagctgagtggtgcttccacgtgaaaaggctggaaagggcattccaagaaaaggctgaggccagcgggaaagaggttccagtgcgctctgggaacggaaagcgcacctgcctgaaacgaaaatgagtgtgctgaaataggacgctagaaagggaggcagaggctggcaaaagcgaccgaggaggagctcaaaggagcgagcggggaaggccgctgtggagcctggaggaagcacttcggaagcgcttctgagcgggtaaggccgctgggagcatgaactgctgagcaggtgtgtccagaattcgtgggttcttggtctcactgacttcaagaatgaagagggaccgcggaccctcgcggtgagtgttacagctcttaaggtggcgcgtctggagtttgttccttctgatgttcggatgtgttcagagtttcttccttctggtgggttcgtggtctcgctggctcaggagtgaagctgcagaccttcgcggtgagtgttacagctcataaaagcagggtggactcaaagagtgagcagcagcaagatttattgcaaagaatgaaagaacaaagcttccacactgtggaaggggaccccagcgggttgccactgctggctccgcagcctgcttttattctcttatctggccccacccacatcctgctgattggtagagccgaatggtctgttttgacggcgctgattggtgcgtttacaatccctgcgctagatacaaaggttctccacgtccccaccagattagctagatagagtctccacacaaaggttctccaaggccccaccagagtagctagatacagagtgttgattggtgcattcacaaaccctgagctagacacagggtgatgactggtgtgtttacaaaccttgcggtagatacagagtatcaattggcgtatttacaatcactgagctaggcataaaggttctccaggtccccaccagactcaggagcccagctggcttcacccagtggatcccgcacaggggctgcaggtgcagctgcctgccagtcccgcgccgggagcccgcactcctcagcccttgggtggtcgatggcactgggcgccatggagcagggggcggcgctcatccgagaggctcgggcggcacaggagcccgtgaagcgggtgggaggctcaggcatggcgggctgcaggtcccgagccctgcccggcgggaaggcagctaaggcccggcgagaaatcaagcgcagcgctggcgggctggcactgctgggggacccagtacaccctccgcagccgctggcccgggtgctaagcccctcattgcccggggccgacagggccggccggctgctccgagtgcagtgcccgccaagcccacgcccacccggaactccagctggcccgcaagcgccgcgcgcagccccagtttccgctcccgcctctccctccacacctccctgcaagctgagggagcgggctcctccttggccagcccagaaaggggctcccacagtgcagcggtgggctgaagggctcctcaagtgcccccaaagtgggagcccaggcagagggggcgccgagagcgagcgagggctgtgaggactgccagcacgctgtcacctctcacaaggaaggccgctgtggagcgtggaggaagcgctc

SEQ ID NO: 33176 - DNA, 2300 bp, Homo sapien
taatgcccaaacagagccacacccaagcgatcaaatggaatcagtggtaggggaggcgattataaatcaatctagtttatgggatgcactgtgtgaatggttaagggagtgataaagggtggtttccgacaacccaaagaaaggatcctcggcttgagctaagtgtgtgtgtttccatctagtgaggaaaggggctttcaatgacattgccacttaaaggcttacaaagaaggttctggtcaacattcttcggttcattgaagtatttcttatcgaaacccaaatgttaacatttttatctccaagggaaacaaaaaaaaaggctggtggaattcccctgtagtttctaaagaggccacagcaaggcgccatagagacagaaggagggaagttgagggaagtccttctgactggtaaatcggctttctgaccctcgtctgcaaataatacattctaaggtaaggaactaaggaagctttattgaaatcggatttcaaatggagaggtcctgctatgcctactggaggagatcagggaataataaatatttccttcattgaaaattatatcctattggccaggcgcagtggctcacgcctgtaatcccaacactttgggaggccgagacaggcggatcacctgaggtcggaccagcctgccaacatggagaaaccctgtctctactaaaaatactaaattagccgtgcgtggtggtgcatgcctgtaatcccagctactggggaggctgaggcaggagaatcacttgaaccaaataggcggaggttgcagtgaggtgagacggtgccactgcactccagcctgggggacagagaaagactccgtctcaaaaaagaaaaaaaaagagaaagaaaagaaaggaaggaaggaaggaaggaaggaaggaaggaaggaaggaaggaaggaaggaaggaaaattatattttattggccaacctcaaaattgaagcttattcagaaacagatttaaaaaaagaaaaaagtggagaactgctcccagatatatatgcagaaaagcttcaagtcaacatttaggaggtttttaaatatcgatctgggtttcgttctaatggtctgggtgtacttatacgacctattacatttcactagactgtagccaatagtgagcgttgactgaccattgctttcaaagtgagttgtgttgcctttagcaatacagtcacattaatggccagaaaaagaaaaaagaaaacaaacactgggggtgtttgaaacaactgggggtagggtggggtgggaaaggtgtgggggtttgcgttcgagtcaacctctatttcggggggtaaaaactgcctcctccgcttgatttttttcctcgatctgcaaaagcgtaaatgttttgttttgttctattgagatggagcctcgctctatcacccaggctggagcttagtggcgcgatctcggctcactgcaacctccgcatcccgggttcaagcgattctcctgcctcagcctcctgagtagctgggattacaggcgagcaccaccatgcctggctaatttttgtatttttcggtagagacggggtttcgccatgttggccaggctggtctcgaacgcttgacctcatgtgatccccccgtctcggcctcccaaagtgctgggacgacaggcgtgagccaccgcgtccggcctaaaagggtaaatgtgattacacccacgcgtatttgttcaacagacatttattgagcgctcaccacgtgccaacgccgggcgtctgggctctggaggcgctgccacgtggcggatgcgcagtgcccggcggccgggctgaggggtgaacgcgggggtcagggggccccgggctgagggtttgcgtgcgggccgggtgcctgggggccccgggctgagggtgagcgcgccgcccaggtgccaggcggctccgggcagagagtgaacgcgcgggccaggtggctccagggcggcgccccagggcggggccggccacgccctccctaaccctggcggagctgatgggtggctgtagcctgattagaccgcgtcagtccggagggtgggtcttgggagggggcgcagggcagtccacgtttccactgcagtttctcctttgttttacgtttgggaggaggtggcattggaaatagcagagtgcttcgcggtaacaggggtgagtcttgtttcatggaacttttttcaaatggggagaagggggttgtgttgctcactacttggaatgtgtcggtcaaaggggttagatagtcagggaggggaagcgtgttctcatcctgggaccaggc

SEQ ID NO: 33177 - DNA, 2300 bp, Homo sapien
taaaactgcattttatagttattcatttaaaataataaaaacaagccaggcacggtgggtcacacctgtaatcccagcactgaggctgaggcgggcagataacctgaggtcaggagttccagatcagtgtggccaacacggtgaaaccccgtctctactaaaaatacaaaaaattagctgggtgtggtttcacgcgcctgtagtcccagctactcgggaggctgaggcaggagagtcggttgaacccgggaggcggaggttgcagtgagctgagatcgtgccactgtgctccagcctgggcgacagagattcggtctcaaaaataaataaataagttaataaaataataaaaacaaaaacatttttctgagaaaaaagttttcgagctaagtggcttttttaatagagaaagccagaattacaaaggacttaagaaggacattggggcccttcttcttgccaaagatgggcacaacgtcgacaaagcgccggtggtaccgcacccgcggctcagcccggcctgtcttctcgcttggccaccttagcaagagtctgacctgtcactttcccagcgcgggccggggaaccacggacttggcctcccgggcagtcggggcctcccacttcgccctggtccagggtggcctcgccctgcagggacgcgcctgccaggagcacgatagatcttccggggcgaagccctccagtggcgctgcctgagccgcgacctgggagaccgtctcctggccggtcacctggagggcgtgtagctccggggcgcggaccaagaactgcatgttggtgactgaaccgcggttccggctgccgcccccgcgaagatggagtcaaagaggaaggagcgagggcgctcacggccagaccgcgggcagcgcgtcacgtcactcctgaaattttatttcggaaacaattattgagaagagtggctttggcttcactgttttgcaaatctctttaattgatggcttcttagaagagccgttttcggccgggcgcggtggctcacgcctggaatcccagcactttgggaggccgaggcgggtggatcacgaggtcaggagatcgagaccatcctggctaacacggtgaaaccccgtctctactacaaaaatacaaaaaattagccgggcgaggtggcgggcgcctgaagtcccagctactcgggaggctgaggcaggagaatggcgggaacccgggaggcggagcttgcagggagccgagatcgcgccaccgcactccagcctgggtgacagagcgagactccgtctcaaaaaaaaaaaaagaggagctgttttcccttatttgcttccccattccttctgttgcatgtgttttgtcccagctgtagtcccagctactccggaagctgaggtgggaggatcgctggagcctgggagttccagaggctgcagtgagccgtggtcacgccactgtactctagactgggcaacagagcaagaccctgtctctcaaagggaaagtattttaataactttttcagatacttgtggtttttttctgtaattctatcaacgaacctctttcgcactctgttacctcactctagtcctgaagttccttcagtaattagcgcgatgcctttagagcactgttttcccctgaatgactcgtaagtgagtgctgttccttgtaattaattttcagcctattgctcaagattgtcagaagacctgagggaaacccgctggtcttagaacactggcctaactctgtcttttccccaagcaggcagctgccagaaatttgttggatttgaggagtccagagcgccgacccgctctgtctgcgtggacttatttccttggatcttcgtggactctgaagttgccaagtgtgtgtgcctgctccagaaaacaaaggaagccaccattttttctcattcacagtgcagggagatacctcagtagaagcatacagtccagtcttcaactagggacccctaccaggatgtccaaaaggctcagccctcagttacagcacaacatcacagaagatgcctattgtgaaacacacctggaaccaacacggctgttctgtgatgttgaccaaatcacactctgcagcaaatgcttccagtcccaggagcacaaacatcacatggtgtgtgggatacaagaggctgctgagaattacagggtaagagtcactcacgcaaatcccaaaacactctggccaactcctatatggatgaaatggacagacattctggtcctccaaaaccattaccttagttgatgtttattacagaatattagataagt

SEQ ID NO: 33178 - DNA, 2300 bp, Homo sapien
ccaagctggagtgcagtggtgggatcttggctcactgcaacctccacctcttgggttcaagtgattctcctgcctcagcctcccaagtagctgggattacaggcgtgcaacaccacacccagctatttttactttttttttttttttttttgagacagagtttcgcttttgttgcccaggctggagtgcaatggcgtgatctcacctcactgcaacctccacctcctgggttcaagcaattcttctgtctcagcctcctgactagctgggattacaggcatgtgccaccatgcccggctaattttgtatttttagtagagacggagtttctccatgttggccaggctggtctcgaactcccgacctcaagtgatctgcctgcctcagcctcccaaagtgctgggattacaggcatgaaccactgcacccggcctaattttcatatttttagtagagacggagtttcaccatgttggccaggctggtcttaaactcctgacctcaagtgatccacccacctcggcctcccaaactgctgggattacagatgtgagcaaccgcgcctggccaaactttttttctttttttttttaagactcttacaagactaactcatagcaatattctgaagctgtgacaagttagtatcctggaggctatcttggtagaggtttcatgatgccaccctgatgccacctctcttcctctttacagtagtataactctttgctcttattttttcatagcttaaattctcatcctagcaattcacgtatgctttacaagggatgtataggattgaaacattttgaattaatgatttcagaaaggtgagttttgactaggagaaaggaaggtggaggaaaaaacattctcagccagaaaacttctttttcccaaagttcaagataagaaaacatccaacatcctgttggaggtaagtgggaaagaagtagcagttggagccttgaaagtcagaaaccaatgaacggaacagcctgagtaatggacccgactcgtggaaggctgccaagctggagagtgaggggacggagacagaaatatggcgtgatgagttcgtgggaaggtcaaactcgctggcctttgaggaagagcttttgaggtgcaacttcctggcatgcagtgagcagaaggcaggccaggacaggagctgactcccgagcaggggacacagtgaatttgtggcatttgttaccaatctcggagttcactgtgcacagtctccacactaggcatttactttttcatatgtccgaaaaaatgtctgcacacttcatttctgtccagtaagaactgataatcagggatttgaaggggcctagtttggaaattttcaatgggtgaaaataagtgagcaaaattacatttatactaaaatataattctttccatctgctccatagtgggatagcctcttgaggcaacttccaattagaatgtcattttagatgctttccaagatggcagatgggtgagtactagggtgtgcagggaagatcaataaacagctctggcaattcatcgtgcgcctaacaccaaggaatacttcagtggaagagctctcattttgttgggatgaataaaattaaataaaagtacacagtacccaataaaggaacaaaagcttaggctttggtcaagcagaacaaaaggggctaatgagaaaaggactatgtattacagttttcttctctcagttctcaactaggttttattagtggagttcccaaaagatttggaccaaatttccaattcagatattattagagatcatcaaaactcaaatctctttactggtttacaccaaatcacccaagcttccagcctaaaacccacatgctcacatggttccacagtgctgtttatgtacaataaccagttctcaaaatggtaatcctgttagaagccagaatcctcagcctctagcatgtgtgcttttcacagagataagtctcaaagtttggggttggtgaggagcccagtatacaggagttccacattaagtcataattggctttgtgttggacagtgtatgtcagctggtgaaatcaggcacagaagagataagggtttcttgtcataacaacataggaacaggtcacccgcgtgttactcaaaactgtaggacggcagtgagggctttgctaatcccagaacagaggtgtaacctggctgcatatccagcctcgagaaaatgtctacagcagatctgatggagaacctcagggaggaactcacctgtttcatctgcttagactatttcagcagcccagtgacca

SEQ ID NO: 33179 - DNA, 2300 bp, Homo sapien
attgaataaatatttgttgaataaatgaacacacatttttcataatttttcttaattttgttttatttgtatcatagtcctgatcactacttgtcatatttcttactcatttttggttttctccactagaacgaccgcctcctgggaatggagattttggttttgtttactattgtatctatagcgcacatacctccgaaaacatcaacctctacacccagcgcatcaacagattaaatgtattatatgttggatttcaggaattgttgccatgaaactctaggacttggccaggcatggtggcccacacctgtaatcccagcactttgggaggctgaggagggtgggtcacccggtcaagagacttgagacaatcctgaccaacatggtgaaaccccatctttactaaaaatacaaaaattagctgggcgtggtggcacactcctagactatagtcccagctactcaggaggctgaggcaggagaatcatttgaactcaggaggcagaggttgcagtgagccgagattgcgccactgcacttcagactggcgacagagtgagactccatctcaaaaaaaaaaaaaaaaagaaagaaagaaactctaggacttgtaaggattaaaaatctacagacaagggcatttctcttactaactttatctcgtgtgtgtgtgtgtgtgtgtgtgtgtgtgtgtgtgttttggcaggaagaaacaaagacttgtaaacaggttgttgtgtcagaatacatgaaaatgcaccagttcctgaaggaagaggagcagctgcaactccagctactagaacaggaagagaaagagaacatgaggaagctgaggaacaatgagatcaaactgacccagcaaatcagaagcctaagcaaaatgatcgcacagattgagtcctcaagtcaaagctcggctttcgaatctcttgaggtgagaataacattcatgagagtaatgggaaaaattatagtaactcatagtacttcaagccataggaaataatgttttctttattcatcttaaaaactaagttctggtccaaaagtagttttcctaaagaattgacattctatatgtcaataaagccttatagaagagagagagagagaaaaaaaaaaacacatccagaggaataactatcccaaacaagcctgagagtggcttcaatttcttctgtacctgcctctctgcaacctcagctttgttaatttttttttctagtttattaatgtgtatttactatgtgctgggcacattaaatttaatcttcacaaagacctgatgaagataagtaccattatgatatgaactctaggtctagatgactgtcatctacaggatgggttaatagcggcactgatttaattattcatacctgtggtactaacgagatctgcccgcctgatagttaatagacaggagagccctcctgttctgtgcagggagctcctatttctcaccacctttggtctactgcccttctaggctgctgcattcttcaggacctttttttttttttttgagacagagtctcgcactgtcgcccaggctggagtgcagtggtgcaatcttggctcactgcaatctacgcctcctgggttcaagcaattctcttgcctcagcctcccaagtagctgggattacaggcgtgtgccaccatgcccagctaagttttgtatttttagtagagacggggtttcacaatgttggccaggatggtctctatctcttgaccttgtgatccatccaccttggcctcccaaaaggctgggattacaggcgagagccaccggcacccggccgtggactttcttaaacataagccatgtgatccaactccagcttcaggtctgttttgtagactggttccacagagtgctactatttaatttagtgccttccaaacacaccaccccgacctgacacaggcttggttagcctcagttctcaccagcccattttcctttgttatctctgcctctcactggatgatcgagactaacaggttggcttgtttgcagaacaggttccctggacaaggtgatgatacgagaaaaagaaaaggacaaagtattctctagtcattgtgagaaacaccttgtgttcaccacagcacatccctggaagaaactggggacgcttttctctgctctctgtgctcccactcatggtgtgcttcatgggaagcagattctgtgagctttgcaaggactgtatgcaaaatgaatttcgtctgtgttatgatcaaagcgcaccatgctaacttctttcttttttacccgtaggaagt

SEQ ID NO: 33180 - DNA, 2300 bp, Homo sapien
ttcaaaaccatcttccatttttatccttttgtggtaatatttatcatttataaaaaggaattccaacacctcttttctatgtataatctcccaacgttcctggtcaaagcagtttgctcccaaattaccagaagtggtctcgttgcggcagcagagctcccctggtgcacttctactcacgggtttgttgaacgtgtagctttacccaccttgaggcagaactgcatgtgcccgtgttggcgctgacgcatgatgtgtggtgcacggatggagcaaaggtgaatatctccccacagcagacctccgaggttcataaattatttatcacatacttcagtgtgctgccacagtgatcagggccagtttccaatatggagacaagagctctttaatcacgctcttccctgcaaaagaaaaagattggcatttaacagagagctgtaagacaggatagggatgtgactgcagggaaacctccacttggaataggagtcgctggtcagttctagacccaatggcatggacttatgtagtaatagtagtaagagttcctgaagatagtttcaatctattgccagcattctgtaggtctttataacaagcaggaaatggatacacatgtctctgttccataattagaaaagtatcaccattttcctgggacaaaaatatgtaagtttaaacatttttagtgccaggtcagtagtcacgatttaccaacagcattttttattttaaaaatacagttagtgactacaccattggctaacaaactgagacttaaagcattctctagatgcaaatgctacaaataaatcaaattattaggcatattcactaatacttacaaacttaacttcatatataaagcaaggtagatcaccagtgtggccatgcaaacagggtttgaggacttcaatatttaaagcaagttagtccaacccacagcccaagggccacatgcagcccaggatggctttgaatgaggcccaacacaaattagcaaattactaaacttacttaaaatgatgggattttattttttgccattttttggtttgtgtgtttggtttttagctcatcagctttgttagtgttagtgtattttatgtgtggcccaagacaatacttccaatgtggcccagggaagccaaaagattggacactcctgatttaaagggaaaagggagggcagatgaagaaagaggataaaaaaaagagagagaaggtagacaaaacaggaaagtggttagtctttggaggctttgattagcacttactgaatctacattttacatgtgaaaggagtgggtagcgaaacagtgaattatgcatagtgctcagtgcgtctgcatttttgcataagataaagtaaacatagaggaggtgctcaaatatgcattcctctcaggtgagccaagggatgccctctaggcctgtctttgtcaaggtaccggtgaagataagctgttagtttacattgtcaaggtgaaatagaacagcgttctgttttagggtaaagctcttggggcccacgaggaatttccttgtgagcaatttgtgaaggaggccaccgggggagacatgtggccttctgtctttgcagctatctacttaggaacaaaatggaaggcagtttttgcatgatgcagttactgagcttcacttttccctttggcatagtgagtttggggtcctgagatttttatattcctttcacagcctcactatacttgaattaaaatacaatctacatgttaaaactgaccacatcattctttcctgtgtgtcttcaaaggatttaaggcccatccagataatccaagatgatctcatttcaaagccttaattatatctttgatgactctttttccaaataaggtctcaattagaggttcctggaataagacacggactcatctccctgggggccaccattcagcctgatccggaaggaaggccatgatttcagctctctgggatttgagacaaagaggccccttttctttcattttatcttttcatgtctcttcttgccatgtacccacatgattgagtgtgggctgagggtgaatccaagaagggctttgttttgtggtcagtacaggctttggtccacagagacaacaatactttcaatactcttttgttctgccccagaggagctcaacacagaattgcctagaacaagaaactgggtaagtgtgcttggaacatacgcttgtcttctcttctttggactcttgattgcaacactcatctctgcctggatattcacatggacttatactctctgtctt

SEQ ID NO: 33181 - DNA, 2300 bp, Homo sapien
agtaaagcaaataggcttgaatggcattgcagttcacacacactgccatggtgttgctattcaacttctgaaacataattttagttttgtcctcttgcctcccttgccttgctatagtgatttagctttaaaaatgcaagcctgcacctgtcatttccctgctaagcatctctattggcccccatgtcctcaaggatgcagaccaagtccattccagaacagcttccatgctccagtcctacccacctcagtagccctatcactcttcttactttctgctccaaccacaatacaattctagtggttgatcaaaatgtttctttttctttttttttttttgagagggagttttgctcttgttgcccaggctggagtgcaatggcgccatctcggctcactgcaacctctgcctcctaggtacaagggattctcctgtctcagcctcccaagtagctcagattacaggcatgcaccaccacgcccagctaatttttttgtatttagtggagatggggtttcaccatgttagtcaggctggttacgaactcctgaccttaggtgatccacccgcctcagcctcccaaagtgctgggattataggcatgtgccaccttgcccggcctcaaaatgtgtcttgatacaaagatttcccctacactgtaatgttcctctaatcctccctctcataacagctacttatccctcgggtttcatcttaaactttacatttagggagaaccttcccccacagagcagacatatcaggtcccctgtgtattctctaatggcagtcttgtatttctttgtaacaaaaattgaatttatttaacatatgactttcctaccattaagtcttttacttgaacgagggcaggtattcagtaaatgtttcttgaataaataaatgcatggtagttctttatcatttattatcattggtctagtcacagactcagaagcagttggagatactagtatgattgaatttctctatttttagtttctttcaaatacttgcacacacacagacacacacacacacacacacagacacacacacacacacacacacacacagcttccttgcagtttcccagaaatacaattccagagccacaggtccctcatctcacaacttgtccccatgttctcatttgtccctctgatcttacttgtcagcccttcccagcacctggggatcgtgcattgtgaagcagcacactcaggggttccctgctccgtgtttccctccctaatgccaaagggccaggagccattgtgtcgcagagtaggctgcttcacttgtgcctgagggaggacagacaatatgctcatcaggattcagggaggagagtgtggacgctcagacagaggagtgctgtctttgtttctcgctgctatatcagaatgccacagactgggtaatttataataaacagaaatttgcttcctcacagttctgaaggctgagaaggtcaggatttaggggccagcatctggtgaggggcttctcactgcattcttccacggtgccaggtggcagtgcaagaaagcacataagacacacagcaagaggaggctgaactcacttttataacaaacccactcaccccataatgaatttactcctgtgttcaacacataaacttttggagacacattcaaaccataacatgtactattgaaatggagctctgacaggagacaccttgggtgcctcaagctggagattctgctttgcatccccagttaataattagtagataaaagaaagagactctttgggcactgggacctggggtctatgaatgttgaaaaggaagagcaaaccatgacatcaggacttgagtttctcacacccctttctcccacccccacccaggcaaaaatagatacaaaagaagaaggaattacagaagaagtcacataacattattgcctacaactgactgtttaccttgaatacttgaagaccagaatgaagattcttggggtgaagaattacagccttagcatggagcaggcctcggtgcatcggctttcagctaggcatgcctgccaatgttcaacgtcctcctgggatacggaaggcaccgtgatagacatctgggcaagtcaacaggaaggtggatatccaaatctctctcttcgcaatgagtttccagttagatggaggagagagtaataaaacacagtaagtgtggaaaagattaaaatgcatgttgtgatataccacaggaaatcagaggagagaggttcattctaaggggaatggtggaaacgtcagtgagaacatacca

SEQ ID NO: 33182 - DNA, 2300 bp, Homo sapien
gtttcttaaataataagacttgaaatttgaaattactccttgatccatgggctgcagaatatatgttgtgttagcaggcatgagaacaacattaatctcctaatacatctccattgggccatcagggctgttgggtggcttggtgcattgtcaacgagtagtaatgttttctgaaaaatatgttttttctgagaagtaggtctcaagagtggacttaaaatattcaataaaccatgctgtaaacaggagtgctgtcatttgggctttgctgcttcatttagggaccatccatagagaatttagcacaattcatgagggccttaggatttttgaaagagtaaattagcaatggcttcaatttaaagttgccagctgtattaactcctaacaagaaagtcagcctgccctttgcagctttgagtcaggcattgagttttcctccctacctctgagaatcctagatggtatcttcttccaatagaaggctgttttagagggctgttttagaaggctgtttgagttatctacactgaaaaccttgtttagtgtggccatcctccaccataatcttagccaaatcttctgggtaacttgctgcgtcttctacatcatcacctgccagttcaacttgcattttctgttgtgaaggttgcttatttcctaaaaccccatgaaccaacctctgctacattggaactttgcctctgcagattcctcacctctctcagtcgtcatagaattgaagagaattagagccttgctctggattaggctttgtcttatggcaatactgtgactggcttaatctgctactgagatcactcagactttctccatatcagcaataggatgtttcgctttctgttattattttttttttgagatggaatctcactctgttgcccagattctaatgcagtggtgtgatctcagctcactgcaacctctgcctccctggttcaagggattttcctgcctcagcctccccagtggttggaactacaggtgtctgccaccatgcccagctattttttgtattttcagtagagatggggtttcaccatgttggccaggctggttggtcttgaactcctgaccccaggtgatccacctgcctcagtctcccaaagtgccgggattacaggcgtgagccactgtgcccagccaggatgttttgctttcttatcattcatgagttcattggagtagcacttttaatttccttaaagaacttttccttaccattcacaacttggctaacaatttggtacaagaggcccagcttttggtctgtttcagctttcaacatgccttcctcactaagcttcatcatttctagcttttgattttaaaatcagatgtgcaactcttccttttatttaaacatttagcggccattgtgaggttattaatcggcctaattttaatatgattgtgtgtcagagaataaaagggcctgtggagagggagggaggccgaggaatgccggtcactggagcacacagaacacacacagcatttaccaatgaagtttgccatttcatatgtgcatggttcgtagtgccccaaaacaagtagaaaagccacagcaaaaatcgctgatcacagatcaccataacagatgtaatcataacaaaaaaagttttaagtattgagagaattaccaaaatacgacacagaaacaaagtgagcacatgttttaaaaaaaacaactgtgccaatagacttgctaaacacacaattgccataaaccttcactgtgtagaaaaaatgcagcatctgtgaagtgcgatgcagtatctatgaaaatgcagtgtctgtgcagtgcggtgcagcgtctgtgaatctgtgaggtggggcgcggcgtctgtgagatgcggcgcagggtgtgtgaggtgctacgcggcgtctgtgacgtagggcgcagggtctgtgaggtgcggcgcagggtctgtgaggtgtggcgcggcgtctgtgaggtgtggcgcggcgtctgtgaggtgcggcgcggcgtctgtgaggtgcggcgcagggtctgtgaggtgtggcacggcgtctgtgaggtgtggcgcggcgtctgtgaggtgtggcgcggcgtctgtgaggtgtggcgcggcgtctgtgacgtagggcgcagggtctgtgaggtgcggcgcagggtctgtgaggtgtggcacggcgtctgtgaggtgtggcgcggcgtctgtgaggtgtggcgcggcgtctgtgaggtgtggcgcggcgtctgtgaggtggggcgcggggtctgtgaggtggggcgcggggtctgtgaggtgtgg

SEQ ID NO: 33183 - DNA, 2300 bp, Homo sapien
tggctgggtcaaatggtatttctagttctggatccctgaggaattgccacactgacttccacaatggttgaactagtttacagtcccaccaacagtgtaaaagtgttcctctttctccacatcctctccagcacctgtttttcctgactttttaatgattgccattctaactggtgtgagatgatatctcatggtggttttgatttgcatttctctgatggccagtgatggtgagcattttttcatgtgttttttggctgcataaatgtcttcttttgagaagtgtctgttcatgtccttcacccactttttgatggggttgtttttttcttgtaaatttgtttgagttcattgtagattatggatattagccctttgtcagatgaataggttgcaaaaattttctcccattttgtaggttgcctgttcactctgatggtagtttcttttgctgtgcagaagctctttagtttaattagatcccatttgtcaattttggcttttgttggcattgcttttcgtgttttagagatgaagtccttgcccatgcctatgtcctgaatggtaatgcctaggttttcttataatgttatttgtttttctgctattgggttgtaagagttattttttaaatttaggatattaacacattatcaaatatgcagtttgcaaatatcttctacacttctgtcatttgcctcttggtttgttgattgcttcctttgctgtgcagaaaatttttagtttgatgtaaccccatttgcttatttttgatttgcagcctgggctttaagtgtgatgtccaaaaaattattgccactttcccctatgttttcttctaggagttttataatttctggtcttccatttaggtctttttttcattttgagttgatttttgtgaatggagtaagataagcatccagttttattcatttgcatgtggaaatacagtttttccaacaccatattttttttttgagacagagtttcgctgtgttacccaggctggcttgcggtggcacaatcttagctcaccataacttctgactcctgggttcaagcagttctcctgcctcagccccccaagtagctgggactaccggtgcccaccaccatgcccggctaatttttgtgtttttttagtagagacggggtttcattatgttggccaggctggtctggaactcctgacctcgtgatccgcccaccttggcctcccaaagtgctgggattacaggcttcagccacccaccgtgcccggccttccagcaccatattttgaaatgactcttcttctctaattgtgtcctcttggcgctcttgtcaaaaattagttgaatatgtatgtttggatttatttctgggctctgtattctgtctcattggcctatgtgtctgtgtttatgctaatagcatattgctttggttaatattactttgtaatatgattttaaatagggttgtgtgataactgcctttctttctcggtattgctttggctgttcagggatttttgtggttctgtacaaattttaagggtttttttgctatttctgtgaagaataccattgagattttgataaggattgcattaatccacattgctttgggcagtataaacattttaacaatatcaattattctgagaaacaaacattagatagctttccatttatttgtgtcttcctcaatctatgttattaatattttgtattttttagcctacagatctttacctccttggttaaatttattccaactattttgtttttaatgttatcgtaaatgggattgttttcttgatttctttttcagctaagttgttatttgtgtatagaagtgctgtggatatttagagttgcttcagcgtcctggtgccgctgcactgcggagaccgtgtggtcccttagccaagatgcccgaggagactcagacccaagaccaaccaacggaggagtaggaggttgagacgttcacctttcaggcagaaattgcccagttgatgtcattgttcatcaatactttctacttgaacaaagagatctttctgagagagctcatttcaaatttatcagatgcattggacaaaatcctgtaggaaagcttgacggatcccagtaaattagactctgggaaagagccgcatattagccttataccaaacaaacaagatcgaacactcactattgtggatactggaattggaatgaccaaggctgacttgatcaacaaccttggaactatcaccaagtctgagaccaaagtgttcatggaagttttgcaggctggtgcagata

SEQ ID NO: 33184 - DNA, 2300 bp, Homo sapien
gatgtgatcttacctgagaaatgtttcactggcagaaagaagccctctttttgtctttaaaggctcctttcttttctcctttcatctgtttataagtttgaatagtgcttattggaataactagagcaaatctggaaaagcctgggcacattgttgtcagctacaggatttgctttgtgcagtttggcttttactacttccttgaagagctaccttccatcgagaccacactagtaaccctggcagtccatacacaagtaacacatcaccaaatggccacagacggccaaatggctgactttaaaagctggacaattcacatgcagaaatcactggcttccgttatttggggaattagtgtatctgatggggggcagtactgaaccagttttataatttcttctgtagaggccaaaccaaaaaagcctagaaggaatgaatgtaactgtgaatgaataaacaaatgtgtttccaaaaataagtgattcttatattagatcatattttgaaagatctcaaagtcctttttataaactccatttgtcgagaaaaataactccttttattaggttccctctcaagaatgtagaacatacagacttgggcatgaggaaacatttaagaatctcagtattgaacatttactaggaggacgtgcctttctgaagcgtactctcacatgtctccttcaaatctccatggatccttgcctcaggtgagtgacattttaggtggaaatcaaggaagaggtggaattttatatctgggcagatgtcatgtgggccaggttcagcctacataaaaaagtgatgcggaccataaactcggcacctacggcaagtggcctgcttgctaggcctctcttatctagatcacaggagcaggaaatgccagttgatatctggattacatatagagaattcatttggcaatcaccctcacaaattccgaccagcagccagaccaggaaatatattaccacatacttccttcctggggcagggataaaactgccctggaggagataagccttgaggccctgtgactcccgctcccacttagtgatcatgctcagaaccacttctgttgactgatatgaaatctcttcattacagtttactagaaataatccctcacaccaaaaaggggagtcatttccccaaagccaaatcgcttggcattttccaacccaagagtagaaaccagctgtcctgccacccaaacacccaatgcaccctccaccatccttgctgctgggctttaacaaaagaatctcaaaatcagagtgggatttgaagactagaagaagaaagcaaaacaagactatctggcaaggctggatgaggagctttgcagccaaccaggactgaggtcttgacacagaaggcctggagaggctgccattattccccagtgaattaagaaagacttgcagcagctacctcttaagatacaacagaagagaagccacccgaggtaagcgggtcagtgagaaggaagcttcagacaaaggaagctgtgagtgaggacaaaatgaagaggaacgaacccagccacacagtgacaaggaaaccacagggtttggcaagtgtctgcttgaccttctctaaagcaaattaaaaatgtagagatgaatctctaaatttaatatttaggaagaaagaattgcgattcacaatatagaggcagacagggtggtccgaaggtggaaaaagaggactgttcctctgtggtcctgtgagaaagttctttgatattagcaaagttttgggggctggtaaggtctgattggtgggtgaccgtggtgggcaaaactagtccgtgatttgcagttgttatctcacctgctacagatgaaagtggtctctggttacaacacgcagtttcagccacgggacttgcagacgacagcatttctagagtgacgtcatgtaccctgagtgccttttactcagacccgtcttctctgatttagttgggtatgacaagaatggcccaatttggataatcaacttgcacaatgctgactcaagaactgtagcactgagtgtaagggtgcatcattttcataaactcagaggaaaatgtggctggtggctgatggcagagctgagtcccgagagctcagccctgagctgcctttcatctggtcaccgtgttcaggggttcttctccgtgtaaataaacatctgcgatgaaaacctccacaggtctcatcagcaaagtgggtcttcaagaaaccaatttgctttcaaaacaggagatcgagtgataatctatctaatgttctagaaatgttt

SEQ ID NO: 33185 - DNA, 2300 bp, Homo sapien
tatgattagtaaagcttgaaaaacatttcactaggatctttatgactgaataacctcacaaacataggaaagttactggaaaaaaatatgagcagaatttcagaattctgcctttgctgaaagtgtttgttccctcctcctctactcatcaagacctgactgcttatgcaactcccccaaaccatcaatgggaagagctgaaaatgattttaatgaagaagaaaagctgatgtttaatttcaaaactgacggtttgaatagaagggagaggcatgaatttatcttgattctaacagaaagcattgtatttgggtctacaaacgaaattggtttcatttttattttttgtaagttttcgccaaactctgtgcatatatagaggctgggcaagaaagaaagaaatccagaaatacggcatatgccatcccttatttatttccccatgcgaccagccaacagcttcttcacctagtccctgcttcaagctgactttcagtctacttctctatcggaaatggagcttccccaaagactgcctcaatgtcagttacccagaggccttttttccatcttgggctcctaaacttctatgatattaaatgatactaccctttctggaaattctccttagctttgatttctataatttaactctgtttcattccttcttttatagcctttcttttctctatccctttactgtagacatattgtacgactttgttcttgaccttctgatctctccacattcattccttcagagcatgtatccattttcttggtgtcaggcttcctgactatctgattattaccatcatataacgatgttggtgatgagcatagctaacatatcctaggcattttccatgtaggttataataagcaccctatataactcgtaccatttaattcttcaaccctaaatgatactattactaaccacattgtatgagacgaggaaacagattttcatcaaaaccctggaaagccaacgtgaggagcccctgtgtgtctcctttgttaatgactccgggcatcatggcatgtggattgccatggaatggggattaggaagcgcagcactgtgaaaacaccagaaaatacgttgatagcggtaaggacgctcatctctgcacattgtgacggttttgtttctgagtcaggtttgagatgagccaatcctgactccatggtgccaccagggatcacgaatttaataagatcttcgtggatgcttggaacccaactggtctcggttttctactttagggaaagagccacagcttgagtggggtggttttggtgtcacatacgcgattaataacacccaccgctgcagaggaatcaccgtggactactcctcctttcatcccatgctcttgcgatggatccctctcacctgtttactgatttcattcaaattcttcagcgaccacaggaccccgacttgccttctctatcctggttccctcactctgctttacaggcctggcctgctcgctgctcctcacaccagcgctgcacggctccctccacgcctccgccctgtttcctccatcagacaggactagcttcctccatctctgtcgggcaaatgcctgcccagccttcaagaccctcctcagatgccgcctccacgattaggcttctttcagacccctgagcctgtaacacgggctaccataactctccacctcagcccacattcccacagcactcgcgacgtccgcgaccctcaacatggcgcttcattctcttttagggtatttcctgcttgtttcctgcacacacagtcgcgcgaggcgcagtcctgagtgacccacgcacgagtggcccgcgcttccagccgcgccgccgcaggccagcgagggcagcctgagccgcttcccgccccggcgaggaccgtcgccagcccgctgctctagcaggaggcggttccacagcgcacccggcagcccagccaccgtcagcaccgcgcctcgggcgggcttttctcccttccgggaggcgcgaatcctcaggggctccttgagagggcgccagggagcagctgcgcgcggatgccttttggccctctgcggccgccgtagctccccggcagaaacccggaagtggaactctgagccattcagcgtttgggtgaagacggaggcgggttctacagagacgtaggctgtcagggagtgtttatttcgcgtccgcttctgtttctccgcgcccctgtgctgccccgactcacatactcgtccagaaccggcctcagcctctccgcgcagaagtttcccggagccatggccgag

SEQ ID NO: 33186 - DNA, 2300 bp, Homo sapien
caactcactccttgatactttctatctcgcctaaaaatatcaaaacctctgtttatcacggagaccaggaggaaatactcgacatttgtatgtacctcgggcaaatctgccagttaaaaaagaagcggggatatgagtgcacaggtattttttcctaaaaagctaataaattaccattacgacctcctcctcacatttggctcaatttattttctgcatatatgttctctcatttaatcctcacagtcttctaaaagtataaaaaacgtctgaaagtataaatgtgtaaacggaggttcagatatttgatctcttaatgagtaaatggaagttcagacatattaaccaatttgccacaaattacaaaactagtaaatgacaagagtgcaggttcgagcccatatccctaaagcccatatacacctcaaccactgtgtgattcatcctggtttcactgtacatattagattagaaaaaattaataagttttctagaaagaaaagagacaatggagaaaataataatccctaataaaggaaattatcatgaactacgagatcagactaatgcagaccccccaggcagaggcctggagagatgcctcaggggacccaaactcgtgggtacggggtcacgggtcacctgcccgtctatcctgtttccagggtcgtccgcgcgggaggctgcccctctctgcacagacgccgggaaccgcggcccggcctccgtccagcccggacaggggccagggcgaagcctgggaggccacaaagccggctctccgcgccacggcttccaccggagttgcgggggtggagtgcgtccgaaaagaacggaggaggctcccgcccaagctgcaggacccacctcttcgtcttggttcccttgagcacgagcttggtagacttcacgtaggagtactcggccatggctccgggaaacttctgcgcggagaggctgaggccggttctggacgagtatgtgagtcggggcagcacaggggcgcggagaaacagaagcggacgcgaaataaacactccctgacagcctacgtctctgtagaacccgcctccgtcttcacccaaacgctgaatggctcagagttccacttccgggtttctgccggggagctacggcggccgcagagggccaaaaggcatccgcgcgcagctgctccctggcgccctctcaaggagcccctgaggattcgcgcctcccggaagggagaaaagcccgcccgaggcgcggtgctgacggtggctgggctgccgggtgcgctgtggaaccgcctcctgctagagcagcgggctggcgacggtcctcgccggggcgggaagcggctcaggctgccctcgctggcctgcggcggcgcggctggaagcgcgggccactcgtgcgtgggtcactcaggactgcgcctcgcgcgactgtgtgtgcaggaaacaagcaggaaataccctaaaagagaatgaagcgccatgttgagggtcgcggacgtcgcgagtgctgtgggaatgtgggctgaggtggagagttatggtagcccgtgttacaggctcaggggtctgaaagaagcctaatcgtggaggcggcatctgaggagggtcttgaaggctgggcaggcatttgcccgacagagatggaggaagctagtcctgtctgatggaggaaacagggcggaggcgtggagggagccgtgcagcgctggtgtgaggagcagcgagcaggccaggcctgtaaagcagagtgagggaaccaggatagagaaggcaagtcggggtcctgtggtcgctgaagaatttgaatgaaatcagtaaacaggtgagagggatccatcgcaagagcatgggatgaaaggaggagtagtccacggtgattcctctgcagcggtgggtgttattaatcgcgtatgtgacaccaaaaccaccccactcaagctgtggctctttccctaaagtagaaaaccgagaccagttgggttccaagcatccacgaagatcttattaaattcgtgatccctggtggcaccatggagtcaggattggctcatctcaaacctgactcagaaacaaaaccgtcacaatgtgcagagatgagcgtccttaccgctatcaacgtattttctggtgttttcacagtgctgcgcttcctaatccccattccatggcaatccacatgccatgatgcccggagtcattaacaaaggagacacacaggggctcctcacgttggctttccagggttttgatgaaaatctgtttcctcgtctcatacaatgtggttagtaatagtatcattta

SEQ ID NO: 33187 - DNA, 2300 bp, Homo sapien
ggccagcctggccaacatggtgaaaccctgtctatactaaaagtgcaaaaattaaacaggcatggttgtgggcacctgtaatcccagctactcgggaagctgagacaggagaatcgcttgaacccaggagtcagagtttgcagtgagccaagatcacgataatgcactccagcctgagcaacagagcaagactatgtatcaaaaataaataaataaataaactatcagatctcatgaggcttattcactgtcacgagaacagcatgggaaagacccatcccctgattcaattacctcccactgggtccctcccacgatatatgggaattatgggagctacaattcaagataagacttgactgggggcacagccaaagcatgtcacaggttatgaaacaaattgatctagcaggccagacgtaggagagatgagctccttgaccatcccaaggcagagtggttaacagatgcaagttgttttatgcatcaggaaaacaggaggtctagatatgctattagtagtcagcacaagagaatcaaggcacaagccttgctggcctcgacctcagctcaaaaagctgagttaattgaacttactaggcccctgcagttggaaaggatttaaaagttaacatttacactgattccaagtatgattttttagtgcttcatgcttatgctgcaatttggaatgggtggggactcctgaccccaagggcttttccatacaacatcattcagattttgagcttgttagaatactgctttgctgccagaaagtgactataattaattgcagaggacatcaaaagagagactgaccatgtaaaaggaaatgaccttgtagctgcagccaaggcccctgcactgaaagggccaatgaagcttatgggcgtgctggtcagcatacatagaactgggccggaacactctgaagaagaacagaaatgggccagggattgcatttcagtccagggcccctcgggctggctgaatgatggtaataaattactaatgccaagtaccaatcacaagagtataactcagcactttcatgattcttttcaccctagaagggattctttgtttctgttaatgtctcacttgtttataggggtaaatcttttcaagacactaaaacaggtgactcagcactgtgagctctgtgcctgacatgacccaaacggccagcaattttctcctccagttaaacctgtccaaaattaaggaacctatccaggtgagaactggcaactctaatgtaccccaatgactttctgcaagagattcaaatatttgctaatgcttactgataccttcactggttagatcgaggcattccccaccccatctgaaaaatgtttaccagaagaaataactcctcagtttgggtaatctaaaagcctgcaaagtgacaatggcccatctttcacagcaggcgtaacccaacacctatcctcagctttaagaatccaatattaccttcactctgtgtggagaccgcagtcctctggaaaggtgaaagggctaatcctaaagaagactctagctaaatcagaggcctgactatctctaacacccatagcttactgcagatttgaactgctccaaagtaaaacgtataattaagtcctgttaacatgtggaaggcctttcctaacgacagatctcctaatagatgaaaagattcatcaattacaaaaatatgtcatcaatctaggacaggtgcaaaggcactccgtgcatatggaaacaagcgtcttcccctcccacatgggaggaaaattcagtttcagctcagctagggatttagtcttactaaagacgtgggaggaagttctccagctgagcagctttccccaacgtggaagggaccacgcaaggacacctgagttctccaacagacgttcaacgccaggggagtcacaggtgggtgcacctgtgtggaagtaaagctgttgcttattctgggagcccaatcctaggctgagggaggtgggcgcggggctgtttaagcgttggcggaggccgggctgggtcgctgtgcgtctgctcctccttctcgcgcttctcctgccgccctaatcctgccttggccacgagggagcttgtgctcacgcagaccgggcagtgcgggaaccagatcggcgccaaggttggcagccggggctctgagggcccagcccgggcctgccgggtggccggggaagatgttggcagcggcgggggcggtgcccctgcattgcggcccctgggctccctgccggggacggtggaaccgggtggctggcgaggcggcg

SEQ ID NO: 33188 - DNA, 2300 bp, Homo sapien
tcccgggttcaagcaatcctcctgcctcccaactagctgggactacaggcatgagccaccacattcagctaatttttttttttgtatttttagtgcagatggggcttccttatgttggctaggctagccttgaactcctgacctaaggtgatccacccgccttggcctcgcaaagtgctgggattacaggcataagccaccatgcccagccagtcctaagttttgcctgagaatttctctttctaagaaagtacatcatatggcagttacaaggtctcttttgtctaaaataaatagaatttaataaataaaaatttaaaaaatttacctgagattaaaggacaaataaaaacacatgggtaatatgttctctgtaggaatatattttaacaatgacataaattattaataatcactaaatgttgtaataatttattaactaaaattaacaaaattcctattacgatatctaggaaaatactttcttagagtaaaatattctcatatcttgagagagcattggttaaaaacagcaaagatgtgcaagtcgatgtcttatcaagtacttactatcacgtaagtagcagacccctcttcacagcttttacagagttatccaaaacgcagtcatttacacaagagcagacaattttcctagctttctattgagtttataggttaatgttgttacaaaatttatgaaattacctgaccaaattttatatattatttcataatatatcaaaatttatttagatgtcaaatttcatatcataatattataatatataacgatatcatattatgataagttccatttactttcagacaatttcactaggcagtgtctgtctaccactaattcttttttcgttccactatttgcacaggcagcacagctgggaaaacacagactcacccaacacagtctcttccctgtgactttctcctcctcaaggaatcagttcatcagtcaatcaagtcatttgggactggaggctgagtactccttaacatagaaggtctcgttcctgcatgctttcctcagcagagggggagacaagaaggtccttttaggggacacttgcttggacatagactaggctagttggagggctctgaccagcagagacagactccgccgcagtaggaagggatgaggcagctgttctgaacctggagctccaccacaccttgtcctgtctcactgaggcagttttgagaggctgccctggaatacgtcttgctggtggatgttgagaatcaatgtgggctttgacgggattcaggtggtgtccgcagtgtgaagacaggagctgatgttcagaatctaggctgtttgtcttgtgatcagttgggttacctgtttgagaccaagtccattttcactagggagggctgaataaagcccacagaacacaatggcgctcccaggatgactgaggaagggtgagaatgggggaaagtttttccaccgagactttttgctacctcaggaatcgggggctaattaggttagcactgactcaacctaatcaattcaattttattgcatttgatctaattatcttccccatttttaaggtaggaagggccatttcatttggtatttattttttctctgcatttttatttcatcatatatgtgtggacctaatacaatcaaccataatttgacatttgttgtttccaagcatttaagaaattataatatctatgcatacaatgttaacactatgtataataaattctctttctgtgcaaaatatataacatatgacaatataggcatgtttaattgtgcatcttgaaaggtgaacaggatcataaatccttccaggtaggaactgggacagaaataggaagaaatgcttccccgattttccggtccctgtgctcccggttctttgttttctggacaccatgacaggatcctgaaaatgtctccctttaactgtgtctaggtccccagtagaactacagcaagaaacttctgattgaggctctaagaagcggcaggaatgagaaaactcttcagccaataagagtaagccacgcccagccgagggacgtataaaaggcaggtctagcagactaacccacactctgcctttggacgtgagagagagcgcacctttcacttgagcttcaacatgggaaagggaaatgaagactccgatctccactgctcctccatccagtgctccactgaccagccccctttccaacagatctcctttacagaaaagggctcagatgagaagaaaccattcaaagaaaaaggcaagaccgccttctcc

SEQ ID NO: 33189 - DNA, 2300 bp, Homo sapien
caaaatgcacatgctctgtagaattaaaagtccctactgaagatagcgggtttcaaatgaccccaagtgctccacgtcttaaaagttcctccggtaaagctggaacactatctgttcctgaggtatcaggtcccatttgtggctctgagccactggcaagccaggcctgacttgagatgagaccaatgatttcaagtgtaaaatgcctaaatactcagtagcttcaggttgcattttggagcttgtccacttaagtgggttgatgaaaatggctcacaagactcacgcctcagaaatggggttttttcctttgctcttagcagattttatgcaacccaataattaacctttctgatgcctagactttcacattcgtgaaaaaggcgccattgaaagtgacctttccaagaagccacagcccttgtcacccctgcagagctctgaagctgctcacaagcaggccaggtggaagatttctctcaaaaacggttgagtgcgtgctctggctagagaaaaaagagggctgcggcacaatgacagtgtcttggacatcaggaaagttctcacgcagtttaggaaagaaggcagcaccctgggctgcagaagacgtactcctctggaaagaaccctgggtgcaactgaaagaggaacctgagaaggatagggccaagcgggtgaggacaacccgcccgatttgggaaaaggtaaggtatctttgtagggtaataccctcctcaatgctcagcccagacctgccctccaggtgcacctctgtactcactctccttgcaaagagtcggcatagcatcagaactcagcagtgctttggacaccgggaagtccacaccgctctgcccctccctccagggctatggaccccggatcccggtacatgctgggattatagctctgaagcttaccgacaaacaggctgagagtaggtaacggactacagctcccagcatattaggtggggcgggtaccactctgccccttcttccagggctgcgcctcgccctggagcctggtgcatgctgggattgtagtcctgtagccctttgaccaaagggttgggagtgtttatgagaatgcatcttccaacaatcctagggaggcgcgcacagccctgcctcttcctccggtgacgcgcactttcccggagcccggtgcatgctaggattgtagtgctgcagccctgtgaccaaagggctgggagtgtttatgagactgcatctcccagcaagaccagcgagaggcgcggagcctcgtcccttcctccagtgattagcgcactctccctgagcctggtgcatgctgggattgcagtgctcgcagccctgtgaccaaagggctgggagtgtttatgagactgcatctcccagcaagaccagcgagaggcgcggagcctcgtcccttcctccagtgattagcgcactctccctgagcctggtgcatgctgggattgcagtgctgcagccctgtgaccaaagagctttgttatagttatctgtgaagtgttcaacaaactactttacttcattattactggaagccagaagctcagttgtgttcactttttggattttataacagtgagattgtgtaatatgtatacttttacatctactttcttctatgcaacattatatttatgatattaattcatgatattgcagatagctatagtttattttaaaattattttttacattgtggtaaagtatacataaaattaaccattttagctattttaagtgtgcagctcagaaaaattaactactttcacattgttttgcaactgtcattaccactcatagggaccttctttcaacttgcagaaacaaaactctatacccattaaataagctccttgttactccccctctagctcctaagaactactcttctatttgggtttctagaatttaactactctaagtatctcataagtggaatgattcagtatttgtccttttatgactggctcatgtcactttgcacaatgtccttaaggttcatgcatgacgtaccatgtgtcagaatttccttattttacataactgaataacattccactctatgtataaatcacattttatctattaatcattgatggtaattcaaacaacacttgagtaattcaaacacctttttggtgatgtgagtaatgctgctatgaacctaggtgtatgtatattattttgtgtctttgctttcatatcttttgctgcatacccagatgtgaaattgctggatcgtatggtgattttatgtgtaaattttttagttactgtgttgtt

SEQ ID NO: 33190 - DNA, 2300 bp, Homo sapien
gctcaccgccattcatgaaggggtggagcctgcctgcctgtgggcctttacaagggcggctggctggctggctggctgtccgggcaggcctcctggctgcacctgccgcagtgcacagtccggctgaggtgcacgggagcccgccggcctctctctgcccgcgtccgtccgtgaaattccggccggggctcaccgcgatggccctcccgacaccctcggacagcaccctccccgcggaagcccggggacgaggacggcgacggagactcgtttggaccccgagccaaagcgaggccctgcgagcctgctttgagcggaacccgtacccgggcatcgccaccagagaacggctggcccaggccatcggcattccggagcccagggtccagatttggtttcagaatgagaggtcacgccagctgaggcagcaccggcgggaatctcggccctggcccgggagacgcggcccgccagaaggccggcgaaagcggaccgccgtcaccggatcccagaccgccctgctcctccgagcctttgagaaggatcgctttccaggcatcgccgcccgggaggagctggccagagagacgggcctcccggagtccaggattcagatctggtttcagaatcgaagggccaggcacccgggacagggtggcagggcgcccgcgcaggcaggcggcctgtgcagcgcggcccccggcgggggtcaccctgctccctcgtgggtcgccttcgcccacaccggcgcgtggggaacggggcttcccgcaccccacgtgccctgcgcgcctggggctctcccacagggggctttcgtgagccaggcagcgagggccgcccccgcgctgcagcccagccaggccgcgccggcagagggggtctcccaacctgccccggcgcgcggggatttcgcctacgccgccccggctcctccggacggggcgctctcccaccctcaggctcctcggtggcctccgcacccgggcaaaagccgggaggaccgggacccgcagcgcgacggcctgccgggcccctgcgcggtggcacagcctgggcccgctcaagcggggccgcagggccaaggggtgcttgcgccacccacgtcccaggggagtccgtggtggggctggggccggggtccccaggtcgccggggcggcgtgggaaccccaagccggggcagctccacctccccagcccgcgcccccggacgcctccgcctccgcgcggcaggggcagatgcaaggcatcccggcgccctcccaggcgctccaggagccggcgccctggtctgcactcccctgcggcctgctgctggatgagctcctggcgagcccggagtttctgcagcaggcgcaacctctcctagaaacggaggccccgggggagctggaggcctcggaagaggccgcctcgctggaagcacccctcagcgaggaagaataccgggctctgctggaggagctttaggacgcggggttgggacggggtcgggtggttcggggcagggcggtggcctctctttcgcggggaacacctggctggctacggaggggcgtgtctccgccccgccccctccaccgggctgaccggcctgggattcctgccttctaggtccaggcccggtgagagactccacaccgcggagaactgccattctttcctgggcatcccggggatcccagagccggcccaggtaccagcaggtgggccgcctactgcgcacgcgcgggtttgcgggcagccgcctgggctgtgggagcagcccgggcagagctctcctgcctctccaccagcccaccccgccgcctgaccgccccctccccacccccaccccccacccccggaaaacgcgtcgtcccctgggctgggtggagacccccgtcccgcgaaacaccgggccccgcgcagcgtccgggcctgacaccgctccggcggctcgcctcctctgcgcccccgcgccaccgtcgcccgcccgcccgggcccctgcagccgcccagctgccagcacggagcgcctggcggcggaacgcagaccccaggcccggcgcacaccggggacgctgagcgttccaggcgggagggaaggcgggcagagatggagagaggaacgggagacctagaggggcggaaggatgggcggagggacgttaggagggagggagggaggcagggaggcagggaggaacggagggagagacagagcgacgcagggactgggggcgggcgggagggagccggggacggacggggggaggaaggcagggaggaaaagcggtcctcggcctccgggagtag

SEQ ID NO: 33191 - DNA, 2300 bp, Homo sapien
ctccccatatcgcaggggatttacattcctctgcattatttttcgtaatatccagggggaagaggaagatattactccccatatagcatgggagaacaattccctgcaatattgttcataatatctctggggggagagaatgatatttctccttttattgcaggaagtgtacaccccccttgcgatattgtttataacatctagtgggggagaggacgatgttactccccatattgcagggggtgtacaaccccctagaatattgttcataatatccacacggggaggagatgatgttactacccatatcgccagggtgtactgccccctgccatattgtttgtaatatccaggctggaaaaggatgatattactccctgtatcacaggggatgtacacctccctgcgatgtaatatccagggtgggagaggagtatattactccccatgaggcagagtgtgtatacacccctctgtgatattgttcataatatccactgggggatatgatattactcccaatatcgtaaacacctcatgtgtacaccatctgtgatattgtttgtaatatccagtaggggagaggatgatactactttccacatcccagggggtttacacccctctgtgatacagtttgtaatatccagagggggagagggttatattactcctcatattgcaggacatgtacacccccctgtgatattgtttgtaatattgttcccaatatccttttcccccatggatataggaacagtatcacataggacgtgtacaccccctgccatattgggagtagtcgtgttttctcccttgctggacattaggaacaataccatgggttgggggtgcacaccccctgcgatattgacagtgatatcatccactatcccctaaatatcggaacaatatcacaagggggatgtacacacttggcgatattgaaagtgatatgatcctctccccacctggatattaggaacaatatcacagaaggggtgtacaccccctgtgatattgacagtaatatcttctcccccctggatattaggagcaatatcacagaagcgttgtacactccctgtgatattgacagtaatatcctctcccccccggatattaggaacaatatcacagaagaggtgtacacccagtgtgatattgacagtaatttcctctccccctcccggatattaggaacaataccacgggggggtgtacaccccctgcgatattgacagtaatatcatcctctcccccccagatattagtaacaatatcaccaaaggtgtctacaccccctgtgatattgacagtaatatcctctcccccccacccagatattaagaacaataccacgggaggatgtacaccctctgtgacattgactgtaatatcaacctgtcgcccccctggatatgaggaagaatatcatggggggtgcacaccctctgtgatattgggagtaatatcacccactatcccctaaatattaggaacaatatcacaaggcagggagagcaccgtctgcgatattgggagtaatgtcatcctttccctgcccctgcatactaggaataatatcacaggggatgtacacccccatgcgctattgggagtaacatcaccctttcttcccatggatattaggaacaatatcacagaagtggtgtacacatgctgcactgtatagaacaaagcaggcagaggaaggtgggataaccttgctagctgaagcttctggctctctttttttcttcttcccatgcaggacacctgattcccttcttcctgcccttggacatgagactccaggttcttatgtctttggactctgggacttgcaccagcggcttccccgaggctctcaggccctcggcctcagactgaagactgcactgcgggctttcctggttttgaggcttttggacttggactgagccactactagcttctctctttccctacctggcagacagcctattgtgggactgccttctaaccgtgtgaacctattctctctggtaaactcccttatacatatacgtgtatcttgttggatctgtccctctggagaaccctaactaatacattttgtttattttttctccactgccctttcctctgattctaggcttacctagaccaccaccattctttccccctttctaaagtaaaagttgtttttttctcactaaatgcatggtattctgcccattttccatggcttccctcagccctgctctgtttattcttgctatcttaagaggaaatccctgcctcttccgtggcttttc

SEQ ID NO: 33192 - DNA, 2300 bp, Homo sapien
aaaggcttttgagaataacctttccccatctgcatgtgtgtctctttcagtggcaaatgcccttttaagtttttagcgcatttttattgccattctggaaagctggggttgtgacttccatctgagtccctgaggccagcatagtaaagctgagctgagaatgggcctcgtgcttgagaaaaggcaccaacacctaaggcatgtttgttaccagtgcaaaacatgattggtgggtgggttgaacttgaacttggtgtaagattctgcagaagcaactgaaacccaggcggggctctaggccccaagatgtttactgtattttagtttgtcagagcaacatttggggaaaataaacactcaacagttaagtgatctgtgtgcagtttctaatagcacaggaaatgctaatgaaatcacattgggtgaaaatagttaaagtacacaattgtaaatggagtgggatctcagctatttaaagggaacagagaaaatactgaagtgaaattcaccagcatcctggcacccgcacccctcgctaaggaggccgaggtagcgcctgcagcagccgggagccacagggagcaccgggagtgcagaggagggagccccccatagggtggccctgaccagggctggcaggggcaagtgtggacgcccggccccttgcccaggctgggaccactctgagggacaactcatccttcggagcgcctggtgggctgtggctgtggccctcgagtggcctcctctcccctgtcctgcccacctacccccagcctccaggaagagctatacaattgcttttttaactgacccctgaaccaaagagcagcccgtgttttctagtcctaatgacctgctttatgttccaaggaacaggacaccccagcccccgtgagaccccttccttgtgggagctcagtcactgaccttcccctgaggggtggagacccagggcatggaagggctcaggacatggccgtgcccaccactaacctccctcctctcttgtctcaggccaggtacaggggtctggtcttcctgcacccaggctggccgctgtgcgcccatgagaaggtggtggtgcagctggcgtccctgcacggagtcaggctccagcccggggacttctacctgcaggtcacgtcggcggggaagcagtcagctagactggtcttgaaatgcctgtcccggctgggaagaggcacagaggaagtcaccgtccctgaggccatgtatggctgtgtcttcacgggggcgttcctggagtgggtgaaccgggagcggcgccatgtccccctgcaaacctgcttgctgacctcaggcttggccgtccaccgagccccgtggagcgacgtcactgaccctgtctttgtccccagccctggagccatcctgcagagctactccagctgcacaggtcctgagcggctgcccagcagcccctcagaggccccagtccccacccaagccacagcaggcccccatttccagggaagcgcctcttgccccgacaccctgacctcaccctgccgccgagggcatacgggcagcgaccagctcaggcaccttccttatccagaaagagccgagctgggaagccccaggaccctgtctggaagctcagacagggacttcgaaaaggtcagcccctcagagcagggcccacggatgccccctgagaactgtggggggtcgggggagaggccggaccccatggaccaggaggacagacccaaggccctcaccttccacacagacctgggcatcccgagcagcaggaggcggccgccgggggaccccacttgtgtgcagcctagacgctggttcagggagtcgtacatggaagccttgcggaaccccatgcccctgggcagctctgaggaggccctcggggacctggcctgcagctccctgactggagccagcagggacctggggactggggcagtagccagtgggacccaggaggaaacctctggcccccggggagacccccaacagaccccaagtctagagaaggagaggcacacacccagccggacaggtccaggagctgcagggcggactcttcccaggagatctcggtcctgggaaagggcacccagaagctccagaggggcccaggctgcagcctgccacacctcccaccactcagcaggctccaggcctgggggccacctaggaggacaagctgtggggaccccaaactgtgtcccagtagagggtcccggctgcaccaaagaggaaggtaaatgctccccacgccctcccctgcgcacccccacaacctcccctac

SEQ ID NO: 33193 - DNA, 2300 bp, Homo sapien
gctgtccctgagtctcagcaagtggctgcactgacgtttctgtctccactgagcccatgtttcaggtttggggggcagcagaacacaggaaggggggactcctgccgacccccgtgtgatttccagcctttgcttcctagtgagtacattgtccatttactttgatcaagacccaattaagactgtcctcattctgattttgtttctggatatttactgaggaggcttttgtgtgggtcgtgacactgggcctcggccttcccgccagtgctgtgagggccagttcctgaccagccaggaggtgctgtgttctcagaaacagtgagaatctgtcaaatctgttatgcaggagtgaaggggacaagttctgcagctctgctgtgaatgggatgtgcgttcagcagcatttctgcccacagctgtgcttcccatcattagctgctttttagtttttccaacttaaaaaacaagtaaatacaaataatggtagaaaaaaaatctgccaactcccattggtatcatcaggatcgagttatttaaggaggttgggggtaagatgccatcaagtagaggagaaaagcaacgcacctcactgttcattagggcagggcccccggctcaccatggccctgggaaatctcctttgaaagtgcagtggatggtgctgtctgaggtgcagagctgtgggacacgcccagatcccaccccagcagaacccagagaaccttctcctggagagtcccgccgcccaggccaggctttggcattcatgctgccggagtgtgggccctgccctccaggctcacatgctggccactgctcagttgctgagagtgaccaggtggccccactccagccagctcatgaaacagagccaccagcctaagcgtcctgcatttgtttatggtgtaaaagtacttttggatgcttagcatgttttttagtggtaataaaaaaattaaaaaataccacctgatttgggaagcccagtttgggcctctatgatcacagcactgcagttttgcacgggaggtaccgtctggccaagctgaccacactggccagcccacctctccactctctcagggcaacacgagtggatcctctgggtcctgccctgccctggggatacggaggtagtgagacttcgggcagccacagaggagcccacatctcctgcagatgtgtgtgttgtcaggaagggctcttcaaagactcagaagtgcttcagaggctcacccctcacgggaacagtgctcctacaaaccctgcttggcagcccctcctcaggacgctcattcaaggcagggagaccccagccaagggtggggctgagggttccgtggagggccatccctggggcctagcctgctgttgtccacctctgggccgtcctgcgcccccggccttgctctccggccactgcagcccccgagtacccctgaagctgctccttaaggtgctgagccccttgggtcaggagtaactaccatggaagctgaccctcgagaaaacctcctggtcagtcagcagtgggcaaggatccaaaagccgttttctcacgaaatttccaccacagccttccttagcagaagcgtcactgctggaagtgtttgagtcatctcaccgctagaatgaaaccagctgggaacgagaaaccttatgttcagagtttcagttaggaagcctgggaatctgtctgtcttggtttccaaagggatctttcctctgaaaaggccatgatcaataatgtggaaatgtttcacctgacaagtttctttttgaaatatagtccttatcttttcaagttactgtgtatcaagagagcagctccaggtaacagggagagaatgagtggaggtgcaggtgagtcgctccttgctgaggatgtgcagtagactggaagattattctttttttttttttttttttttgagacagagtctcactctgtcaccaggctggagtgcaggagtgcagtggcgtgatctcgcctcactgcagcatccgcctcccaggttcaagtgattctcctgcctcagcttcccaagtggctgggactataggtgcctgccactacccccagctaatttttgtattttgagtagagacgaggtttcaccatgttggccaggctggtctcgatctcttgacctcgtgatctacccgcctcagcctcccaaagtcctgggattacaggcacgagcccccacgcctggccggaagcttttttatcgtgcatcccacatgtgcccatgtgcctccagtccacatgtgaccctgctcatccctccgggttt

SEQ ID NO: 33194 - DNA, 2300 bp, Homo sapien
gactacaggtgtgcaccgtcacgacttgctaatttttgtatttttttgtagagacggggttttgctgtgttgctcaggctggtcactcgatctgcccacctgggcctcgcagagtgctggggttacaggtatgagccaccacgcccagcccactggtttcctttacacccgttttgttccccagcagtccttatgagggcacctgaaataaggaacctcctccccgacttgagagcagcaaagccttcagagggaactaagttattaaaacccaccccacacaaaatgcttctaaacgccttggctgacttaatccttgcagtgtgctgaggttaagtatgattatccatctcctgtgaacaggaagactgaggctcagagcttaagtgatttgcccacggttcactgcaggggataaaactcggctgtccctggcaggtcccaaagtcacggccttcaggctcccacaccatgctgcctccctcaccggggctccacactctcagcctggaaaacacgaattttaagaaaaccatgacttacgaaaagcagccaatcccagcattggaaccaacagggcataattccacctgcttccatcaccaccatccgccctggaattaggccggatattccaatttgggggatcatttaggttattcatggagatataccttgaagtaaagaataaaaacgttaactacttttattcaagaaatttttcttcagttttaactatgtgcttgctgcacagcactgaggccctacgggattcaaagaagaaaaaaactagaccagagccgggcatggtggcgggcacctgtagtcccagctactcgggaggctgaggcaggagaatcgcttgaacctgggaggtggaggttgcagtgagtcgaggtcgcgccactgcactccagcctggtgacagaacgagactccgtcccccccaaaaaaaaagaaaaagaaaaaggaaaaaaaaaacaagaacttaagatgaaagcgactcacaatctggttggggaaagtggagaaaacagacatgtcttaagcatctgaagtgcaggtagaatcaggtaagttctctggtacaaatatgtttaaatgtatggctgctgcgatggttaattttgtttgtcaacttgacggcatcatgaggtgctcagatacatggttaagcattatttctgggcgtgtctgtaagggtgtttttggatgagattagcaattgaacctttaaaccaattcctcacgtctcccttctatttgttgtgtctctggagaaccctcatacagttgtatcaaagatacagaatcaactcgataaaagtgggctcacaccggacactttcatatgagctagggtttgaagagtgagcagcattttgacaggcagagaaagaaggaaagggtcttctgatcagaaggaagactgtgaggaaggcagggaggggtgatgtggggaaggtgcaaacagtgctagaagcttctgaggcctcctcgtggtggtgatgaatgcagagattacagagttctctgcttcgggctcagcatgcaccctccatagctaggctgggggctaacgttagtaagaatttactgatttactgagtacctacacgaagtttcacattttcacaaagtagagtcactttaagtttgtttacatgtgacctccacaaacacacacaattacaaaatagtttagttaatcaagggatgtataataaacaagaggtcggaggccccgggccgctcccgcccacctccgcggacgagcgcccccctccgaccccattccctgcggtctgggcgttcaggcccttcggtctgggcgatcccggagaaccacccacggggctttaaaaatgttggtgcccaccacctccccggaacagggcccgctctacctcggtcggggagcgcgggacctcagcgttcccttaacgccaccgtccgcgggtccgctttgcgcaggcgcggcgcccccactcagtacccgctccgggcgtggcatggtgcgcaggcgcgatgtcccccactgcagccccgctcgactccggcgtggtgcgcaggcgcggtatcccccctcccccgccagctcgaccccggtgtggtgcgcaggcgcagtctgcgcagggactggcgggactgcgcggcggcaacagcagacatgtcgggggtccggggcctgtcgcggctgctgagcgctcggcgcctggcgctggccaaggcggtgagtccgtgccgcggaccggggcggggcaggcgggggccgaggcggcggtaggagcgggacggtc

SEQ ID NO: 33195 - DNA, 2300 bp, Homo sapien
aaagaaccaaacaactaaacctatccaatttagcttgattaaataaaaccctagaaggccgattcttaagatgcaatcgtagagggcacattcagacactcagagagcaagggctcagggaagtataaccctgaccaccatcctggactaagccgagcccggccctagaggcactcagcgcacaggcaagcacaggtcccggcgtcctcgcccggtcagtgcgctgagctctccgcctgagttttaaaaactggcacagctgcttttaaacactggcacatttttggtggcataaggaccaccaaacacgacccaaagtagaagcccttaacttacaaggtctcgaagtggacatggacagatttgcgctttctggaaaggcgaactgcaagcctaagctcgggcgcgccacgcttcccaccggacgcccaccgggccgagcccggccactcctcgcacccacccgggcggtctcacccgccccgccggccccacccacgggctgcgggctgctcctcaggacaacccgcacagagggcggcagaggcccagcccagccagggcggccaccggccgctatccgcccgggtgaccttgggcagacacgactcctccccgagtccacctgccaggcactgaggcgaggggctacctcagcccgcggggtcccaggaccccaggcccggaccaaggcggcggaggggacgcccagcaagcccgcggggttgtgaccttcacccggacgcggactatctactaaggaccgagctccccgggtccccgagtccgccccgcggcttcccctcgcaccggcccagggctctctcagccccttcccgatcccgggacagagggcgcagggacccggcgcccgctccgctcggacccgctggggaccgtcccgctcctaccgccgcctcggcccccgcctgccccgccccggtccgcggcacggactcaccgccttggccagcgccaggcgccgagcgctcagcagccgcgacaggccccggacccccgacatgtctgctgttgccgccgcgcagtcccgccagtccctgcgcagactgcgcctgcgcaccacaccggggtcgagctggcgggggaggggggataccgcgcctgcgcaccacgccggagtcgagcggggctgcagtgggggacatcgcgcctgcgcaccatgccacgcccggagcgggtactgagtgggggcgccgcgcctgcgcaaagcggacccgcggacggtggcgttaagggaacgctgaggtcccgcgctccccgaccgaggtagagcgggccctgttccggggaggtggtgggcaccaacatttttaaagccccgtgggtggttctccgggatcgcccagaccgaagggcctgaacgcccagaccgcagggaatggggtcggaggggggcgctcgtccgcggaggtgggcgggagcggcccggggcctccgacctcttgtttattatacatcccttgattaactaaactattttgtaattgtgtgtgtttgtggaggtcacatgtaaacaaacttaaagtgactctactttgtgaaaatgtgaaacttcgtgtaggtactcagtaaatcagtaaattcttactaacgttagcccccagcctagctatggagggtgcatgctgagcccgaagcagagaactctgtaatctctgcattcatcaccaccacgaggaggcctcagaagcttctagcactgtttgcaccttccccacatcacccctccctgccttcctcacagtcttccttctgatcagaagaccctttccttctttctctgcctgtcaaaatgctgctcactcttcaaaccctagctcatatgaaagtgtccggtgtgagcccacttttatcgagttgattctgtatctttgatacaactgtatgagggttctccagagacacaacaaatagaagggagacgtgaggaattggtttaaaggttcaattgctaatctcatccaaaaacacccttacagacacgcccagaaataatgcttaaccatgtatctgagcacctcatgatgccgtcaagttgacaaacaaaattaaccatcgcagcagccatacatttaaacatatttgtaccagagaacttacctgattctacctgcacttcagatgcttaagacatgtctgttttctccactttccccaaccagattgtgagtcgctttcatcttaagttcttgttttttttttcctttttctttttctttttttttgggggggacggagtctcgttctgtcaccaggctggagtgcagtggcgcgacctc

SEQ ID NO: 33196 - DNA, 2300 bp, Homo sapien
tgattaaactgctttcgaacagtttgcaagctgtgtcagtgcactgggccataaaaagaaaccaaaagcaaaataagtctgataagttcgtcacttgaaagcagttgtaaatacagaatgatcaaaacaccacagaactggccaaaatgaggttaaaaaattctctctggactttactgaaattatcctcagcatctattttccaaacacatttctcagttggctatcacgaatttctttcttttttctgctaattttttgattatgctgttccttcgtaaactccaattcttcaggaaaaaaagcctatctgaaatgccgataaatatgctgcttgcaggcagaatttctgtaggaaaagctaacttcatcaagataaaaagacttttacaaaacccaagactaaattttggttcaattttgctatcttgccatcccgtctgaggtgcctccgccgctggcagggtcttagtctgcagaaggaacaccgggcaccatctgggttgaggacaaaggcactagctctagcttttctccaatcacaagctaccatttcccctaaaaagccccactgaccatgggctttccttcctgcttgtggacgccctcctagcagctcttaaaagcccaagatgcggcaggggtctctgctcagtcagtaccaaccacagcaacacactagaacggtttacacgctttctgatgttggcaggatggctgtatgactaatcctcacatttaactcaacgagatttttaataagtatttcaaaaaggagaaaattgcacaattacaggcataattcaaatcaatattgctgaatgccttggttcctattgagatttttattctgcaatttaaaattactttgtaattaaggaggtgggtgggtaagttcatttaaaagaaccaaacaactaaacctatccaatttagcttgattaaataaaaccctagaaggccgattcttaagatgcaatcgtagagggcacattcagacactcagagagcaagggctcagggaagtataaccctgaccaccatcctggactaagccgagcccggccctagaggcactcagcgcacaggcaagcacaggtcccggcgtcctcgcccggtcagtgcgctgagctctccgcctgagttttaaaaactggcacagctgcttttaaacactggcacatttttggtggcataaggaccaccaaacacgacccaaagtagaagcccttaacttacaaggtctcgaagtggacatggacagatttgcgctttctggaaaggcgaactgcaagcctaagctcgggcgcgccacgcttcccaccggacgcccaccgggccgagcccggccactcctcgcacccacccgggcggtctcacccgccccgccggccccacccacgggctgcgggctgctcctcaggacaacccgcacagagggcggcagaggcccagcccagccagggcggccaccggccgctatccgcccgggtgaccttgggcagacacgactcctccccgagtccacctgccaggcactgaggcgaggggctacctcagcccgcggggtcccaggaccccaggcccggaccaaggcggcggaggggacgcccagcaagcccgcggggttgtgaccttcacccggacgcggactatctactaaggaccgagctccccgggtccccgagtccgccccgcggcttcccctcgcaccggcccagggctctctcagccccttcccgatcccgggacagagggcgcagggacccggcgcccgctccgctcggacccgctggggaccgtcccgctcctaccgccgcctcggcccccgcctgccccgccccggtccgcggcacggactcaccgccttggccagcgccaggcgccgagcgctcagcagccgcgacaggccccggacccccgacatgtctgctgttgccgccgcgcagtcccgccagtccctgcgcagactgcgcctgcgcaccacaccggggtcgagctggcgggggaggggggataccgcgcctgcgcaccacgccggagtcgagcggggctgcagtgggggacatcgcgcctgcgcaccatgccacgcccggagcgggtactgagtgggggcgccgcgcctgcgcaaagcggacccgcggacggtggcgttaagggaacgctgaggtcccgcgctccccgaccgaggtagagcgggccctgttccggggaggtggtgggcaccaacatttttaaagccccgtgggtggttctccgggatcgcccagaccgaagggcctgaacgcccagaccgcagg

SEQ ID NO: 33197 - DNA, 2300 bp, Homo sapien
gaccaggatgccatccactacatgacggagcaggcccccgccgccgtggtcgaggtgatgggcgggaggctctgggtgttctcgtggtctgtttctagtacaaaagaatcctggaaaaaaatgtaagcaattgaggcggatgtggcagccaaaagaatggtgatgagcaaagttcacaagaagagtctttttccgttatgaactatgcattatatgtaacaagaaaacttctctttgatgaagtgttgacattttcataaaataggttactttgggtttgcagatttgtgttaaacttgtttagtgtagattagctgcgaatatcttgactcctttaaggtgttaaggtttttgtttgtttttatctttcacagctagaaaattatggcatgccgtttagcagaactgaagatgggaagatttatcagcgtgcatttggtggacagagcctcaagtttggaaagggcgggcaggcccatcggtgctgctgtgtggctgatcggactggccactcgctattgcacaccttatatggaagggtaaggccgcccccgtccacctgagacaggacacgtagtgctggggcttatggtgacagtggggaatgggttagcgtgcccagtgagtcagccagagattacgtaaaaagcaacagagaacagcagcgtggggcgcatgcagcgactgtggatgtgacaggaccagacgtgtgccttgaggagctgtccctaaggcagtgtgtgacttcttgcatctatgtcagaaagttgaatcgataatcttacataccaggttttaacttgggatatgtgacactcaacatacaagagcagagcaagcaggccaggcacagtggctcaggtctgtaatcccagcactttaggaggccaaggcaggaggatcacttgagaccagaagtttgagaccagcctggacaacatagcaagaccctgtctctacaaaaagtttaaaaattagctgggcatggtggtacatgcttgtaatcccagttactcaggaggctgaggctcctggatcacttgagaccaggaggttgaggctacagtgagccatgttcgtaccactgcactccagcctgggcaacaggagaccctgtctcaaaaaaagagaaagaacaggctgggtgcggtggctcacgcctgtaatcccagcactttgtgaggcctaggcgggcagatcacaaggtcaggagtttgaggccatcttgcctaacactgtgaaaccccgtctctactaaaaatacaaaaaaattagccaggcatggtggcaggcacctgtagtcccagctgcttgggaggctgaggcaggagaatggcgtgaacccaggaggcggaacttgcagtgagccgagatcgcacccctgcactccagcctgggcaacagaatgagactccatctcaaaaaaaaaaaaaaaaaaagaacaagtattttaagtctcttttaccacctctgagttcctgaatggattggttttgtttgttttgttttgttttgtttttgagacggagtctcactctgtcacccaggctggagtgcagtagcacaatctcagctcactgctacttccacctcctggattcaagtgattctcctgcctcagcctcccgagtagctgggactacaggcgcacgccaccatgcctggctaattttttgtattttagtagagacagggtttcccatgttgcccaggctggtcccgaactcctgagctcaggcagtccacctgccttggcctccgaaagtgctgggattgcaggcgtgagccaccgcacccggccatggattgttttaatattaactgttaacactgaagaaagacttgaggtgacaatagttactgggtaatcagagtcaactttggcatggccaaataatattctgaacggtattgattcagagtaatcaatattctgaactttgttgttttctgatgcatggggacggatcgttaatttgcaggttgttagaacaccagtgacttctctgtggctgagtgcatcgacaagtgtgtggtgggaggagaccgcggctccatctggagcaggagctgtcatgtggggagctggcccaggcttacaagagcgacttgtgctggctgagggaacggcaggtccaggcgggcagcgctgtccggcgcctacctttctgcggtgccggaatctgctcgtctgcaaccgtccgctttggtagctgccagccacatggggctgttgctaatgtggcaggtgtagctgaagagctgaatgttttgacttattttaattaattaagtggtta

SEQ ID NO: 33198 - DNA, 2300 bp, Homo sapien
ccacctcagcctcccaaacagctgggactacaggcatgtgttaccatgcccagctaattttcgagggttttttcgtttttggtagagacgggatgtcaccgttttgcccaggctggtctcaaactccagggcttaggccatcctcctgcctcggcccctcagggtcctgggattatagccatgagccactgcacccggcctgttgtattttttattactgtttttaatgaataaaatgtcactgagcccctgaattccctctgtaatttgcttagagctccactgctcatgctttgtcttcagtatgtgagaagtaaccacagaaaaaagagcattgaaacttagaaaatcaaaagacagacaagaatcacattcgttttttaaaagcaagattgccctttttgtatactaataaaaattgtagctttcgaaatacatttagtttagggtttttgatctcctttgttaaaattcgagagcttggcatgccctgtttctcatcgcactgaggagtcacagagccgctgtttggagcacagaccgccggactacccaggtttgggtttgagctctgtcctcagctgcatgactggatgttaccaagtgttaatttgcttgtcactgagaaagggggtcgtactacccagagttgttgtaagacttaaacgagttaatatgtggaaagcagctagaactgcccatagcaagtgcagtgtaaatattatctaaaataatcattattactgtccttgtcactgtttggataatttagatatgaatacttcaagctagtattcttaactagtcaccacagtatcatagtgcaaaagaatgttcaaaaattaaaacaaaatttgaggcatccaacgtacactgggctgtaatcagagtattggccagaggtctgtgggccggcctttctcctctctggggacaccgctctgccccagcctctgctgcagctgtcagccttgtcagtgctttttgttatccagactttctactgtatcttaactgtcttgctgtgcagttttgcacataatgccttctgcttatctttttcctctttcccccaaaaaatgtcttgaaaaaaataatgcatttgaaatagagatctagcaattgttaggtaataaatatgtgtggttttttgcaggcatatatggtgctggttgtctcattacggaaggatgtcgtggagagggaggcattctcattaacagtcaaggcgaaaggtttatggagcgatacgcccctgtcgcgaaggacctggcgtctagagatgtggtgtctcggtccatgactctggagatccgagaaggaaggtgcgtgtgatttaccaccagcactgtctgagcgggcacacgggccggggttgcttctgtgagtttcagcaccgctcgccctcaccttcgtgtgcaggcgcatgtgcacagccacctctcttagctgctggcaggcgtctgttagtctgcgatattttcctaaagacctacattttgaaaattttagccagtttctttctcaaatctgtggaacagagtttctcttagtgtgtgtgagtatgtgacggagtatgggagagagagacacacacccaacctgaagtcggcatgtgagccttgggtgttgtgtctgatacccacagatgttttttggcagctttcaaagtgtgtgggttatttggctttcagtaaaacagtttgcagctctttcattgcctgaccctgttctttaatgtaatgacatttgctaaatatctgctggtatggcctttagaggttttacatttttatattaaaaaaacagagaagtcaggtggggcgcagtggctcacgcctgtaatcccagcactttgggaggctgaagcgggcagatcaggaggtcaggagatcgagaccatcctggctaacacggtgaaaccccgtctctactaaaaatacaaaaaattagccgggcgtgatggcaggtgcctgtagtcccagctactcgggaggctgaggcaggagaatggcgtgaacctgggaggcggagcttgcagtgagctgagatcacaccactgcactccagcctgggcgacagagcaacactctgtctcaaaaaaaaaaaaaaaaaaaaaaaaaacagagaagtcaaatggttttttggaatatggtggccctccgtacccattggttccacatgtgtggtttcagccaactatgtattgaaaataaaattgcatccttacaaatatgcagactttttttccttgtcattgttcccttaacaatacagtgtaacagctatttacgtagcat

SEQ ID NO: 33199 - DNA, 2300 bp, Homo sapien
gtccctggtatgggactaggaaaaaatttgcagggtttgaaagaagtgcttcaagtggaaagacaaaagttcctgccaaggtttaggatattatttttgatggcggccattgttaagcttccagaacctatacctttaaaatggttaacatataagccaatttggatagaacaatggccactgagtaaagagaaactggaggctttagaggacttagttaatgaacaattagaaaagggacacatagctccaacattttccccttgtaattctttggttttcttaattaagaaaaaatcaggtaaatggagaatgttaactgacttaagagccattaattcagttatacaacctacggggacattacagccaggattgccttctcctgctatgattccaaaaaattggcctttaatagtcatagatttaaaagactgtttctttactatccccttagctgagcaagactgtgaacggtttgcatttacaattcgtgcagtaaacaacctgcagcctgctaagcgttttcattggaaagtgttgcgacaaggcatgttaaacagtccaacgatttgccagacttgtgtagggcaagcaattgaacctactcataaaacattttcacagtgttacattattcattatatggatgatatactttgtgctgcccctactcgagaaatattactccaatgttatgatcatttgcaaaattcaatttctggtgctggtttaattatagctcctaacaaaatccagattactactctttactcctacttgggaaccttagtaaatgacattaccattgtgctacagaaagtagccatacgtagggatcaattgaaaacattaaatgagactttcaaaaattactggggacattaactggatacaccctgctctaggcattcctacctatgccatgagtaatctattttctatccttagaggagatcctagtctcactagccctcggcttcctacctatgccatgagtaatctattttctatccttagaggagatcctagtctcactagccctcggctatgccatgagtaatctattttctatccttagaggagatcctggtctcactagccctcagcaattaacaaaagaaactaagggagtgcctcagctgatcgaaaagcaagtccataaagcccaaataaatagaacagatccagagaagactcgagctgcagctgatcgaaaagcaaggccataaagcccaaataaatggaacagatccagaaaagactcaagctgcagccgatcgaaaagcaaggccataaagcccaaataaatagaatcaatgcagagaagactcaagctgcagctgatcgaaaagcaaggccataaagcccaagtaaatagaatcgatccagagaagactcgagctgcagctgatcgaaaagcaaggccataaagcccaagtaaatagaatcgatccagagaagacttgagctgcagctgatcgaaacgcaaggccgtaaagcccaaatcaatagaatcgatccagagaagactcgagctgcggctgatcaaaaagcaaggccgtaaagctcaaatcaatagaatagatccagagaagacttgagctgcagctgatcgaaaagcaaggccataaagcccaagtaaatagaatagttccagagaaggctctagatttgctaatttttccaactccacattcacctactggtgttattgttcaagagcaagattttgtagaatggctttttcttccacatactaattcatggactctagagaaggctctagatttgctaatttttccaactccacattcagctactggtgttattgttcaagagcaagatcttgtagaatggctttttcttccacatactaattcatggactctaactccttatttggatcaaattgctactatgataggaaatgggagaacttggattgttaaattacatggatatgatcctgaaaaaattgtccctctcacgaaggcacaaatacagcaagattttttaaatagtcttacttggcaaacccatttagctgactttgtgggtattcttgatattttcctaaaatgaaactgtttcaatttttgaaattaactaattggattctccctaaaataactaaatttaaaccaaatgaagatgcagagaatgtttttacagatgggtctagtaatggtaaagcttcttactctggctcgaaaggtaaagttttctagacaccctatgcttcagctcaaaaagtggagcttgtagctgtaattgaggtattgactgcttttaatatg

SEQ ID NO: 33200 - DNA, 2300 bp, Homo sapien
gcaattagttgagagttattaccaatagaaaggaatgtctgggttataagaggttgtggagaccaaagttttatcagcagaagaagccttggggtagcaggcttcagagagaatagatggtgtttctcattagacttaaggtctgtgttggctttccctgaattccaaaagggaggagggcatagtcagccatgtcccacccgcccccacttcatgtcgtggcctgaacggttttcaggttaatttggagtgccctggcccagagaaggggtccattcagatggggtggggccttagaattttacttttggtttacaactttatgaagagaccattagaaaccacttgaattcacatcatgaaaaaaaatccacactgtaaaaaaggtttgtagattaacacattaggtgaatgccaaagccacagaatatctaaatttctctgaggaatttgaaaactctcaggtatatgccttgtggacaagagagacagaaaaatgggacagaggatgagatagtttggagaatggatagctgatcagatctgtagctgtgcccagagtgctgaataatggatttgcgtccacagggaagaaagtctcaggtgccactgataaaagaccacgtccttggctctgggtccattcaacatcttggtagacaactgagtgaaaattcagagacaaccctaggaagtatgaggatgaaaaaagttagcattcatggaatgaggcactgaagaaactgaaaagctgaaataaccccatgaaataatgagaataattgtagtattctgaaccggggcacaggacacaggaccggggtggaaggcggcacgagactacgcgcgtgggaaagacccagggatcacagtggcccaaagctgggcacttcccaattccgggatttgtgctacaggcactccaggctccaccttagaactgtgtccagcacgaaggcagtgctgtcttgcgggaggcagggctgcaccaccaccggggtgtgaaggggcccagcaggcaggggtgtgaaggggcccagcagtgtttccagctgcacggggtcaggggccgcgctgatgcagagcacgggggcgcaggttaaacctaaaggagggaagcttttgggggcggaacagacaaccgagaatgctgcacactgcctttcccacccgaattgtgttttgacttttttttttttttttttttgagacagagttttgcacttgttgcccaggcctggagtgcaatggcccgatctcggatcactgcaacctcctcctcccggtttcaagcaattctcctgcctcagcctcccgagtagctgggattacaggtgtgcaccatcacgcccggttagttttgtatttttagtagatacggggtgtctcccaattggccaaggctggtctcgaactcccgacttcaggtaatccactggccttggcctcccaaagtgctgggattacaggcgtgagccaccgcgcccggcctgcttttgctttcttttttttttttttttttttggcagagtctcgctgtccacccctgtagtgcagtgagctcggctccctgcggccttgacctcccgggctcaggcaatcctcccgcctcagcccacggagtagatgggaccacaggagcccaccacgcccgactactttttgtaatttttgtagggatggggtctatccatgctgcccaggctggtccgaactgctgggctcaagagctccgcccgcctccgcctcccaaagggcagggatcacaggtgtgagctaccgcgccccgcccagagtttccgactgttagcaaatcacattcacctcaaaactatttatacaagaactgaaaggcaaactaagtccgtgctccatcacttcctgtcccaggtcgcggggccggacattttctccaagcgctttcctggcacagcgcgcaggcggcctgcgccaaagctctggcttcctccaggcgcccagaccccgccctccccgcaggcgccagggcgttgcctggcaacttagctgcgaggggattggctgcgcgggaccccgtgaccatcccggagaccacgcatttcctgcgcccccggaagtggtgataatgccaggccctgcccccggcagaggcggaagcggagtcggcctgagaggtctctcgtcgctgcaggcgcctcagcccagccgcgtgccttggcccatggccgcctactcttaccgccccggccctggggccggccctgggcctgctgcaggcgcggcgctgccggaccagagcttcctgtggaacgttttccaga

SEQ ID NO: 33201 - DNA, 2300 bp, Homo sapien
tgcttttcctgaactttcgatcgccagcttatttggtcttcttgatgttatagggtcgataaagacaggagtggagtgatatcagacaccgagcttcagcaagctctctccaacggtgagtgggccagtgggaactgggtctccggaccaagaagccgcgagcctgccctgttcacagtggataactttctgaagttgtttttccaaggacaaaggaatcattaggacaaattgttattactgcttcgtagtggagatgcttctggtttattttgtggctaccgctgttactgcttggagtgcctcaccgagccagctaacaactgcgtgcgtgagcacagggaaaggcttcttgagaaatgaaaactagattgtaggtttaggaggggaataggaagcttagctctgtacagccgaaagccttttggtaagttggaggtccttgaatttcctgggtgactgcatcttggtgacttctctgaatagaccttcgagggcactggggggtgattgttggagggcttggggagctcaggcagcccttgtatgggaatgtggctgttacaggaactgcagaaactgggactgggttcctggggaaaggattgggggtgttggaggcgctggccaggggattatggggaggtgttcttatcagtgtgcgaatactgggcgttcaggcagcgggaaatccgggtccttgcgtgttgtgagctccctggaattacgttcttgccagtttcagctcagttgatccccctcccctccgctatcattggacacattttacttcattgaaacctgactgccactttttctgtaatccctcaggggcagtcatcttttctgattctgtgtatagtttgcttttccagatccgtgccatttaagctagaaaaggggtcagttttgagatgttgtgaaaatgttgaaaggcttcttgttattagtgggaagtatctgaagttgccagagactgaactggggcgcggggagcactacggctgctagacactgcctcactgcgctgtgggtgggggggtgctggattcagccttactgcctaatgatttgtgaggatttgtgttttcagagtaacatttttaccttatattacgacatcagttcctaatatgtggcgtgtgggccacagatgctggtgtattatttcacatgcatttctatagattgttttcagggaattcagaaatgctgttatctctacactagtgattgtgctttcttggtttttctcttttcattattcttaaatcctcgttttttttttttttatttgcatctcagttcgtttttactcgggaagtgcaagacgtggctactagaaagagatgtcaagagaacccggaatccagtaggctacaatttggcaaatctcagcttaaaacttcctaaatgttgaccacagtggatgcaaatggctctgtgcatcacctgttaaatatggtcagatgaccatccaggttcaagtggtttgtcaccagggtgatacaagccacacggagtgccctcctcagaggccatgtttcagagacatttattttgagtggttttccaatgagtgatgcaagatttatgatccattttaacagcctgctttttatgcatttgctctaatttttagattttaggtttagttttaggttttctgttaaacttgctcaaataggagtggtggtcaaatactggaccgcattagtatggtagcctgcccaccttggcaggctccactggagtgctttggggcctgcctggattccagtcctggctctaccagttttgtgtcctcgccgttactgggagggagtattgaggaaatgcatgcgaggtgtttccgtgattcctggcacggagcaagtgctcagtaattgtcagctgtgagtattagtagtagctaatacactggtactattcttggctaacaagccagctcaaagctttgatggttttccattacctgatgatggtgatgatggtttccacttactcaacactcacacgctgggctaggcacttaacccaaatccaaggtcagcattattgtttgggggtgggggagacacctcctgctctgacttgtgtgtttgggttcctgtattttcaccagagggagttagtcctgccccagttcagctggtcctcaaagtgtatatagctctttaaccatcagcaagtgtctatcagaacataatcttgatttcagctgctactaaatatctaccaggagactgcttgagagaattgcctgatgggtgctgagtccaccattcctgagatacttt

SEQ ID NO: 33202 - DNA, 2300 bp, Homo sapien
gtgtgtgtgtgtgtgtgtgtgtgtgtgtgtgtgccttgggttcaggtgcacctgcctttgtgggaatagcacagcttccctgcataactgctggagggcgggtcgtggagtgctgctgtgtgtgtgtgtgtgtgtgtatgcctcgggttcaggtgcacctgcctttgtggtaagagcacagcttccctgcataactgctggagggcgggtcatcgagtgctgctgtgtgtgtgggcctcaggttcaggtgcacctgcctttgtgggaagggcacagcttccctgcataactgctggagggtgggtcgtggagtgctgctctgtgtgtatgcctcaggttcaggtgcacctgcctttgtggggagagcacagcttccctgcataactgctggagggcgggtcatggagtgctgctgctgtgtgtgtgtgtgtgtgtgtgtatgcctcgggttcaggtgcacctgccttagtggggagagcacagcttccctgcataactgctggagggcgggtcatcgagtgctgctctgtgtgtatgccatgggttcaggtgcacctgcctttgtgggaagagcacagcttccccgcataactgctggagggtgggtcatcgagtgctgctgtgtgtgtgggccacgggttcaggtgcacctgcctttgtggggagagcacagcttccctgcataactgctggagggtgggtcatcgagtgctgtgtgtgtgggccacaggttcaggtgcacctgcctttgtggggagagcacagcttccctgcataactgctggagggcggatcattgagtgctgctctgtgtgtatgcctcaggttcaggtgcacctgcctttgtgggaagagcacagcttccctgcataactgctggagggcgggatcttcccaaggggaagttgggaggtgctcaggcggagcaaatggatttaacttctgggctgggagaatgtggtacccccgtggaagtctccctgaggaaggaaaggaaggagctggagggagggtgtgtgtgtcttaggaggggacgcacttcaggtgagagcgggcatggcactaggaggagccccatgagcccagagtggtggcacgtagaggcctaagggaccatgccagcagaccccaccgcccgtgctccaccaggagcctgacattgttctctgagatcagggggctgtctctgtgtactgcccaggactgtggcatttttgtgcataaaaaaaaaaaaaaactgtgtgtctaacacagacggggtatgaggagagccactggtctctcctgaccttaaaaatatttttttagttcatttttagtgagtatggaaattactgaaggtacaaatcactctgaagataggttcttgtgtgcgaaggtcatcagtgaatcttcattctcagagttgataaatggttgtgagcgctcaagggtatcagattcaacgatgagtctgaggatagtacagctttcctattcagtttcaaggaaaatcatataaagcccagaccgtaatttgtcaggaatgtttgaagtgtggtgtgatggatgtcttcaccgtgctttaggatgattactgagggagaacggaaggaaggggtctggtacttgcacctttcagtagaattagtgtgaatgccacagcgaccaagctatgttcaggtgtctgcaggcagtggtggccttgatgatggattttctgaaatgggaattcgtgaagtcctctaacaaaactaagtgcgaacttctcaacttagctggtgactgcatccttgaaaaattctgtgtgtaaaatgatacagaaccatttcttggttatctgttaaataagagtgcatgtccagccgcgatgactgtggacggccttggaggtctgggaggccacgaaggactcccacacacagcagggtgtgaacccaccaggcagtgctttggccccctcccaggagtcatggcagccgacacgtcacctggagtgtctagaaaaccactaccttagagcccccactgcttttcctggtgcctccaggtatagatcacaaactcagtgtcccagaaagattttccttttactttaactcctgttgttgtttgttttcaggcacgtggactccctttaatccagtgactgtcaggtcgatcatatgtaagtatcggcagacggaccaacctgggctgctttgtatccgacccgcttgggtacccgcttgtgtttcctttgtctgtgggtccgtatcactttgctcccttctggaattccacttagatgagcgtcggccctttcatccctctccctccgt

SEQ ID NO: 33203 - DNA, 2300 bp, Homo sapien
ctgtttctaattaaagcaggttttcctgacagggctgttccaagactccaccagtgctgtgggccctggagagtcagagggtcagctctgggaattagattcgcgttctaggccgagacccaggagccaggggagctggggccacttaccttccccgtgcctcggaagctgagtgtgaagctctgctcttctttctgtcgtggctgcggctggatttcctcacacatcccattgcacggcctgcctcacagctgcaagtgcaccttctcctgggacttagggggtcagggctgggggacaatcccccacacccccacccagggcgaaggtgacaagactttaagggatttcaccccattcacagacaggcatgcattgcccagtccctggttagtggtcagcagtggggccccgccaggctctgagggctgaggtctggtgggaagcctcaagtgagtttgctgcaactgatcttttgctgcttgaccgttcctctctgtctcagccatgtttgaccgtgagaacaaggccggcgtgaacttcagcgagttcacgggtgtgtggaagtacatcacggactggcagaacgtcttccgcacgtacgaccgggacaactccgggatgatcgataagaacgagctgaagcaggccctctcaggtttcggtaactcactcactctggcttgtgtagcgtgtttcattttggaaccttggagccgttgaagttctttaaaccttgttggacttaactgattgtctaaccaggctacgtaaagtttttgttgacgtcatgcaggttcatatttgatattgctcatgtcggaaggcgatcctcgacatggatacgtttattcaggtttttatccaaaatgagataagggctatgcaagccgttcatcttttctgaagtggaatgatgtcgtgagcaaaactgagaatgtggcttttgaaatcatttaaaagtggatccatgaaaataccgtggggcagggcagcttatatttcatgatagatcaaagcacgttgaaaaggcaacagtcacctaagaaacagctgtcagtcaccaggtccaaaccgtgcgcctcagaaggggcgttaggcagaacgcgtgcccattctcaggtgtgctcggcgtgtgtgtgctcggcgtgtgtgtgctcggcgtgtgtgtgcacacgtgtgccgtgcgcctcagaaggggcgttaggcagaacgcgtgcccattctcaggtgtgctcggcgtgtgtgtgctcggcgtgtgtgtgcacacgtgtgccgtgcgcctcagaaggggcgttaggcagaacgcgtgcccattctcaggtgcgctcagcgtgtgtgtgcttgacgcgtgtgcacacacacatgtgacggtgtgccgtgggtctaggagtgttcacagtgcctgtccagagtgcgtccatagggcctgtccacggggcttcccgtgctgctctcagggctgagaggaagcaggggttttatttacagaggaacaacgggcatgtttggggccagcctgaggctgttggtggctgcaccgagattctaatccatgcggatctcatctggcccctgttgtgaagccgcttccgtgatttgcttaaaaggctccttagaaacagtgaggaaaattcgattctacttgagtacctccgagatccctggagtctcacttatctaagcacgtcgcctctcctcgtgtttcctcccagcatgcactttgtggctgcctttctttctcttttctttctcaccttacgagcttgtccacagggccgggggtggacactgggtctcctcaagaagcagttctgagctgaccagctgcgagccaggatttgggctggatggctctgaattggtacttggaatgcagctgaccttgctgtgcccttgggtgggggaactggagggaacgctggccggctcctcttccctggggcaggtacggaagggctgggagggaaggatgccaccctccacagagagtggtcctgggggccagggaggccagtgctgccgattgcggccagggccacgtggacttcaggaccggcctgaagttatttttagataagcgacctctggcgccacggacatcttttcctaaccttgtcaggccctggagctccctttgtccatgccagtgaccatcggtcctcagaatgtgcagtggaagttgctgtggacagtgctccctggtctctgaggccctcttcgtcctggtctggccaaggacttcccagaaaactgtgcttagctgtggcgggaggcacggccggtcacgcagccttcct

SEQ ID NO: 33204 - DNA, 2300 bp, Homo sapien
tgtgccgtgggtctaggagtgttcacagtgcctgtccagagtgcgtccatagggcctgtccacggggcttcccgtgctgctctcagggctgagaggaagcaggggttttatttacagaggaacaacgggcatgtttggggccagcctgaggctgttggtggctgcaccgagattctaatccatgcggatctcatctggcccctgttgtgaagccgcttccgtgatttgcttaaaaggctccttagaaacagtgaggaaaattcgattctacttgagtacctccgagatccctggagtctcacttatctaagcacgtcgcctctcctcgtgtttcctcccagcatgcactttgtggctgcctttctttctcttttctttctcaccttacgagcttgtccacagggccgggggtggacactgggtctcctcaagaagcagttctgagctgaccagctgcgagccaggatttgggctggatggctctgaattggtacttggaatgcagctgaccttgctgtgcccttgggtgggggaactggagggaacgctggccggctcctcttccctggggcaggtacggaagggctgggagggaaggatgccaccctccacagagagtggtcctgggggccagggaggccagtgctgccgattgcggccagggccacgtggacttcaggaccggcctgaagttatttttagataagcgacctctggcgccacggacatcttttcctaaccttgtcaggccctggagctccctttgtccatgccagtgaccatcggtcctcagaatgtgcagtggaagttgctgtggacagtgctccctggtctctgaggccctcttcgtcctggtctggccaaggacttcccagaaaactgtgcttagctgtggcgggaggcacggccggtcacgcagccttcctcccgccctggagtgggcaggcctgcttgtgttgtgcagcggcagaacccttcctgacttccaggtttttcctggggtgcggcatcccatcgcagcattttctctggttaccctcacgagtttcctcctgcgtttggttcttgatctccagggccatctcccacgtcttccttggaaaggggcattgtcatcctttttgtattttgatgattttgaaagatttcccatagtaactgttaggaagttggcctcagaagcaaaaattcttcttttgtcttggcccctgtgaacaagtgttctgctctcagatgaagcagggaggctgcactggagcttggtggccagcaggagggaatcaccagggtggtgaagcctgcgagatttctccccgggtgtctctgatggggccacatggtggatttcataatccaccgattcgtttttttaagcctttattgttaacatcaactgtgtgccatgctcagagacctgaagtgaaaaggtgaggaaggcgtgctcacattccagcactcaccacccggcaccgggacagctgactcagcacgtgccgtttaggttgctgtaaacagccggtgagattctcccctctggtgggcagtgcgtgtctgacaaaggcagtcgggcggagaacagttcctccgctgtggtcctttgccactgtaccaggcccccaagagctggggggagccccagggagcctcagcctgttgagtgggggcagctggtttgtcctccgaggtggaagaggtgatttctgaggaggtcatgctccgcttggctcgttcacagcatttcagagagtccgaaagaggagaaagaccttggcaaggggtgtgtcaggggtgggcccagggacgctggtggcctcatgtggactgactttcatgaacagaaactcagaaacagttgcttctggattttggcttctcagataaacattctttttgtagttcgtttgttcatccctcattttgctgtctgactttgcctttcttttcccttcactattactgatgaccaaggaaactggaagttaattccagaggcagtggggttgctcctgttgtctgtgcagactggagttcctctgcctctgtcagcatctcctctgtccttccccagccttggcaggagaccagtaatgacctctgtccccgtgcaccccagtgatggccgccgtccccgtgcaccccagtgatggccgccgtccccgtgcacaccagtgagggccgccgtccccgtgcacaccagtgagggccgccgtccccgtgcaccccagtgagggccgccgtccccgtgcaccccagtgatggccgccgtccccgtgcaccccagtgatggccgccgtccccgt

SEQ ID NO: 33205 - DNA, 2300 bp, Homo sapien
gacagccgggtgcccatgcagcaggtgcacccaggcctccagcactgccatgtgcctctggcgcaagcgcaggtcttggtgactggtgagttggagaagtcccaggaccgcctgactgggggcaccaggcattacagtgacaaagccagattccctagatgcggggagtgagggctccaggtgaagcagcagctgctggccatgtgaccatgggtgcagatgaccttgtatgcctcatcctgaccgtgaccacaaagctgaaggagtctctctcttctattgggaaataagtctttgcctgtggtcgttggggctgagggcaagaatctattttttaaaaggaatgggattttttttttttttttgagacagtcttgctctgttgtccaggctggagtgcagtggcacaatctcggctcactgcaacctctgcctcctgggttcaagcaagtctcctgcctcagcctcctgagtagctgagattacaggtgtgtgccaccaagcctggctaaattttgtatttttagaagagacggggcttcaccatgttgaagccaggctgatctcaaactcccaacctcaagtgatctgcccgccttggcctcctaaagtgctgggattacaggcgtgaaccactgtgcccggctgagagttttagtcttttaagcaacatttataaatgaagaaattagggatggcagcaagtgtaaggggaatgttgcttgcctctggatgctggttcctctgcgtttcacttctaaaaaactggccctaaaacgtgtcaagagctcgcacaggagtgtttggagccatatttcccattgtcctggcaaagccggggccctccatggtgcccggctcttactgcacagggaccaacaggccggcccataagagctgatggggttggtatttctgtttgttgccaacccctgtttaccggaagtgtccccacaccattttccataagctgtgaaacaaatgtcataaggtctctaatttagaagggggaagacccaggtttctgggtctttgtttccttggttttgtgttatgtgtgccagggtgtaaagtggattttaagatgtggaattgggaggtagagtggtttagaataagaactccgaaaggttccttgtggatccccttttctggccatcgggatgtggatgtgcatttgttaaacttctcacacgctgcatccttcagcctggagaccctttggaaacacgaggtgacgccacggtagttattcagctaagcttccctctgacgggccctgaggctgccgccatagagcggcagaaccgtgcagttcctggaggagaagggggttttgattgcgaaatgttccagtatccagagtgaacactgaaggaggagccgttggctacttggtaagagagctgtgaagtcctggatttgggaaaacctgttttcatagaacaggatgggatggaagcctaaacccagcattccttactagcccctgaattaacagagcccaacgaagacaatcccctggcaacaggaagtcaagggagaaagaaggagccccaggctgggaggagtgcggactccccgagcaaaggaggagtgaccccccactgctcaccaaacactagctggggggcctttgcagttgaacggaggtggggcctgcagatgctgggcaagctgcttccctgcaggaggaagccagtcttgagtcctggctcacaccacagacagcttcagggcatgatggaagtttccagaagataacagggcagagctagacccatgaggaaacatttctcaggacaaaagccttccccatgtggagaggatggaagggttgggccttgtggtgtccaccaggagggcgggatggcagcggggacaccttgcatggaaggcggcccagaagggactgggcaaggcagctggacggctcagtggggattccagaaagagacacctccgcgctgcacgcacgcagccacgcagccacccacccacgcagccacccacccacgcagcacgcacagacccacgcacgcagccacccacccacgcagcacgcacagacccacgcacgcagcacgcacgcatccaggcacgcacacgcagccacccacccacacaggcgcacatacgctggcaccgctgaacagccaaaatatacacgatggttcttcttatggttcaggaggtggaaagttgaaaccatagcaagaaacgtggcctatccaccgcagcgactaaaagataaagagggaaaaggacaaacattggccagaaggtgcagcggctggagc

SEQ ID NO: 33206 - DNA, 2300 bp, Homo sapien
gctctgtttgccttgccccgggttacggtttccagatatgtcctgattccgatgctcctcctctgtgcatggacagccccggggatgttcacagcagatggagctgtgcagaccggagcagacgtccccgccctgttctgggcgctgcctttactgctgtacctgctgtggcaggcgcgttggggtgatcttaagttgcagtcacgtgtgttgccttgtggtccgactttgaattctagctgcattccttaacttccattagtattcaatttcattttttagatgcggtcttgactgaccttgtcagagtccaggctcccgaactagtttgagatctgggactcagcagcacccggcacgctgccgtccctcctgttctttggcgcctttgacgggcagcacatcttctgtattcacacccgtgccctccgtgggagcaccaggacccgccactgagccccctctgggaggaccccgtcacacgcctgctggcttcccgatgcagaggatacggccgagggccctttcgccccaggggacctgcaaaggaggaccttggaggctctgggacgccctgctcagtgtccagggttgactgtgaagggcttctgtctgcaggccccaaggccaccttgccggcactcacggtggtctctgttgtgggcgtgagttccatcctcacctttgacctctttcagataaccgtttagacagctctacagtctgacagcagcagcggttatttgaaggttttcatgctgtgttggtttccacgttcgttactcatttctgcttatgagcagcttctgcctgggccctgctagccccacctcactgctgctgtctgagggtggacagagggcagctccagggacggccaggacacgggtcagcctgctgaggcccacacatctctggaaggttttaaattaaatgtatgtaccttattttaaaggatggaaatgtagagtgcaagggaggaacatagaattctaaagggaaaagaagtaaatgctacataggtgcacagaaaaggacctggggtctctgcagggctcgggcccaggtcttccggcacctacagggaccacgcaaaccctggaacactgtcctccgcttaccgtcaccgtggagtttccactgcacatggcaagcccggtcttccctgggagttcccaaccctagaagcagaggggacgcagccccctggtgtcagagcagggcagggcaggcctggccctgtgtgcgcacagccctgtcccggccctggggtggagcgtaggtgtgggatcacaagctcaggtgtggggccgaaggtcacagcgctcctcctgcggcctggacgagaccccctgtggggctgtgagggtggggtggagcccaaggcacataaagctggcacacaacttcagctcaacaaacatgttattcaaactcagaagggggaagaaaacttgccaaaccaagaatactgactcccatgagccgaaggcttttggaattctccccaccctgctctgagctggattcagaagccggctttcaggatacaccttgtggtccaccagtcctgagccgcaggactgtggtccagggcaccacagtggtgcaagatgcaaggtgcattctgcagaatcagagccctgaggcagtggcagcagcctccagcggcccccaacagcagcccccatggcccccagcagcggcccctagcagcccccaacagccccccagtcttccacagcttttcccacaggggttttgtgacatgatcttgatctgcctcttcctgaagcccattctgtgaattcctctgctcgccataattcactgggacccccatgtcaacacaccctgtgctttgcagccattcatggacatagatggggcattgtgagtcttgtgttagtcatgggcctcctggaggtgcccagaggacagagaggagggcagcaccggagctgtggctgtggggccagtcagatgggtttgaactcaactctgggacctgctggtggggcagcgctacttactgtttctcttttgaaaagcaaaagaaaatagaatctaccagggtgagttgttgggatttaagattcagatcagtgtgatgcgtgtgtgggtacacacacatgtcccgtgtgagttggtctccaactcacctcagtgttcacttcctggaacataactacctggagtcatgagaatggaccgtattttctttctggccttccaggaaaaaaatataagctctaaaaatcatcctatgattttatccttctactttctgaagcaaattc

SEQ ID NO: 33207 - DNA, 2300 bp, Homo sapien
catgatgcttgcactcagcagtgctcctgggtgttcgcagaacatggtctgccaaaaacagaagtcaagaaacttttttttttgagacagattctccctctgtcacccaggctggagtgtagtggtgccatctcagttcactgcaacctcctcctcccgggttgaagccattctcctgcctcagcctcccagggagctgagattacaggcatgcaccaccatgcctggctaatttttgtggggttttttttggtagagatggggttcctaccaaaaagaccatgttgcccaggctggtctcaaactcctgggctcaaggggtctgcccatctcagcctcccaaagtgctgggattacagttaggagccactgcgcccagccaataaataccttttttttttttttttttttttttttttttttgagacggagcctcgctctgttgcccaggctggagtacagtggcgcgatcttggctcactgcaagctccgcctcccgggttcacgccattctcctgcctcagcctcccgagtagctgggactccaggggcccaccaccacacctgcctagtttttttgtattttttttagtagagacggggtttcaccatgttagccaggatggtctcgatctcctgacctcatgatctacctgcctcgcctcccaaagtgctgggattacaggcgtgagccacggcgccccgccaagaaagacttctaatcaatgttttgttaagaagttactagacagtcctccatccaaattcactaccagacactgatataatagtatgagtctttagttcataatactcaatgttactatatttttaagagtcctaaaagctttggcaattttggcaattttttcttcattagtttcaaaatttctttacagtcataatttctaacacaattttaacttttttactttttttcattgctcaacttgttgctagattttcagaaattacaaggaaaaactgaaataatagagccggggtcagtgtcaacatcagcagggcacggggcagggctccctgtcggagtggcagtgggggctcccgcaagctccatctccttcctgtgtgcccctgccccatgctgctgccacttccctggtctctgctggcttccctgccaccttccagacccttcctttcgtgtggctaattttcaggaggggcaggggcacaacctagcagctccaacctatgaaagactttgtcagttggtgtgtcaaagccagcatcttttatcaaacagacaaaccctgaacgctcgtggtttagcacgtgcttcttcctccaggcgaagccaagtgctggccatgggcctctcctccaggaagcgactcaggaccggccctctgcagcgcggcccagtgacccacattcattctccaagacctgcgctgctgggcctctgaggggccccggaaacatccggtggccacccatcccactggcattgttcccacgagggtgccaatgactgcgctcctggaggggctgagttcgtctttgggtccaggaggtacccaaagccgcttgtctgctggtggcaggtatgacagacgtttgattcccaaccttctccgctttggtttcttcgtttactgaatgcccggcgcccacctcagtccgcgggaaacgagggacgcccctgccacactgcagtgcggacgacgaggccaacataaagacagcaggcatcagcagaggatggagacagcggctctggggctgtcttctctccgcaggttgggaagggaaaggagagaaaatgcacgcagtcacgctcggcggaggcgtccaggactgcgcccgccctggggaagggcgcacgcggtggtcgccaggggcagcgagagggcctgagttgggggggctgggacggacaagaagccccccacctcggcggtttccctgtcctgctggggagcggccatggggcaggtccccgagctgaagtcgctcggccgggagacgagtacccgccccgcgggagggcccggacccgtgcttccggcgccgttgccggaagcggaagtgcccgcgcgctgtccacttccggccgggaccccggaggcggaggcagcgaaggcggagggggcggcgggggcggcggcggcggcggcggcggcggcggcggcggcggcggcggcggcgtagccgtagagggtgagtcggtggcaggtcctgacggccggcgggtccttgggaggtggtcgccgtctttcatccttgctctccctgtctctggcttccgcgggggcgcgtagggggaggccggaccg

SEQ ID NO: 33208 - DNA, 2300 bp, Homo sapien
agaccacaggtgctcagatgccaggcaagcctgccttccatgctccctccaccatcgtcctcctcggggagctaacacagctgcttggtgagcatcagtcaatgagggaatccgatacacctgttccccttgacttcagctgtctgattttcatcttcatgaatattaaaaagattcaccttctcctggaatttttcattctccatgcccacatgctttcagacacctctcttctcctttttcatctggacctacattgcaacctttcctttctctttattttctgattatgaaatttggcataccaacgtagaaaatctggacaggacaaaaatacaaagatgccagaggcaactccccttaaatcccatcatctatgggcaactcctcttaaatcttgctacccaggggcaacttcccttaaatctcacaatccagggacaacttcccgtaaatcccaccactcaggggtaacccccgctatatcccaccactcaggggcaactccccttaaatcccgccacccagggacaactccccttaaatcccgacactcaggggcaactccctccaacagggcttgtttccttccagttttttccctttgagtttcttttaaagctaagattccactgcttatatgactttgtaggtgcacacttttgttttcttattttgtttggacattatcatcagcatttccattgacattaaagcctgtatgattttgattatagggctggataataacccaagaagtggacccccagccgctctgctggggcacgcggtgaggtggctgcgcccatcttaaggctggagtgaagtctgtcacgctgtgggtggaagccaaggcaatgtgagtggagagctgtgaagcagggctcgccttggagtcagaataaagctactcatgtggaaaaggggaaaatctggagttaaaaaacgcaccgcagaggcttccatcccagcctgaagactaaagattttgggtcacagaagccaaagaggaactcagagaccataaacagagacccaggtccagcccctaccagggcctttctgactgccttcccctggcgctggctccgctgtgagcctctccgccgagcggggggacaccctactgcggggaacatcagcacccacggagacacctgcgccagggagacacctctgccgggcagacacctctgccaggagggaccctttaccggggggacgcctgcgccgaggggaacacctgtgctgggaggcacctcacggaggggacactccgctggaggacacctgcaccttggaggacacctgcaccttgaaagcttcctaaaggccaggaaggacgcttgtgcccagaaggacacctgctccgacgagggacacctggtccgaggggggacacctgtgccaggaaggacaactgcgcctggggggggacaccgtcaagaggacacctgcaccaggaagtacacttgtgcctgggagggacacctgtgcttgaggggacacttgcaccttggagaactcctgcgccgaggggacacctgcgccaggaaggacacttgtgcctggagggacatctgccccaaggagggacacctgctccgaggggggacacctgtgccaggaaggacaccagcgcctggggcgtgggggaagacactgttaaggggacacctgcaccaggaaggaccttgtgcctgtggggacacatgtgccaaggggacacctacgcctgggggggacacatgtgccggggaggacacctgcgccgaggacactcgcacgagcgggatactccacggggtccggaacggcctccccgccctccaggtcccggtccggcctccccctacgcgcccccgcggaagccagagacagggagagcaaggatgaaagacggcgaccacctcccaaggacccgccggccgtcaggacctgccaccgactcaccctctacggctacgccgccgccgccgccgccgccgccgccgccgccgccgccgccgccgcccccgccgccccctccgccttcgctgcctccgcctccggggtcccggccggaagtggacagcgcgcgggcacttccgcttccggcaacggcgccggaagcacgggtccgggccctcccgcggggcgggtactcgtctcccggccgagcgacttcagctcggggacctgccccatggccgctccccagcaggacagggaaaccgccgaggtggggggcttcttgtccgtcccagcccccccaactcaggccctctcgctgcccctggcgaccaccgcgtgcgcccttc

SEQ ID NO: 33209 - DNA, 2300 bp, Homo sapien
ctcctgacctcgtgatccacccgcctcggcctgccaaagtgctgggattacaggcgtgagccaccgggcctggctgactattgtcacttttatagggtgggaattgtggggcttgtgctgggcctccagctgtggtacctggtcgggggagttgtccacgctgtatttgtcttcactgagggtcctggtgcagctgcccacaggcctggccaaggtgctgggggaaagctcccgaaatgagaaaccagccctgtcttggggagagatgtgcctttgaggctgacatctacatgctgggtggtctgggacccacatctagaatcttcgcaatgtccatgtctctcatgcctgtgaaacgcccctgctctccccttaaaggtataacttctgcatgtttgtgttacgaaggtttgtttatcttatcaaggagttcctcatcctagttcagctttctttgaggtttcctggattaatgatctcagaggctctgcttgtagctccactgtgatcacctgatagtttgggggaggttttgtacctaacatttctaccgtcctaacaactcctgcagtgcacagagaacacccctagcatgaacagtgtgaggattccaccagctttttcaccatgaaggagacagaccgggaggccgttgcgacagcagtgcaaagggttgctgggatgctccagcgcccggaccagctggacaaggtggagcagtatcgcaggagagaagcgcggaagaaggcctccgtggaggccagattgaaggtgaggccacctgccccactcccaggatctgtcttgggcttcaggttcttgcttgacatcaccatgatgattttgctaaactagcctttatggtaatgtgcaaggaggcagagctggactttcttgagcagttactttcagcagtgtattaccactcagtagctttgcttagaagacagtgggaatggtgaaaacaccaaaggaacaagcttttaaacaccctgaggccgggtgcggtgactcatgcctgtaatcccagcacctcggggaggccgaggcaggcggatcacctgaggtcaggagttcaagaccagcctggtcaacatggtgaaaccctgtctctatgaaaatacaaaaattagccaggcatgatggttgacgcctgtaatcccagctacttgggaggctgaggcaagagaatcgcttgaacccaggaggcagaggttgcggtgagccgagatggtgccattgcattccagcctgggcaacagagtgagactctgtctcaaaaagaaaaaaaaaacacagaaacaaaaacaacaccctgaaagtgtctattaagtttttaaacaatactggaggaaggagaagtagtcttatttaaagctcttctacagagcaccactagagggcattttgttcagattgttttaactcacatttgacagagagcggatctgaagctcaggtgccgattctgtcctgtgggtcagccgtcctggggccaagtgtggtgctggctgaacagcaggaactcccccaccccaagccagtgaagtcctgaccgttctctctgcctagacaagaccttttaggaacctaggatgcctgggagagcatgggtgacatccttctgaaggtaccgtagcaggccacggcccagggcagacccgtggtagtgtccaggatcaccaggtgtgaggctagatgaggagtgtcctgaccttttctcatcaaggctttaaaatgcatcattgttctgttcccaggcagcaatgaagaaaaaggtacactgtgaatcaattaaatccttgttgattttattttcttttctgggtattgactgtttcctgctactcagtggctctttcctgaacttgaccctcctggggaagatttgttcttcaggaggcagcgcatggctatcattggctctgctcacccgtgtggcgtctctctttaggccgccatccagtcacagttggacggggtgcgcacaggcctcagccagctccacaacgccctgaatgacgtcaaagacatccagcagtcgctggcagacgtcagcaaggactggaggcagagcatcaacaccattgagagcctcaaggacgtcaaagacgccgtggtgcagcacagccagctcgccgcagccgtggagaacctcaagaacatcttctcaggtaccagccagacgccgaggcacttgcccccactcacgctgtctttgcatgactcactgagtgctctgtgtgcagtgtgctttgcagcccgcactgtagacctgtagacggtaagtgtgattcttg

SEQ ID NO: 33210 - DNA, 2300 bp, Homo sapien
aacacacaaaaaccgtccctatatggcttcatctccactccctttgggttgttcatttcacaaaattacatctttatatatcatgtgtccaaaatcatagactaataattgttttttaatgcattcatttttaaaaattaggtagaaaacaatgtggagttagaatccaaagttacagtattagtagcttttagactattttttaatgtattagtttcttttttatttgtcccttttaaccagaacaaatattagtctcttaagtcatgtacgaaacagagtgatgagttaaaaactgaagtgttaatgatactagattttacgattgtccatgaatttaccttttttgaggcctttgcttcttcacgtggcttccagttgctctctagcattctttcttctcaaccagtgggactctatttaagcatttcttgcagggcagatcttgtggtaacaagcttttcagcttttgtttatctggggatgtcttaatatcgctctcacttttgaatgaccattttgctagatttaaggttcttggttgacagtatttttcttttagcactttgaatatgtcatcccactgcctctggcctccaaagtttctggtgagaaatctgatctgctcataatcttattttggagcccttgtttctgacaagttgctgctttcagaattctttcaaaagtttgattaagttgtatcttagtgtggacctctgagttcctcttgcttggaggtcattgagcttcttggatcttcatattcatgtctttcatcaaatgtggggagttttcacctattatttcttcaaataatgtcttgcccatttctctcttctccttctaaaagtcccactaagcatatgttggcctgcttgatgatgtccacaaggtccctgaggctctgttcacttttcttcaatcttttttctttctgttccggatacttgatatttcccattgtcctgtcttcacattcactgattctttcttgcgcctgtgcagatctgcctttgaatccctttagtgaatttttcatttcatttattgtacttttcagcttcatattttctgtttggtttccttttggattttctgtctcattattggtatttccattttgctcatacatgtctttcttcacatctttaagttccttaggcatctttaaatcgttgttttaaagtctttctctagtagatctgccatcagatcttttacaggaacagtttcttatgttttcctttgaatgggccatactttcttctttctttgggtgccttgtgatgtttttgttgttgaaaaatggacacttgaatcgaataatgtgataactctggaaatcagatccccttcccaggttgatgattcttgtttttggttgttgtaggctctctgtgccaaggcacagcctgaggtgtgaacttcaaggtcgtgtcaagtcttttctgagcctatgcctttgcctgggcatgcattggccacttccgaatttttcctataaatgcagttacttttgaatgtcttcattcataaatatctggctttcaagaaggggaacagatgaagggggtggtgaagacattggccctttaaattccctggagctctgtgggggtgaggagggacctgtgaacaggggaagatgcaacagtggccacttacctcttcgcacctctgtggtcagaagcagcagtcagtgatctgagtacagatctccggtgtggaggacagggttctttttgcccagccaggctgcaggctgtgtgcaggcagctttaggaacacatcagcacatgcacagctgcctgcggggtgggaggtggggcctcggtagccactgcccagctgagagctgcaaatgaccacagttaaccacagtttaccatttatgcctttaatagactccagagttccaaagatagttacctcagacacatcctgccattgcagttgttgttagctagggagatgtggcttcctgctctgccgtgttcccagaacaccgcatgcaggcagccttttatgtggtggtggttgtttatgttgtgtcttgtgccttctccctagtgcctgagattgtgagggagacccaggacctaattgaacaaggggcactcctgcaagcccaccggaagctgatggacctggagtgctcccgggacgggctgatgtacgagcagtaccgcatggacagtgggaacacgcgtgacatgaccctcatccatggctactttggcagcacgcaggggctctctgatgagctggctaagcagctgtggatggtgctgcagagg

SEQ ID NO: 33211 - DNA, 2300 bp, Homo sapien
aaggctgactagccgctgccctctctcctaggaattgacaaccctgtgttttctccggacgaggccctggaccgcagcctcctggccaggctgccgccctggctgtctcccggggagacggtggtcccctcgcagagggcccgcacgcagattccctactctcccggcaccttctgccgcctgatgcccttccgcctcagcagcaagtccgtggactccttcctgcaggcagacggccccgaggagcggccccccgccgccctccccgagtccacacacatgtaacgctcccgggcctcccgccgcctaacccctctccgcagctcctctccctccaggtctccgcctcgcgcgcgctgtctctctccctccccgcctaacccctctccgcagctcctctccctccaggtctccgcctcgcgcgcgctgtctctctcctccctggacctgaacctggctcgctctctctctccccgcctaacccctctccgcagctcctctccctccaggtctccgcctcgcgcgcgctgtctctctcctccctggacctgaacctggctctctccctccccgcctaacccctctccgcagctcctctccctccaggtctccgcctcgcgcgcgctgtctctctcctccctggacctgaacctggctcgctctctctctctccccgcctaacccctctccgcagctcctctcctccaggtctccgcctcgcgcgcgctgtctctctcctccctggacctgaacctggttctctctctccctccccgcctaacccctctccgcagctcctctccctccaggtctccgcctcgcgcgcgctgtctctctcctccctggacctgaacctggctcgctctctctctctccccgcctaacccctctccgcagctcctctcctccaggtctccgcctcgcgcgcgctgtctctctcctccctggaccggaacctggttctctctctccctccccgcctaacccctctccgcagctcctctccctccaggtctccgcctcgcgcgctcgctctctctcctccctggacctgaacctggcgcgctctctctctccagcagcccctcttcctcctctagcgccctgctggccgcacctccctcaggagcccggacagagatactctggcgtctctgctgctcccacggagctgagggcactagggccgcctgagatttcctttaggtggctccgaaagctagtccgcgagtccaaatcctgcgctcccagggagctgagagcagggctgggggaagccagacagacgccccgggtccccgaccctctcacagggatacagggagggccggccccgcagacccggactctgcctccagctcagagcagggagaggggcgggccgtggggtctgggctttctgagctccctctgggggcctgggaggcacccgggggacgccagggcggtttgagatggaggaagcaggtccccttggggaccttgacctcccgcgctgcagggcctggggcgggaccttcctgcgccgaggaggccgctgtcccgggacccccggcggggggacgtggcggggccgggctggggcttcgctgttgctgcttccgcctctgccccgcgaacccgggtcctgggaggaggccccagcggacgccgagcctggggtgcgccgcgggaggggaggcgagagccgccgggctcggggacagctgaggcccccggggacgcccctcccgccccagcgcccgggctccgcgcgccgctcacgccttcctctcccgcaggtgacaccggctccgacacgccgctaaccggccgctcgtccccgcgccacggtccgcccaccgccgccgccgctgtcccagagaaaccccagatccccgcgcggctacagcgaccgcgagccccgagccccgcctcgcccacgccagcgcctgcgcagaactccgagagtgccgcgcctgcgcccgcagagccgcccgagggcgagccgggggcggggcctgcgccgggggcggggccggagcgccgagggctgccgagtgcgcacgcgcgttcggcggcggcgcgccgcgtgcacagccggcgctcgttccagcggcctcgcgcgcgccgccgccccgcgctgctgaagctggcgtcgctgccgccctcgtgccacgcaccgccgcacgcgctggagcaggaggagacgccgctgtgacgccgccggcgggaagggtccgcgcgccatggctggccgctcgcgccctttcccaccgctgccgggaaaccgaggctcgccccaaacggatttgcgtgaa

SEQ ID NO: 33212 - DNA, 2300 bp, Homo sapien
gccctttgaacagctttgtggagaaaggttgtcggctcttaggacaggctggttggggggtggggtggccggaggtccagtgggcatcatggaacacactggtctggtggaaatttggccttcctgtggaatgcaagggcaacatcttcagagaggacgtcgttcctaacggctccacccaggaaccataaggaaagagcagggaagctccggactggagggaatcctgttcttgtcctgctggctttttctctgggacaagaggctgggagtggagtgggggacagagacaggtggggcagggacacaggccaagagcgactccgatgctcccacctcgcaagaccatactagtggccagtcacacacttccactcccccggtgccctgtccagaccctgcagtggcccaggccagggctgccctccctccacgccactcagcagccgagtcaccaggcgagcaccatctgaatgcaccttccctgtgctacacgggccacttccattagcatgaaactggggcccttgcagggtgaagtcattgaactcagcactgtcctcctcaggcctccgcagcccccactcagatgtcagaagacacatccatcctccatctgcacccaccccaccgcccacctgccctttgtccacctatctgtccttccatccatctatcatccatccgctcagccactatcttgcgagtgctattgtgtgcccagctatcttccaagctcctgggatgtatgcatgagccccttgctcgtggagcagacattcccagggtgagggcagacagctcaaggtcaaagccagcagcccccagggctgggaggtgagctgattcccggagccaaccgagtaagcaggggaggcgggagcttagctgccacagttgtgagctgagtgggtatcgggtgggaccagaaggtggcattggagccaagcccctggggagctgaggaagggagcacacaagagccgtccaaacagagggagcagggcgtgcaaaggccccgagaggcgccgattgctggtgtgggccgtggagtgcatgggggtgggggtcaggcagtggctggggtctgagctcccgggagacgttgagcctttcctctgagagggagggtcccaataggagggactgaaggggcaggtagagggccgagcaggagcctttgcaggtggctgcaggctcccagaagccgctggttttgtgcacattttgaaagtagagcagatatgctaagagcttggaaaccttgtgagcgaaagaagtccacctgcgtcccaggtctggggctggaaggctgcagggtgggcttggaggaaaacaggggtgtggtttgcacagtggagcctgagatgcttaagagagccagtgctgccggagcgggctgtgggcagaggccccgcatccgtgtgaagccctgggggtatcgaattgttttgggcggaggtctaaaggcaggggatggggcaggggagaccacgggggcccctgggctcccatctcagagcctggggtgggggatgctggctggcgatgggaggggcagagagacttaccagcgcaccacgcaaggcctgggcgcccccgagttctggtaagtggccggtccggctgtggaatgcaggttcctgctgaagacaatagcgaggggctgtgtgaagacacacctggggcccctgtgcacccttgggccgccctgtggggtctgcgcagccccaggccctgcgtttatgaaggagggttggggcgagcgcacccacagctgcccgggcatcccaggagctgcgcggaaccgcctgtcccgctgccccgcgctgtgctccccacgccccaggaaggcggccgcgcagtcccgggctcgctcttgccgcgacctcccggacctccaggccgcgggctccgggggagggtgggcaccagggagcgcggggtgggcgtgcgcgggcggggcgggcgtgccgggagctgcggcggtgtctgcgctcgcgagtgcgcggcgggggcgggcaggctccgccccggggcgggagggggccgcgggattaaaggccaccccggcgggcggggatcggactgtagccggtaccggcaccggagcgcgccgggtcctcgccgggtcccagccccgcgcgtcggcccagcccagccgggaccccccgcgacatgcgcgtcccagccctgcgctgagcaggcggcaatgtggggactcggggcccggggccccgaccgggggctgctgctggcgctggcgctgggcgggctggcgcgggccgggggcgtcgagg

SEQ ID NO: 33213 - DNA, 2300 bp, Homo sapien
gcaccagcatgccctcgggtttgcagcttgtcaaatatcccatgaaggcaacctgaccaaatgtgctctaacaccactggaccaatggaacgtcttgggctgaacagatgcagccttgcatccaccgcctgccaccaccctctgtgtacaccccctgcacacacctctgcacacaccccccctgcacactgttgcacataccccctgcacacagcctgtgtacactccctgcacagatcccctgcacacaactccctcacacatcctctgcacaaaccctgtgtataccccctgcacacacctctacacataccttcacacaccatgtatacctcctgcacacacctctgcacacacctcctgcacacaccttgtgtacactccctgcacactgttgcacacaccccctgcacatagcctctgcacacagcctgtgtacactccctgcacagatcccctgcacacacctcccacacacatcctctgcacaaaccctgtgtatacctcctgcacacacatctacacacacctcctgcacacaccttgtgtacaccccctgcacactgttgcacacacctcctgcacacacctcctgcacacactgttgcacacacccccacacatagcccctacacacacctctgcacatactgttgcacacacccccacacatagctcctgcacacacctcctgcacacacctcctgcacacactgttgcacacacccccacacatagaccctgcacacacctcctgcacacactgttgcacacaccccttgcacatacaccctgtatataccccctgcatactccttatgtacagcactgcacatactccctgcagagaccctgtgtgcatcctctgcacacaccccttctgtatactgtctgcacacaccccctacatgtacaccctctgcacactcctcctgcatacaccccatgtacaccttctgcacacactccctgaacacattctgagtacacctcctgcacaccccgtgtacaacctctgcacacaccccctacacactcccctacacactcccctacaccatccacacacactccctgcacacagcccctgcacacattccccatgtacaccctctgtctgtgtataccctcgtctactaccaccatacgtaccccccaccactaccctgccttgtctatcaccccccaggctgtgacataccagggatgttgccaacgagctggtctaatctggggtgagggtttctgggtgcccctagacaccaggagaaaggcggggaggggacacccctgggggtctggattcactccaccaggcgctgggccacagtggtacggtgacacagtagatgtcttgagcaggattaaagtcttcccaataaacaggctgaactctgtcttccttgaaagctctgtagaaggacctcacaaggataaacacagcgagaccctccagggcgcggtcagccacgagccacagtgctgggcctgtgacatctctggaggttctggggtggagaaggaccggccgtggggagtgactggctggggagaagctcagctcccgcccacctctgggaggcccggggctggacgggaggtgcagcagacaaggctccgggcgggtgctggggtgtctggaggggtccccgcgggggggtcgggttgggtggggagtctaggtgagtcgggggtccccgggggcgctgggttcagggtgggagcggagtgtggatggggcagggtccccatgcccaccaccagccgcgattccaccgcgcctactcggggtttccccgggaggacaccgcgtgtgtcaagggccggggcctagaaggcggccgcgcccagggaagccttgacagggagctatctggggcgggggctggggtcgcgtggccagtacctgggagaaccgccattcaggagaaccccccgccaggctcttggttccgcccacgcagtcccgccccctcccccagccacgcccctcgccccgccgcgcaggccccgccccgtcccgccaggctctcggttctgccgacgcaggtcccgcccctctcgtagcctcgccccgcccgccgcgcaggcgccgtccgagggctccgtttgaaacatggcgcgggctggccctcggctggtgctgagcgaggaggcggttcgggcgaagagcggcttagggcctcaccgcgacctgggtgcgccggagggcgggcgggggtgcaagcgtgaggtggcgggggggtgggtgccgagcttcccggggcggcggcggaccgtgggcaggcgggacccgtcta

SEQ ID NO: 33214 - DNA, 2300 bp, Homo sapien
atgtgtgggccccgtcctgtcctgtcatcgagacctcactcatccaggaccggtgcacctggctaagcctcactgggcaggcactgctgagccgccctccacctggctcagggctggggcctcagggcacctgtcctccccttcgtggtgcgagggcatcccagggtgcgcttgggcacctgctggcattcaggacctcagttactgactcgctggcctcatgctgttgtttccatcacagccgtctcccgggtcacactcggctctacccgggaagaagacggccctgcaggcggcgctcctggagacgctcttggacctggtggacaggagctggggcggctgcaggtccctgcacagcaacgaggcattccttggtgagtcagggcggccactgctcttgccctgtaggcagcgtctgtgtgggttccggggtcctctgcgtgtggtgacctaggagtcatctcagccccaggtctcctatgtcccctcccacgagcgtgtggtggtcccgcgcctgggccctccctggcagtctttgcatctcacagtgtccagggctctcgggagacaccacatgggcctgggcctgtgggtcccccgctgtgctctggggtgttggggggcctgtcacctcattttgctcaaaatgctgtccaaaggggcttggttctgatggctgtgatcacatggggatttggagtttggaagctgctcagcatcttctcccccgacccagacgtgtagcctgtgctgggcctggattgcagagcttttggttggtgtgggacccaggagggtggtccctccccagagaggacttgggtctgttggattctaccaggcaacccgtacatgagcacactggggcctccctcatccaggatcacactgggagaccaggagatgccgcgtccccaggggcaccttctctttgtcctgcatcctggggtgtggctgtgtgtgtccctcaggagcctagccagtgtgcttctccccgcagaccctgggcacggctctgagctgtctgactgcgccttgcagtgttatagcccctcagctcctagaatgaggacgccctgcagtcgcagcccacctggaccccagccccataaacctcccctctccctaggctggtgtcctgtgggagcctcctgagcttgccatcgtcggtggcggggggactgtcccaggcccaggccactgtcccagtgtggagttgccagctgtcgtctgcatggtggtttccacacagggcagtcggtgcttgtggaaggcgcagcgagttgtggcggcgccactgaaaccttgagacgtggcggcccctggttgccccttttcttggaggtcacctcttctctttcttcagttcccaccctgcccgtgtgtggacgcacagagcctgaggtggttttgtggcgccaacacccctttcccctctccctacctgtcgtctttttgaggcatcgtctgtgtgattcaaaacatactgagccgattttgtttacatttcatcctttaagcctaagtgctaatgtaatatttggttttcactcctagctcaggcaagacacatcttgtcatctgttgaagaattcacagcagctcaggacagctctgcgatggtgggtgaagatgtcggctccctggctctggagagtaagtccctgcaaagccgccttgctgagcagcagcagcagcacgcccgggagatgagcgaggtgacggcggagctgcaccacacacacaaggagctggtgagcccgccctggcgctgtgtctgtgtccatgtgactgggggaaacatggctctgacttccaggaacgagggcagctccttgatgccacactgtcccaactgccatctctgcagccccatgtctccactccctgcccgggacccggccacccccggaacgcggcctgccctgtctcacaacaggcctggagcactttggagacagcagtggcgctggccaccttctctccccgggcccaagggaccctccaccactgggcagtgccgggtgctgcaggagccaggcctggacgtgactttgtcttgctgacccatctctcagggcctcgaactggggaaaaccgaggccactctccttttatgaaggagatgacggccagtgtcccatggtgagctggggctacagggcaagttaccccaaaaccagcagctgaaaacctgcatttatcaccttggatttctgtgtattgggcctcaggctcagctcagccaggctccctccttccgtctcagccgtgggccggggccgccgtctcatctg

SEQ ID NO: 33215 - DNA, 2300 bp, Homo sapien
ctgtgccctgggcaggtctcccagcggtggggcactgggcaaggggcataaaccctgggatttatgccccttttaattcttatttttacctctcctgaccctggggcagccttgggcctgcggggtgccacaaccctaacaattgcccaggtccacctggtgtttatgtagttggggaccccaccacctgcaccctcagagggaaggggctgtcagaacagccaggccccaccctccaggctatgcccccccaatccatgccccttcagaccaagcctccccaggacccccccaggccacgccgacctggccatgcctcccaggacccacccaccccctcccaggccaactcccagtccatgcccttcctgaccacgcctccccaggcctcaccctccaggctatgccccattcatgccccttctgaccacacctcctcagaccccacaccaggccacgccctcctgaccacgcctcccaggaccccccccaggtcacgcccccaatccatgtccctcctgaccacccctcccccaggcaccacccaccttccaggccccgcccccaccccctccaggccccgccttccatccccgccctgctcaccgtcacccctgagatgatgggcgccttgccctcgatgagcctgtgcacctcgcgaacggcctcctcgctgctcttgtctttgaatcgcttcttggcgagctcctccagcgcctcctggaactgctcaaaggtgatggtccggcaagacttccctctacaggggcacaggcgacttagggctgggcgcgggccggcccagggctgccctccccacgcgtgggtctgagcagagctggacagccatggcccagcagcccacaggcttcacccacaggcggccgccctggtagcactgcaaatccaaactgtcttggaagaaagcttggcggaagcaggtcctctataaagctggatgctcacacggccctgcaggccgctctgacacagggtgtgtgcgggtctgcactctgctggggcagtgccggaggccattaggcagcggagcccacctcctcctcccggggccaccacagccccgcccagctgcgccgggagctgggggtcctaggacctgctggggccccggctctgcctgtgtgtgttggggtcctaggtggaggtgtcccccacacaggaacatggttaggaggggctgccgcccccggacacttggcagcatgggcgcaggcccacgcctcagatgccctggctccaaaacccgccaggcggccccgctgtgcccttgcactgctctggcctcagaggtgcagagcccggtgggccggaggtgccatgagaagcttctggtcacacaacacgccacatctaaacacagtccacgccttacaacatcctcccaccacaggccattcaggcaattttagagggttctaaactgactcttggtttttatataataattctaattagaaaacatttttctcctctgaccagatctaccacaactaacccaaagtggggtttttcagtgtttaaaacaagagatcctgtggatgaggctcagctctgcaaaaggcacctgcatttcaccagggaagcctctggacagcgcgagaaaggctgcacccagcaggccaagcattccgagggcactcccagctgcagaatccacagtgaccaagagtcaggggacaaatgacccataaaaccccagcaagcctttccagaagtcagtgagcagagggcctagaatagccaaaacgatttcaagaaatgagaacagagtcagaagactgactacccaactccaaagctcatcgaggcttgactgcaaagtggcagcgacgtgggcacgggcacgcggccagccccgcagcccagggggagtctggctcagccacatgcatgctgcccccccgatgtctacaggtgcagaggcaagccagagagaaaggactgtttcttccacaagtggagctggagcaactggtgatccctgtgcaaattaaaatgcactttggtctatactgcacactatatacaaaactaactcaaaatagatgacggtcctaattatgaaactaaaacttctagaagaacaccaaagagaagatctctgtgacctggggttaggcgaagatttcttagaaatggcaacaaaacatggcctatagtggaaaaaatggatgaactagacttcatcaaaacgttcgaaactctgctctcagaagacaccgttaagggaatgagaagacaagccacagactaggagacatgcctgagaaaggacttgt

SEQ ID NO: 33216 - DNA, 2300 bp, Homo sapien
acgtcgtgcctaattcattgtcatttttagtttaaaaaccttttaaaaaatattttgttaagctaatgcatgtttgaggtaaaacaaaactacaagaacctagaacagtgaagctcagatgggctctgaggcgagtccccacgtgagacccctcagcacacaccccacgcagaggcgggctttggaagcatttctggcagctggcgtctgaggtcggcactgctccaccccttggtgcagaaaggctggggctgagttgggacgggttccacttttccctccggaactgcctgggcctggttctcagccctcccaagcgcccgtggactcactcccgtgtgacggccatgggttcctgcatctactacttcttctcggctgttgacggctgtcaccctcgtcttcctgggaagcccagtcaccaagcacctccgcagggggtgtggccacgtctctgaggtcacacccactgcaggtggccttgctcccctcagcctgagtgggacagtggacgtgggtatccaagtcccagcctgaagcatttttcctcagaacgtttgaaggcagtgtctgtcttcagtagatccggcgatggcctgacccctgttcctttctgccctctcccccacggcccccaccgtgctctcatgcgtgccatctcatgctgcttgctgtgctgagaggggctgagcctagcacaggtggtgcctgcccagcaggggcgcaggggccgcgggccggaccgttctcacgcgtcgtgactcccacccgtccgcatctctgctcacgcacattctcttccgccaggtctgaaatcgcctgctggcctccctctgacctgcctcagtttctcctcttcactcctcgctgcctgatgtgtcattgcttatttgtttatcacttgtcccaactgaaggcctcatgagggcaggacgttttatgtcccgctcagccctccaaggccaacctccaagcttatcaaaacctcatgcaaagcacgtgctgatgggctgggaagtcctgcgtgagccctgaaggtggctctgaggggcttccctcatccctttgctcccaggcgggccccacggggtgcaggttctcagatgactctctgaggtgtgtgaataagggtctctgttcaggcgcgtccccacaggagatgagaccacagaacgcagccctgagtttgaagcatcccagaaggttctttctctctgacccgcacacccaccactgttctgggtgctcacaaaacccaccattgcttctggtaatttctcagctgctcctcctgtccagcgacccctgctgcagaggcccaggggaaacacagaccaggcctgtgagaagctcctgtttcagacaaagaaatggtgtcagcgataaaactggaaactgttcccagctcgacacctgacctggcccttccacccccaggatcctgcccccaggcggcccttccacccccaggatcctgcccccacgcggcccagcccccaccaggatcctgcccctgcatcctccgctgggttggcatctgcatttttggtgccttccagggaaaggggtgagtgggtggggcctgaggcccttaaggtcctcagtggagggagtgcccctggatttttttctggctgttttgggggaatttgtgggatctcagggtcagcagcggccacactcaggaccccacgattacagagccacactttggccatgactggcgctgagaactccagatctgagagggcttcgtgagtcccagggttgggacacctacctgtgtcctcggcacggaccctcccaccggctcttgtgtctgtgggcagaggccatgttcagctctcagtgcagtgctgacggcccacctggtgtccaggcccctttgggaagcagctttcatgccctgagtccagcacctcagccttgagtccttcagggcctgactgggtcttaccgaagcccatgcatggtagggaggtggcctcggcagccctgccctgtggcgtagccctgcgtccccaagccctgcctgggtggcacccctcagtcttctcaaccccatggcccagccgcctactctgggggcgggcgccttgcaaagtccagagggcgtccctgcgccctgacaccggtgcccccaccactgcctcagccctgcacactggcagtcccctcccctggccggggccaggcccagggctcctgggaagagcatcctgaggcgcccccagggccaccacgcaccctccccagcctaaagctccatctaaggtcagaggctctgcagtggggaggga

SEQ ID NO: 33217 - DNA, 2300 bp, Homo sapien
tcattggctgtgagtcggttttcagtaattgcagggttaatggaggctgtccaggtctggcagtggagcaagagctgggggccaggaagggccaccggacgggcagccatggccaggtgaagagcctggagtcccgaatcaggatccacctctccctgctgagcaagatcctgtgcccctgtttctggtgattttgtaagtgctgactgaaccgactgtcgctgggaaataacacacccgtgaccccaagccaaagtttcacccacagacaaggaaacagactccatgaacacgccgactcccgacggtagaaccggggtgcccaccccagccccggtcactgtgtgtcctgcgcaggggccagggcagcccaaggctcagctctgtcctcctgcccagacctcgctcagccccctggacgccgccccgcgcccgctgcctctcctctcctctcctcccaaaggctccaggaccatgtctgcctctgaagcctgacgttacctcccactgcgattttattgtaaactcactgcatttatgtcaagagagtttgtacaggttttggaaaatgcactgaagagtccccttgtgcctattaggacggtaagaacacaccaaggagagattatttcattatttctttgatgctgttagtaggatctacccgagggggaggcactccgggctccgcgggacgagaaggcagccgagcccgcacccgagcaggagggaagcaggagccgcagcgtggccgccgcacagcttcgggggtcccccgacttcccagctgcgagtgtggaatttctcaggagaactagacagaagcccatctctgggcagcactgagtggaaggagaaaccacaggagaggagaggaagtgtggggcgcgggaccaccgtggggtgggtgggggccaagccgccgggctgtgaggcctcagcaccccctgcccagcacccagcaccccaacttccccttctgcctttgcggattccagggcctgctggacacctggtgcagggacagagccggggctgggggaggagctcagctgcactagagtccagctggaagagtccagctgaaagtcaccagaggcaccccttcctcctggggggctgcgcctcggcctcctccagggcaggtgcccctatgcccctcaagtcccagcacccagcaccacagaaccgccctgtcatctcggccccggaaccttgtggggagccaactcctgcggagggccgggcagccccgggcggaatgagccccctccgcaaagcctgtctggggagcgggggaggggcggcaggtgcccggagaaaggcgagattggaagagcggccgggatggtggcgctgcatacgggcgacctgcagggagaacggaagctgaggccggggtcaggggtgcgcgctccgctcctccactcctgcgtgaagggcggcccactcccgagcagctgcgctgggcgcccggcacggacccgtctccctgctcaggtcgatccccggccgcgctgcccccacctggaagcccagtcccctgggtgcgccccgccttggggtccgagcaccctcacagcccggccctgccgcttccctgcaccgtctgcggctccttaaagaactgggcgcggtcggggctcgccccgcaccgtcctcgaggccccgccgccaacccaccccaccccaggaggccgcggccgcgctcatccatcccccgccgcaccgtcaacgcgcgtcctgcggggcggagagatcggggtccggtcgtccccggggggccccagagccaggtgaggggccccgccgccccctgcccagcggttcccacgacccgcgggtcggccgcgccctgcgctgagcggatacccggcggtccgcggggcctgagcagagtcggccttgtaaggcagaggtctcggtgcgcccgcgcgtccccgggccgggtggggcggcgggggcggggctgccaatgagcgcgcggggcgggacgctgggcgggcgccggacgctgggggccgggggcgggcccgggaccgggctgggcggggctgggcggtgctgggcgggacgggcgggcgcggggcggcggctggagagctccgctgagcaccgggtcgcgcgcggccgagtcgcggaggcgcctccgctgcagtcgctgcgtctccaaggtaagcgggcgcggggctcggtcccgcgggcgcggcgcggggggcacccgggggcggagactgggcccgtcagccccagcagccacctgcgccgcagcccctgccccccgcgctcccccgagcccc

SEQ ID NO: 33218 - DNA, 2300 bp, Homo sapien
cctcccatcaggcggggactcatgtctgctcccatcatcttccagcgggtgggagcctgtgtctgctcgcatctcccagggtgcatgtccatggggcatgtgggctctgcactacctccagctgaccatggcattcagttgagaaaccccaggccccctagggtcactgagacatggatgtgtggggacaaaggggcctggggaacagttggcctgcgttcggtgccttggggcactggaaccatatttctgaaagtaggatgtgttatttctcactagagccttcctcagtggggaagtggtgacactgtgtccggaactggtgggttcttggtctcaccaacttcaagaatgaagccgcagaccctcgcggtgagtgttacagttcttaaaggcggcgtgtctggagtttgttccttctgatgtttggatgtgttcagaatttcttccttctggtggtttggggtatccctggttcaggaatgaagctgcagaccttcactgcgagtgttagagctcataaaggcagtgcggagccaaagagtgagcagcagcaagatgtattgcaaagagcaaaagaacaaaacttccacaatgtggaagagaacccaagcagtttgctgctactggcttgagcagcctgcttttattcccttatctggccccacccacatcctgctgattggttcattttacagagagctgattggtctgttttacagagagctgattggtccgttttgacagggtgctgattggtgtgtttacaacccctaagctagacacaaaagttctccaagtccccacagagcactgattggtgcatttacaaaccttgagctagacacagagtgctgattggtgtatttacaatcccttagctagacataaagattctccaagtccccaccagattagctagatacagagtgctgattggtgcatttacaaacctcgagctagacatagggtgctgattggtgtatttacaatcccttagctagacataaagattctccaagtccccaccagattagctagatacagagtgctgattggtgcatttacaaacttcgagctagacatagggtgctgattggtgtatttacagtcccttagctagacataaaggttctccaagtccccaccagattagctagatacagagtgctgattggtgcatttacaaacttcgagctagacatagggtgctgattggtgtatttacagtcccttagctagacataaaggttctccaagtccccaccagattagctagatacagagtgctgattggtgcatttacaaacttcgagctagacatagggtgctgattggtgtatttacagtcccttagctagacataaaggttctccaagtccccactagactcaggagcccagctggcttcacctagtggctcccacaccgggggcaggtggagctgcctgccagtcccgtgccatgtgcccgcactcctcagcccttgggtggtggatgggaccgggtgccgcagagcaggggacggtgctcactggggaggctcgggctgcgcaggagcccatggcagcggggaggctcaggcatggcgggctgcaggtcctgagccctgccccgcagggaggcagctgaggcccagtgagaattgagcacagctacagcagaccagcactcctgggggacctggcgcaccctccacagctgctggcctaggtgctaagcccctcactgcccggggccggcagtgccggccggctgctctgagtgcagggcccgctgagcccatgcccaccccgaactagtgctgggttcccgcctgtgcctctcccttcatacctccccacaagccgagggagccggctctggcctcggccagcccagagagggactcccacagtgcagcagtgggctgaagggcccctcgagtgtggccagagtgggcaccgaggccgaggaggtgccgagagtgagcgagggctgccagggctgccagcgtgctgtcacctctcaacaccactgcgtggtccttgggctgggccatcccgggcaagtctctggtaaatggtgagcgtggtgtgtatcgctgtggtgcaggcagggaggtgtaggggctggatgcagagtgagcaggtgccatgaggacagcagcctgccagcctgagtgcctcagccatgggcaaggccatgtctctctttcctgaaacttgttcctgtggcgtctttcagtttatagaggtagagagtacagtcaagcggacccgcaggtgccagtcacctgcttcaacagtgaagcttttgct

SEQ ID NO: 33219 - DNA, 2300 bp, Homo sapien
gtgcactgccccttcccctagagatggagcttcctgcaaaccagacagcagtgattgctattgttcttctgggtctctccacccagcagggctaccaggctggtgctggggaatgtctgcacagagtcctgtgatgtgatccgtcctcaggtctcccagctgtggatgcgagcacctgctccggtggaggtgacaggggaccgaagtggactctgtggaggtcctcggcggccgataggtttactgtgctgactttctcagaggctggttattctagcagtgaagttgtcacatgggcagactcaggacctctggttatccaggatgttgcaggaggtggaataagctcttgttttctccttcctaggagcagggttgttctgtcatgagttgctgtcatgtcctgagctgactggcctccagccaggaggtggcacttttgagacagcagcggagttgtcacctgttctgtggaatttgcagtggcctatggcatcttccaaaggccctgtgactttttgttttttctggtatgctgctgtggtggttcctggagtgaaaggccacagtatgagtctccacatgctgttctgtctctccatgtgggagctgcatatcagacctgtctcccatctgccatcactcttcagaacctgtcttaggcactggtgtagggcaggtctcacacggtgggtggagggactgctttgcattgtcccagtggcaaagagtcatggtcctttacacgagaagcttcttacgtgtgccactgcacataacgcaggagtacttagacaacctcccaggagctgctggtctacaagtttctgagacatgtgtgccccacagcagtggtgctgacacgacgcggtgcagcctccagtgccaccctgagtccccctacaaagctgagatgagtttctctcctcctttctgtcccaccagagtcaaagccaagagctccctgctgattcacaagcacttatgtcacttctgcacttcagtaaaccaggatggggattcgacggcacgggtaagttgcagtcaccagcgatgcaccccgaggtcagggccgtgtgcagaatatgtggtctcgggtcccccaagctgaggttaaggcagtattcagaatggaagcactctgtgtccaatggtgctgctcacatgggaatgatggtgggtggagcacagaagagagatggagtgagaggcaggaatgcttcccagctgtgggtgacagagacagatgggtaccaaagtgggagcccccagcactggagcaccaccatcaggctgtggtgatgggcagatgcccaaggcaggctctgaagtgcccagaacatgcagcgagggacagtgctgtgataaaggatggagggaaattggtagccatggcagaagccatgtgctgttttttttttttttttaaataaaatgcttaggaaagactgtgtgtaggagacagatgggaatagacgatgtatgtgtggtcacacgtacaagtgtatggtgtgtggttgcacatatgtgggggggtgtggttatgtgtgtggttttgtgtgtggtgtgtggtcacgtgtatatgtgtgtgaatggtgtgtgtttgttacatggactctgtgtccatccttcacaggaaaagaccagcgcggctgccggctttagggccacatatttctgttcctgctctggggtcagcttccagtggtttctgctgggtcattatttattttttagagatgagatctcactccatcacccaacatggattgcagtggtgggataatggctcactgcagcctccaactcctgggctcaagcaatcttcccaccttagcctcctgagtagctgaaagtacaagcgtatgccaccacgcccagccaatttattttttatttcttaagagatgggatctcactctattgtccaggcttgtttggaacttctcatctcaagtgattccttgacctcagcctctaatagcacagggattagaggcgtgagccaccacgccaggccgcaggctggtccttttgagcaggttttgtcatggggccagcttctggaggttacaggtgtgttctccttccctgtgggggcagggccacctcaccacacttccccaggatttcagggaacaggctcctgtgacttggaaataaaaagggatcagcccagcctggaggaacagcgacgctggtgtccaagccttgccccttgcctgcacttccagcaaagatttggagacacactcggtggaaatcgattgagcccccagcccaccctggcccagactcag

SEQ ID NO: 33220 - DNA, 2300 bp, Homo sapien
ttgcccagcatggtgccatggagaccccagcacagaccatgctcagggccccccgagtggaccgagcccgcgtgctccttggctggtagggaggcctgtctgcatcaggtggagtcgggaggtgcgggcagaggccccagagctgtgacactggagacgccgtgtgaccctcatgctccgctggtaggcttgggcgagtcgcaccgcatctctgacctcactttccccactcgtgaaaagggctggttccccctcctcacaacctccttgttccttgtggggattaaaggcaatcacgtttgcaagaagcgctgcctgaattgtcgggcggtgtgctggtgggaatgtcccacggccacccctctccagcgagaggcctggagacctgggggggcgtcacaggacggcacagagacaggagcctgagcttccaggcgcggtcgggagcagggtttgaggccagcgttgggcggtggccaggcgccctcaagtggacgcccacactgacctgtcacctccaccctgcgggctccagatgccctgcgcgtccccacccctgcgccccccacacctgccctgcatgcccccgcccctgccccagatgccctgcgtgtccctgcccctgcctctgcaccccccacctgccctgcatgcccccgcccctgcctcagatgccctgcgtgtccctgcccctgcctccccgcccccacacctgtcccacatgccccgcatgcccctgccgctgtgccccccacgcccgcccctgcccaccccgtgcacaccccctgcccccgtgccccccacacctgcccctgcgcccccactgctcccacgtccccacccccatgcctgcctgtgtgtctcccggcaggttcttcttcagcactgtggcctcggccacagctggcatgctctgcctgatcgccatcctgctgtatgtcctcgtccagtacctcgtgaaccccggggtgctccgcacggaccccaggtatgaaggtacgtggccgccgctctcaaggggcctcatcctcgcctccagccgtctttccgggtggtagtatcgggtctggggtggtcggcccctcttgtcccagggagaggccggggcaggcagccccatgcaggctctgacctggcccgacggcagcagcccagtgttcatacagcccagcagcccccagcgcgcgggaggcaggctcggggagggcgctggccacgctgctctgtagatgctgccaggtcgtgtcaggcgagagacagtggggtccacctctgcccctgccctccgcagtcatccctgtagcacctgtcacaccatcctgtggggccatgtagttgtgggagggtgggggtgcccatcctgcaggagcagcccatggggagggagagtggaggcagcgctgagggtgctgggctgtaggctgcggtgcgctgaggcccttggccaagtgggcccggagcctgggcctcgggaaccgatgctcacactgagccactggagagacgtggcggtgaggactgtgggctccagaggcgagtccacgcctaacccagatcccgtgatgccagcatcctcgggaaatgggcctgtggctgtgacttaatatctgaggtgggagggtcgtgctgggatgtcccagggggcccaaatccagccacgagtgtgcttgtaagagaaaggagagacacagaggggaggtggcctcgtgaggatggaggcaggggtggagtcacacagccacagcccggggtcgccgggagccacaggagctggcaaaattgggaagacctccctggaccctgcggaggcagcgtgcccaactgtcctgcagctggacgtcagagccctgcctgcctcagactgcaagagtctgctggagaagctgcccccacccgccaccatttgatgtatttattgcagcagcgccaggaccctgaccaggaggacctgggccagagaagcccctcggggtgcaggacaagactgccagtctcagccccaggcatggctgcacccgcactgcacacagcccgggtggcgagacagggaggacttgcctgcccttgttccagaacattccggagccaacacggtgtgacatttttttcaaggatgagctttgccagctccacgtggaagtccctaaagctcctccttccacttcgaagcgtgactgatgcctccagggcctcacagccgcttctgaagcacttcctgaaagccagctccaccctggcgaggccctgacctcagcggacccaagcccaggacgatgcctgttgcgttcttctcccccagt

SEQ ID NO: 33221 - DNA, 2300 bp, Homo sapien
ctgtcctccatggggtctgtccacctggctcgctgtcctccgtggggtctgtgcccgctgctcgctgtcctccatggggtctgtccccctggctcgctgtcctccgtggggtctttccctgctgcttgctgtcctgcgtggggtctgtcccctcggctcgctgtcctccgcggggtctgtccccgctgctcactgtcctccgtggggtctgtccccgctgctcgctgtcctccgtgtggtctgtacccccggctcgctgtcctccgtggggtctgtccccgctgcttgctgtcctccgtggggtctcttcccccggctcgctgtcctccatggggtctgtcccccggtttgctgtcctctgtggggtctgtccccgctgctcgctgtcctccgtgtggtctgtccccccggctcgctgtcctccgtggggtctgtcccccttgctcactgtcctctgtggagtctgtacctccagcttactgtcctccgtggcgtctgtccccgctgctcattgtcctccgtggggtctgtccccctggctcactgtcctctgtggagtctgtccccgctgctcgttgtcctctgtggggtctgtctccctggcttgctcacattttctctaatttggatgtattactttttccaatcatcctttccagctcttggtgcacagtttcgacctgaagtcttcagtcttctcaaagttcttcagtgttttcttttttctctcacagactctccacctttctgttctgaaatcctgacagatgaacgtgttgtctccaggctcaaggctcaaggccgctgagcgattcccctcttctcctctctaagatctgtggtccttcctggatttgatattccaggttttaccaatgtgacttggcgacatcatttctgtttgttggcactttcatttgggttttgtttttaactgggaattgtgtttttaatgtacagggttgtctttctgtgtttctatttccttccttggtaactttgacttttctttctttcttttttttttttttgagatggagtctccctctgttgcccaggctggaatgcagtggtgcaatcttggctcactgcagcctcgacctcccaggttcaaacgattctcatgcctcagcctcccgagtagctgggattagaggcatgtgccaccatgccctgctaatctttgtatttttagtagagacagggtttcgccgtgttgcccaggctggtctggaactcctgacctcaggtgataggcacgcctcggcttcccacagtgctgggattacaggcgtgagcccccgcgcccggccaaagaaccatggtcctgtttcataactgtgagtctctcgggtctcccagagacattcttgtgtgactcaagccccagggtcctgtggccccgcatccgcctggtgtcacatttagaggaccagggaggagccaccaaaggcagcgcagagccactgtatcatggacgttcacgactgcaagaacgaagaattgttaactatttctcaatgtctctcttctcaaagaaatacatttaatatcaacttcattttctgaaggttttttcccaaagagacaacaaggactttgagcgaggcataacgtggcgaagcttcctaaccctcctctgtagagaccgcccagcccctcaagatcaaccccccaccccgtagcggccgttgagtgtctttcactgccgctctgtgacaccacgtccctcccacccctgccgccctccccacctgactggccaggagcagccgcagcgtgttcagaacctcccagccactgtccacccgggcggagaccccagccccgcgtggctggacgggcttccctgtcctgtggaaggggagacacacaggaccctgtgaagtgagctctcgggtcctgctcctctgggaagctcagagaagcctctcagggaggatctggcaggtttcagtgttgcaccagtgagtaacggctcacgagctcttcaggcattgcctcagtttctcacaggcgcagccctctgctcagtgtggcctctttctgacgtgggttttcttcttgcacctggggagtcctgggtgggcctgtgtattcgtgaacgggttgtgggacctgtcgctgtgtgggggctgtcgagcactccccagaacgtaacaaatcctcaggggaactgatgggcggtcgcgcgggcactgggtcctccacaccctggagagccgttttccgttgccactcggctctggccggggtcacattctgcagcatgtctgttcattcccctgggcggggccctg

SEQ ID NO: 33222 - DNA, 2300 bp, Homo sapien
taccaaagtccagaccccggagggaaggtgaactttagcataaaccactctgctcctgttgttggagctgtgaacaatccctagcactgggggggaccccagatgccagccgtggctggccttgccttccaggggaccctggccccaggccgctgtgacagcacttttctgcacagcagctgtttttctcagcacttctaagattttgtccttattactacttctcagcagcttggtgctgatgggctttggtgctgatgtgctgtggtgtgttagtctgtcctcacactgttataaagaaccacctgagactggtcattggtgaaggaaagaggtttaattgactcacagttcctcaggctgtttgggaggcatggctgggaggcatcaggaaacttccaatcatggcggaagatgaaggagaaacatgcatgtcttcacatggcggagcaggagagaacgcaaagggggaagtgctttgaaacaaccagatctcatgagaagtcactcactatcatgagaacagagaacagcaagggggaaatccatccccatgatccaatcaccttccaccaggaccctcccctaacattgggaattacaattcaacatgagatttgggcaggaatacagagccaaactgtatcattctgcccctgactcctctcgaatcttttgtccttttcacatttcaaaacacaatcatgccttcctaacagtcccctaaagtcttaactcattccagcattaactcagaagtccacagtccaaagtcttatctgagacaaggcaagttacttctgcctgtgagcctgtaaaatccaaaacaagttagttaattccaagatacaaatcgggtacagacattgggtaaatagacctatcccaagagggagaaatcagccaaaacaaaggggcagcaggctacaaatctgaaacccagcagggcagtcattacatcttgaggccccgaaagaatcttctttgattccttgtctcacatccaggctacactgatgcaagggatgggctcccacggccttgggcagccccgcccttgtggctctgcagggtacagcctctgtggctgctttccctggctggtgttgagtgcctgcagcttttccagatggcatggtgcaagctgtcggatctaccattctgaggtctggaggacggtggcccttttctcacagctccactaggcagtgccccagtgggtactctgtgtggggtgagggctccaacctcacatttcccctctgcactgccctagcagaggttctccatgaagggcctgcccctgcagcagacttctgcctggacaccctggcttttccatacatcctctgaaatctaggtggaggctgccaaacctcagctcttgccttctgcctacccacatacccaacaccatgtggaagcttccagggcttggggcttgcaccctctgaagcatcgacccttttagccctgtaccttggccccttttagccatggctgggacacagagcaccatggcacatgtcccagtgcttcacagagtagtggggcccttttccctcctagacccccaggcctgtgatggcagtgtctgggcaaaggtctttgaaatgtccctgaggtattaacatttggctcctctttacttacgcaaatgtctgcagccttcttgaattcctccccagaaaatgggtttttcttttctaccacatggcaggggtacaaattttccaaacttttactctctgcttcccttttaaatataagttccagtttcaggtcatttttctgtttgtgcaagtgagcataggcttttagaagcagccaagtcacctcttgaatgctttagtgcttagaaatttcttccaccaggtgccctaaatcatctctctcaagttcaaagttccacagatttctagagcagggtcacagtgctgtcagtctctcctaaagaatagcaagagtgacctttgcccccattcccaatggggtcctcgtctccatctgagaccacctcagcctggatttcactgtccatatcactatcagcatttgaatcatagccatgcaggaagtctctaggtagttccaaactttccctcatcttcctgtctttaagttctcccagctgttctagcctctgctcattacccagttctacagggcatgtctgtagtcactgttactacactttgtctactgattccctgatatcagctttgagtctctcctagtttggggctgtgttttcctgctccttcgtgtgtgttggaatcatttactggataccaggtgga

SEQ ID NO: 33223 - DNA, 2300 bp, Homo sapien
tctcttggtgactcccagtccacttcggggtgcgtaggaagagttcatgaactcattagtggctcactctgaagtcagagtagagtgagggaagtcaaggctagagctgggacattgatggccgccaggatgcgttgggggaatttttattatatctgaaatacctatcacaataaattaaaagacgctcgtaacttttttatttttaagaaacaaaattcggtcagttgtatccaatttttggattgtaagagattttgtatcatttagaaatctagatttttccgctttaagatgtctttgctttcagaaaagatccccatggattttttgcttttcctgtcacggatgcaattgctcctggatattcaatgataataaaacatcccatggattttggcaccatgaaagacaaaattgtagctaatgaatacaagtcagttacggaatttaaggtaagttactttcattgcccgaagtaatcgtggcatagttctgtgtattcatgtcttgtgaagacttcattcaccttagatcatttctagtttttgagctttcacaggtgtttctgtgttcggatgatgttttacagacacagcattaaggaaatgattggtcgtgaacgttttctctgtgctttggtctagaaactaggtcaggttgcacgctgttagaagtctgtttcttttctttctaagttactgcgctggcgtaaataggacatgttgtttcaagcagtgaggtgtccggtgtggcacggcttgagactagacatttttaaaaacatacttctttttaattcttagttttgtcttacactaattgagcatttagtttttttagcatagtaagtttttctgtctcctgagtactttgctcttagctctgtttcttgctactggctgtgagaattagcaactgctcattggttttgcaacccaggggaagaaagcaaaacaaatgcttgataaagttggcattagtgtagtttagaaaggcattagatttctctcttaggttccattcccctggggaaagcttgacttttctattttatgcttactgaagggtttgctgactcacagaaacacaacagaacagacttaaaggagagtgggagaaaaggaaactcgatgagaggatcaggcagcgcctgagggtagatgttaagagcactccatgcccgaaagccctctgtattccctgcttcgggccccagtctggccattcctagcaacaaagtgagaaggggagcagcattcactccgtggagtgtccgcagtggagtcttcaggggaggggctccacagcctcgggccgggccctagggctgctggctctggaaccgggacttggggagggtccagatggcacgttctcagttagggtggccggcctccggggtcatgctccagcctgacgttggtactcacctttgagaggcctgtgctgaggaaactggcctctcataataaaatactgatgcttccgtattttcaccataaattacaaaataaggttgtccttttgtggggcaaagtctttttctagtagtttgagggaaccatttggtgacagaattttaaattcgattctgtggagaaattctagagatagaggctatcactgtgccgcacgcctgccttcatcccttgacttgcacttgaaagaatcgggtcgttgcttctcgttcctgtttatgttctggagaaatgcaagaagcgcaggaaacgctttttcctcacacagcatttgtatgtgatgcttagaaagaagttacaggcttggccaactgtttgctgtaatatttttcatgcaagaccaatgtgcaactaagaaaacttctcttaagttcttaaacgttatgtttagatcagagagcccagttgaattgttttctactcgattgtagctttttccttttggtctcttggtagtcatctagagctttgctgttgtctgtggcatttcaaacctgataagtctttcctgttttcttttcaggcagatttcaagctgatgtgtgataatgcaatgacatacaataggccagataccgtgtactacaagttggcgaagaagatccttcacgcaggctttaagatgatgagcaaagtaagaaactcactggcagcagcgagctacggaaagcaggggctctgccccccgtcgcttgtgcccgaagggagcctcacagtgaacacgtgctccatccacccgccaccctcatggtgttgccccctttgctctagggtagacgtccccggccgccctctctgctcatgacctagctgtaacat

SEQ ID NO: 33224 - DNA, 2300 bp, Homo sapien
ggtccctcttaatccatcttcttgaacgagtaatgtgaacaacatcccacagggcctctggtgaggacaccgtggctcgaaagggacctgaagctccctgcggaggggaagggagaacaaggaggcagtgacatgccgccactgtggtcttcccttccgtctttccctgctggttggcagccccgctgtactccttagggaggcctttccctcttagcaccttcacgtctcacctggctgcgtggcgtttgcacctgagcacgcgggtagaactcggtctgtgtctgtgcagattatgccgacaagcccctggagaagcctctaaagctagtcctgaaggtcggaggaagtgaagtgactgaactctcaggatccggccacgactccagttactatgatgacaggtcagaccatgagcgagagaggcacaaagaaaagaaaaagaagaagaagaagaagtccgagaaggagaagcatctggacgatgaggaaagaaggaagcgaaaggtaaaggagcagcggcggtggcccggacgctgcccacgaggagcccgtggggagcctggtcccaggacccaggcagagtgcgcctgcgtggctggaggaggggagggggtgttccgttggtagcaaaacgcgaaccgctgaggcccgcagactcagttccaggatcctgggtgtgctgttcctcagcagaccctgccagggtctctgtgaggagggagcctggcatgaggaggatctcggagggggtttcccttagttctgtccctcccctgagaactgcgaggggattgggcagacctgtccggatcccgcctactcctgcctttctcactcccttgactctgccgcccaggaagagaagaagcggaagcgagagagggagcactgtgacacggagggagaggctgacgactttgatcctgggaagaaggtggaggtggagccgcccccagatcggccagtccgagcgtgccggacacagccaggcaagggtgcacttttagagactctcctggtgttcacagctcatcgttgtaaatgaggggtcggcaccgtgtcctgttgctttggggagaagcatgggagggaggagagctggtatttccagggcctcatcccaggtgtcctctggcctgaggtttcctccggtgtctctgaatgtctagagcaaggcgtggccagttaccactggtgcccttcagttttgttttttaacttgttagctaaggatggcttatatgttttttaagcgttcataaaaagaaacaaaaaggcatctccacagagaccaatcgtatgtgacccgcaaagcctagactgttttttgtctggcctttatgtaaaaagtttgccagccctgggtcttgaagtttggttttgtttgcacttaagacagtattggaacagtagccccatctgggtcagactggtaagagagatgcatgtcagtgaaaacgcaggtaattccccttgggaagaagggacctcgaggcccaaatggtgggtctgaagttgctgaaagtgaccataggctgagacaaaggaagctggaggcctttagtagaatctctgtcgtgggcaccatctgcgaaggatggcatttggctggaatttccagttgacaaggacttgccctctgagttctctttgtccccagccttcctgtgcacaactcacagtgatgaggcatttgtacctaagacaaggggtgtctcttcccagcaactctcagcatccagtggttcctggattatagggaaacagacggctgggctttgggacatgggacatcagggagtggggaggctagtgctgcgatcattcaggccgtcagaaactgtctgaggcctgctggctccactgaaggaaagttctggaaagctggtggccttctgagctcctgtggtcatttggctcttcaggcactttctttttttaatttatttttgaaacatggtcttgctgtgtcgcctaggctggagtgcagtgtcgtgattcactcctgggctcagataaccctgggctcaagcgatcctcccacctcagcctcccaagttgctgggactacaggcacgcaccaccacgccggccatttatttactttttgttgaattttaagggacctcaagtgaaataataatcggtgaattcaggatcaacctttatgtccagagcgtttgttccgtcgtccatttcttgtctagagtagtggtatgagctgaaaacattgctaagtgatcaccacatattgttgatgtaagggctaccggttattacaagagatttttatgact

SEQ ID NO: 33225 - DNA, 2300 bp, Homo sapien
gcaaactttttacataaaggccagacaaaaaacagtctaggctttgcgggtcacatacgattggtctctgtggagatgcctttttgtttctttttatgaacgcttaaaaaacatataagccatccttagctaacaagttaaaaaacaaaactgaagggcaccagtggtaactggccacgccttgctctagacattcagagacaccggaggaaacctcaggccagaggacacctgggatgaggccctggaaataccagctctcctccctcccatgcttctccccaaagcaacaggacacggtgccgacccctcatttacaacgatgagctgtgaacaccaggagagtctctaaaagtgcacccttgcctggctgtgtccggcacgctcggactggccgatctgggggcggctccacctccaccttcttcccaggatcaaagtcgtcagcctctccctccgtgtcacagtgctccctctctcgcttccgcttcttctcttcctgggcggcagagtcaagggagtgagaaaggcaggagtaggcgggatccggacaggtctgcccaatcccctcgcagttctcaggggagggacagaactaagggaaaccccctccgagatcctcctcatgccaggctccctcctcacagagaccctggcagggtctgctgaggaacagcacacccaggatcctggaactgagtctgcgggcctcagcggttcgcgttttgctaccaacggaacaccccctcccctcctccagccacgcaggcgcactctgcctgggtcctgggaccaggctccccacgggctcctcgtgggcagcgtccgggccaccgccgctgctcctttacctttcgcttccttctttcctcatcgtccagatgcttctccttctcggacttcttcttcttcttctttttcttttctttgtgcctctctcgctcatggtctgacctgtcatcatagtaactggagtcgtggccggatcctgagagttcagtcacttcacttcctccgaccttcaggactagctttagaggcttctccaggggcttgtcggcataatctgcacagacacagaccgagttctacccgcgtgctcaggtgcaaacgccacgcagccaggtgagacgtgaaggtgctaagagggaaaggcctccctaaggagtacagcggggctgccaaccagcagggaaagacggaagggaagaccacagtggcggcatgtcactgcctccttgttctcccttcccctccgcagggagcttcaggtccctttcgagccacggtgtcctcaccagaggccctgtgggatgttgttcacattactcgttcaagaagatggattaagagggacctggaaccccggagcccgatctccctcctagaaacccccagcacttcggttcaccctcgcctgacttcctgcaggcgcccgtgctgcccgctgacacccatggagctgctgcgggagcaagggagagggagggaaaggcgggagaaagggcagcccagcttctccctgagctccacacaaaagccagcacagatgcttccctagtctccaggaccggggtgagtgggcttgcagcctcgaacccagaaccctctaccaggaacgtaagcgcctacccaggacccctcacgtgtgcccggttccctgcccgaaatcccaggaccccctcccgcgtgcccagaacccctccctcgtggccaggacctcgcccggtgcccaggacccccgtccgcgtgcccggaactcctcccccgtgcccgggaccccgcccgccgcgcgtcacaaagcgccgccgcctcaccctcgtaggacgagcgccactcggccttgtgcttcttgtgcttcttgcccatggcggcgccggcggcgggcccgaggcgggggctgggaacagctggcacccggtcggaccttggccgccaccgccccctggccctggctggccgcccgcgctcgctgcgccgaggttgccgagctcgctgggccgcgccggaaacggggcgaggcggggccgcggcaggaagtggccctgccgggcccgagcgcttccgggtcaggaggtggtgcgcctcgcgcggcagattcgaagctagggcggggcccgcgggctgaggcagcggctgtggcggcgacgctgggcgtgaggtggcggcggccgcgccctggttgggtccccactgctctcgggggcgccatggacgaggccgtgggcgacctgaagcaggcgcttccctgtgtggccgagtcgccaacggtccacgtggaggtgcatcagcgcggcagc

SEQ ID NO: 33226 - DNA, 2300 bp, Homo sapien
caggggcagggtcagggccaggtccgtgagctgaggtcgggtcggggctcaatctgtgagctggggtcctgcgcgcagggctcgggtcggccgggtcagtgccctgcggtggggtcgcgtcattgcgctaggatccggtcggggcccggcggcctgtgcgcccgggtccagtcgggccggatcagtaccctggggttcggtcgcatcagaatcagtgcgctggggtcggggctcggtgcacgcgctggggtcggggcgggtgggtgcccagaggatgtgtcggacaggtccggctcacctgctgccgcgctgatgcacctccacgtggaccgttggcgactcggccacacagggaagcgcctgcttcaggtcgcccacggcctcgtccatggcgcccccgagagcagtggggacccaaccagggcgcggccgccgccacctcacgcccagcgtcgccgccacagccgctgcctcagcccgcgggccccgccctagcttcgaatctgccgcgcgaggcgcaccacctcctgacccggaagcgctcgggcccggcagggccacttcctgccgcggccccgcctcgccccgtttccggcgcggcccagcgagctcggcaacctcggcgcagcgagcgcgggcggccagccagggccagggggcggtggcggccaaggtccgaccgggtgccagctgttcccagcccccgcctcgggcccgccgccggcgccgccatgggcaagaagcacaagaagcacaaggccgagtggcgctcgtcctacgagggtgaggcggcggcgctttgtgacgcgcggcgggcggggtcccgggcacgggggaggagttccgggcacgcggacgggggtcctgggcaccgggcgaggtcctggccacgagggaggggttctgggcacgcgggagggggtcctgggatttcgggcagggaaccgggcacacgtgaggggtcctgggtaggcgcttacgttcctggtagagggttctgggttcgaggctgcaagcccactcaccccggtcctggagactagggaagcatctgtgctggcttttgtgtggagctcagggagaagctgggctgccctttctcccgcctttccctccctctcccttgctcccgcagcagctccatgggtgtcagcgggcagcacgggcgcctgcaggaagtcaggcgagggtgaaccgaagtgctgggggtttctaggagggagatcgggctccggggttccaggtccctcttaatccatcttcttgaacgagtaatgtgaacaacatcccacagggcctctggtgaggacaccgtggctcgaaagggacctgaagctccctgcggaggggaagggagaacaaggaggcagtgacatgccgccactgtggtcttcccttccgtctttccctgctggttggcagccccgctgtactccttagggaggcctttccctcttagcaccttcacgtctcacctggctgcgtggcgtttgcacctgagcacgcgggtagaactcggtctgtgtctgtgcagattatgccgacaagcccctggagaagcctctaaagctagtcctgaaggtcggaggaagtgaagtgactgaactctcaggatccggccacgactccagttactatgatgacaggtcagaccatgagcgagagaggcacaaagaaaagaaaaagaagaagaagaagaagtccgagaaggagaagcatctggacgatgaggaaagaaggaagcgaaaggtaaaggagcagcggcggtggcccggacgctgcccacgaggagcccgtggggagcctggtcccaggacccaggcagagtgcgcctgcgtggctggaggaggggagggggtgttccgttggtagcaaaacgcgaaccgctgaggcccgcagactcagttccaggatcctgggtgtgctgttcctcagcagaccctgccagggtctctgtgaggagggagcctggcatgaggaggatctcggagggggtttcccttagttctgtccctcccctgagaactgcgaggggattgggcagacctgtccggatcccgcctactcctgcctttctcactcccttgactctgccgcccaggaagagaagaagcggaagcgagagagggagcactgtgacacggagggagaggctgacgactttgatcctgggaagaaggtggaggtggagccgcccccagatcggccagtccgagcgtgccggacacagccaggcaagggtgcacttttagagactctcctggtgttcacagctcatcgttgtaaatgaggggtcggca

SEQ ID NO: 33227 - DNA, 2300 bp, Homo sapien
aggtgtttacacaggtgtcgccaggctgtgatggggctttgtgcaggtgtctctgggccctggtgcaattatgctgacgtgtctgaactccagcacctagaaaatacccagtcaacagctattctgttaaaggaaaggtctcttcctctgcatcccctctgaggctggtggtctcacctgacctcaatccaccctccgtggacataaggagggtctgtgaaggtctggccccgccgctgagttccccccactccagggagcagcacagcccacaggccccaccataccatgaactgacttggtcacaaatgagtgggatgtgctttgaaccctaaaaatttaacatcgagtccgtgaggaacgggaacaattaaagggtctgagaagcagtggctcaaagaataaccacccagctttcggctgagactagagctctctgtaatgcgcagccatcctattctccaacgtgggactcagggccacatcaatgcactggaggacagccggggcaggggcagggtcagggccaggtccgtgagctgaggtcgggtcggggctcaatctgtgagctggggtcctgcgcgcagggctcgggtcggccgggtcagtgccctgcggtggggtcgcgtcattgcgctaggatccggtcggggcccggcggcctgtgcgcccgggtccagtcgggccggatcagtaccctggggttcggtcgcatcagaatcagtgcgctggggtcggggctcggtgcacgcgctggggtcggggcgggtgggtgcccagaggatgtgtcggacaggtccggctcacctgctgccgcgctgatgcacctccacgtggaccgttggcgactcggccacacagggaagcgcctgcttcaggtcgcccacggcctcgtccatggcgcccccgagagcagtggggacccaaccagggcgcggccgccgccacctcacgcccagcgtcgccgccacagccgctgcctcagcccgcgggccccgccctagcttcgaatctgccgcgcgaggcgcaccacctcctgacccggaagcgctcgggcccggcagggccacttcctgccgcggccccgcctcgccccgtttccggcgcggcccagcgagctcggcaacctcggcgcagcgagcgcgggcggccagccagggccagggggcggtggcggccaaggtccgaccgggtgccagctgttcccagcccccgcctcgggcccgccgccggcgccgccatgggcaagaagcacaagaagcacaaggccgagtggcgctcgtcctacgagggtgaggcggcggcgctttgtgacgcgcggcgggcggggtcccgggcacgggggaggagttccgggcacgcggacgggggtcctgggcaccgggcgaggtcctggccacgagggaggggttctgggcacgcgggagggggtcctgggatttcgggcagggaaccgggcacacgtgaggggtcctgggtaggcgcttacgttcctggtagagggttctgggttcgaggctgcaagcccactcaccccggtcctggagactagggaagcatctgtgctggcttttgtgtggagctcagggagaagctgggctgccctttctcccgcctttccctccctctcccttgctcccgcagcagctccatgggtgtcagcgggcagcacgggcgcctgcaggaagtcaggcgagggtgaaccgaagtgctgggggtttctaggagggagatcgggctccggggttccaggtccctcttaatccatcttcttgaacgagtaatgtgaacaacatcccacagggcctctggtgaggacaccgtggctcgaaagggacctgaagctccctgcggaggggaagggagaacaaggaggcagtgacatgccgccactgtggtcttcccttccgtctttccctgctggttggcagccccgctgtactccttagggaggcctttccctcttagcaccttcacgtctcacctggctgcgtggcgtttgcacctgagcacgcgggtagaactcggtctgtgtctgtgcagattatgccgacaagcccctggagaagcctctaaagctagtcctgaaggtcggaggaagtgaagtgactgaactctcaggatccggccacgactccagttactatgatgacaggtcagaccatgagcgagagaggcacaaagaaaagaaaaagaagaagaagaagaagtccgagaaggagaagcatctggacgatgaggaaagaaggaagcgaaaggtaaaggagcagcggcggtggcccggacgctgcccacgagga

SEQ ID NO: 33228 - DNA, 2300 bp, Homo sapien
gtgggtcctctaccagctgtgccctgaagaagctgtgcctcagctcccagttagaaaaaggggacaacagtaagagttctcgctatgctgggctactgtgaagtcattaatacactcaaagtgtttaggacgatacctggcacatagtaagcacgcaataatgttggctttcactattactaatgaagttccacagctgtggggtcaggcctggggtctgcattgtaacaagtctccaatagccgtgattcgtgctgagaaaatctaatgctttcagcttggtatccagggcttcccttggtcccccttgctgcagtcctcctaacacctcccctttctacaacagtgacctggtcccggatcacacctctgtgccctgctatgcactgtcccagcttactggcctgatcaactgcagtcaccctctaagtcctattcaatgtctgcctccctctgagccctcctggacaggctcctcagagccaggcaggtgacatgtggcccctttgcaatcgtcccagcaccctacaagcagcgaccaccatgcatagtgcggttgtgtgcaggtgtctatgaactctggtgcagttgtacgtaggtgtctgtcctctaggtgcagctgtgctctggtgtgattatgcctagcgtctctgggcccaggtgtggttgtacatggggtgtctctaggctgcggtggcactgtgtacaggtgtctctgagcgctaaggtgtttacacaggtgtcgccaggctgtgatggggctttgtgcaggtgtctctgggccctggtgcaattatgctgacgtgtctgaactccagcacctagaaaatacccagtcaacagctattctgttaaaggaaaggtctcttcctctgcatcccctctgaggctggtggtctcacctgacctcaatccaccctccgtggacataaggagggtctgtgaaggtctggccccgccgctgagttccccccactccagggagcagcacagcccacaggccccaccataccatgaactgacttggtcacaaatgagtgggatgtgctttgaaccctaaaaatttaacatcgagtccgtgaggaacgggaacaattaaagggtctgagaagcagtggctcaaagaataaccacccagctttcggctgagactagagctctctgtaatgcgcagccatcctattctccaacgtgggactcagggccacatcaatgcactggaggacagccggggcaggggcagggtcagggccaggtccgtgagctgaggtcgggtcggggctcaatctgtgagctggggtcctgcgcgcagggctcgggtcggccgggtcagtgccctgcggtggggtcgcgtcattgcgctaggatccggtcggggcccggcggcctgtgcgcccgggtccagtcgggccggatcagtaccctggggttcggtcgcatcagaatcagtgcgctggggtcggggctcggtgcacgcgctggggtcggggcgggtgggtgcccagaggatgtgtcggacaggtccggctcacctgctgccgcgctgatgcacctccacgtggaccgttggcgactcggccacacagggaagcgcctgcttcaggtcgcccacggcctcgtccatggcgcccccgagagcagtggggacccaaccagggcgcggccgccgccacctcacgcccagcgtcgccgccacagccgctgcctcagcccgcgggccccgccctagcttcgaatctgccgcgcgaggcgcaccacctcctgacccggaagcgctcgggcccggcagggccacttcctgccgcggccccgcctcgccccgtttccggcgcggcccagcgagctcggcaacctcggcgcagcgagcgcgggcggccagccagggccagggggcggtggcggccaaggtccgaccgggtgccagctgttcccagcccccgcctcgggcccgccgccggcgccgccatgggcaagaagcacaagaagcacaaggccgagtggcgctcgtcctacgagggtgaggcggcggcgctttgtgacgcgcggcgggcggggtcccgggcacgggggaggagttccgggcacgcggacgggggtcctgggcaccgggcgaggtcctggccacgagggaggggttctgggcacgcgggagggggtcctgggatttcgggcagggaaccgggcacacgtgaggggtcctgggtaggcgcttacgttcctggtagagggttctgggttcgaggctgcaagcccactcaccccggtcctggagactagggaagcatctgtgctggcttttg

SEQ ID NO: 33229 - DNA, 2300 bp, Homo sapien
tttctggtcaaaaaaggttcatcaaactcagtccatgtgtaatcaccaaacacaatattatgtctgttgagtagctttctaacactcaggtttatgtcttctttctttgcagtgctaaaaaaagaagccaaaacacacataaatgatcttagttcaaaaacaaaatgttaaaatgaagtgttttgaaaaactcagacaatacataagaaagcccagtagttaacagggtaagttggagttggcctgcctgggaccaaatctagagccaccccttgcctgtgggtcctctaccagctgtgccctgaagaagctgtgcctcagctcccagttagaaaaaggggacaacagtaagagttctcgctatgctgggctactgtgaagtcattaatacactcaaagtgtttaggacgatacctggcacatagtaagcacgcaataatgttggctttcactattactaatgaagttccacagctgtggggtcaggcctggggtctgcattgtaacaagtctccaatagccgtgattcgtgctgagaaaatctaatgctttcagcttggtatccagggcttcccttggtcccccttgctgcagtcctcctaacacctcccctttctacaacagtgacctggtcccggatcacacctctgtgccctgctatgcactgtcccagcttactggcctgatcaactgcagtcaccctctaagtcctattcaatgtctgcctccctctgagccctcctggacaggctcctcagagccaggcaggtgacatgtggcccctttgcaatcgtcccagcaccctacaagcagcgaccaccatgcatagtgcggttgtgtgcaggtgtctatgaactctggtgcagttgtacgtaggtgtctgtcctctaggtgcagctgtgctctggtgtgattatgcctagcgtctctgggcccaggtgtggttgtacatggggtgtctctaggctgcggtggcactgtgtacaggtgtctctgagcgctaaggtgtttacacaggtgtcgccaggctgtgatggggctttgtgcaggtgtctctgggccctggtgcaattatgctgacgtgtctgaactccagcacctagaaaatacccagtcaacagctattctgttaaaggaaaggtctcttcctctgcatcccctctgaggctggtggtctcacctgacctcaatccaccctccgtggacataaggagggtctgtgaaggtctggccccgccgctgagttccccccactccagggagcagcacagcccacaggccccaccataccatgaactgacttggtcacaaatgagtgggatgtgctttgaaccctaaaaatttaacatcgagtccgtgaggaacgggaacaattaaagggtctgagaagcagtggctcaaagaataaccacccagctttcggctgagactagagctctctgtaatgcgcagccatcctattctccaacgtgggactcagggccacatcaatgcactggaggacagccggggcaggggcagggtcagggccaggtccgtgagctgaggtcgggtcggggctcaatctgtgagctggggtcctgcgcgcagggctcgggtcggccgggtcagtgccctgcggtggggtcgcgtcattgcgctaggatccggtcggggcccggcggcctgtgcgcccgggtccagtcgggccggatcagtaccctggggttcggtcgcatcagaatcagtgcgctggggtcggggctcggtgcacgcgctggggtcggggcgggtgggtgcccagaggatgtgtcggacaggtccggctcacctgctgccgcgctgatgcacctccacgtggaccgttggcgactcggccacacagggaagcgcctgcttcaggtcgcccacggcctcgtccatggcgcccccgagagcagtggggacccaaccagggcgcggccgccgccacctcacgcccagcgtcgccgccacagccgctgcctcagcccgcgggccccgccctagcttcgaatctgccgcgcgaggcgcaccacctcctgacccggaagcgctcgggcccggcagggccacttcctgccgcggccccgcctcgccccgtttccggcgcggcccagcgagctcggcaacctcggcgcagcgagcgcgggcggccagccagggccagggggcggtggcggccaaggtccgaccgggtgccagctgttcccagcccccgcctcgggcccgccgccggcgccgccatgggcaagaagcacaagaagcacaaggccgagtggcgctcgtcctacgagggtgag

SEQ ID NO: 33230 - DNA, 2300 bp, Homo sapien
cttgagtctctgcaaccatggacacaggtggcagcaatgtacttggattccgacgaagggggtgcccatggctgaggcaggactgggttcacagccatccaagttagcatctgggagagttggctcatgctccagagagcctcctcccttcaagtcttggtgacttgtcaggggatttttagcacgaggtggttgcctcaccaagggagcagcattcttgggccttgtaaactgtctggacaccgcaaagcattgatgcctccctggacagcatgggcctggctctgccaacacatccgtcatcctactacacacttccagcaaacagggatgatgcttttcatccaaggtcaaggttggtggggaagggctctgtcttggcccatgggcctgcaggtctgtctctgagttgggacagctgctggaaggccccactaaactaatgtaagatactcggaaagtttgtcaccaggggaagaaagcattctggactgcatcattggtgtcagattccactgtgtgtttagaaggcacagtttgtttccgagagtctcaaaatgtaagcagcaaacaccctgccaagctgcagacatagggcagatacagagaggggtgaagaactggagcaactgaaggcacttcccatggatgctgcggggagaggacctcttcctgggagctgagggccaggatccccctgaggccctctctggtcaaatgaaaatggttcctgtcttatatattaggtgaaagtttggatctctgttctgtaaactggccaggactgcacaacaacctcccagtggcccatggagtggcaccctcacggggtgaagccgcccccagcaccagtgcagccaaagctccggctccttgggtgagctggagaggaggaggcacttcagcaggggctgggggtgctgtgtgatttgcctgagaagctgcttctgttaacgaagtcctgtgcctggtgggaactcgggtcggccatgaggaggatgcacccatgtcctcacgcctgtggctgggtctcctcctcatcttgtggcagcgccagacattccagaacatgggttcaggaaacttggactgggtctgaaccagcaggaagcatgccaagaaacctcctcccaccgtcctgctcttctctccctccctccctcttccctccctcccccgtccctcactcttccccttctcccccgtcccccttttcctctttctctctgatcaccagtcttctgagttatcacaaccaagtgagactgactcaagctattattgaaaatatggccacatcgaatgtttttctgataaaaagaagaacataagtaattggggcagggggtgaggtgaggacctggcggatgccttggaggcaacacgagggtggatttgcttgggcagagctaagccagtgaggccatctccactcaggcccgatggagtggagggcactgccttgatccagtggagcccgtggactgtgccttttcccagacctgatgcctctcccacccctgcccctgttgccccagagccaggtgagggcagatggcccagggccacctcagacccccactgggagagcagccaaagccatgcccagtaccagtagcagtgcctcatgttctgaagatctgccttgtggataaaaatgcctcatccattcttaccgctatggaatattcacttatagacatttatcactttttccaggttatagttttgtgaaataaaatgtttattattttttgttatgaaagtgctgtatgatcattgtaaaaaaattagaaaaatgtggaaaaatgtgaagagaaaaataaaaattccctcccccccccacagattcccatctcccaagataatcacctaattatctgcagttttgtttcctacttattttactgaaaatcatttcatgctcatttctttatatgttgtcaactgaagattcatgagattcataaacatggaagggagagctttatttctctaaagagttgcagcctgcaagtaaccatccacaggctgggaggtgtggcctccaccctaaaccggaagcaggcactttgagggtggggaggatgagacaggaatgtgctgaccgtggtggctgagaggctacaggaggcactgtgagtactctacaagggtgaggggcacgcatgcacagtgagctcacatgtgtgttacatgtgtcctgtgttcactttggggtggagacttcacatttaagtgcattgaaatgaggctctgtaggtcaaaaggtgaaatgaaggacacagaggcatcctgtg

SEQ ID NO: 33231 - DNA, 2300 bp, Homo sapien
gccgagacgggggtggggggaggaatcactggaggtcaggagttcgagaccagcctgggcaacatggcaaaaccccatctctactaaaaacaaaaattaaccaggcgtggtggtatgcatctctaatcccagctactcgggaggctgaggcaggagaatcacttgaacccgggaggtggaggttgcagtgagctgagatcacgccactgcactccagcctgagcaacacagtgagactccgtctccaaaaaaaaaaaaaaaaaaaaaaaaaaatcacgcatacgggactcctggaaggcagcttctcaccgtcactgccgtctgccctgctacatgtgacggctgtgtttcacatgttcaccggtgtgtacgcccgggtgtgcttcgaactgagaagccaggagcccagggcttctctgctgcccacgaatcatgccttctacttgccctcgctgcccagcttgcaaggcccttttactgaacttactttgattgcaataaaaaccagtaaaacccaaaaaacaagtgcatacaaaagtatgcccagaacacctttggaaaaccattttctgacttgggtgggttttttccttctaggtctctaatcacaaattgcctgaaagatttgcacaaatatttacctgaaactggaagaggtgtttcctcaaccatgaatcgtggccagttgtgggtccctttgaggcaatttccctggagaagtgcatggttattaaatttaatagtcggtgcagatgattcatcttttgaaggcgctcagaatgatggctgaggataaatgtagaattagccttctaagtatccagtggtctggcaacgttccaagtatgccaggaaacaggtaggcgtgcttcagatccacctccctttcaatagttttaacagtccatgtaccagaggtgatatcacaaccaacctgtaattcagaataagcctcgtgtggcaacatggttggggggggtgcggggagcaggcgaaatgcaaggcacttgggtgtggcagccacgtgaacttcttgttcatgcctaagaaggcatgttcatgccaaagcgtgtgtctgcagggaaacccggtgcacttgggaggcacagccaaggcttcaggggtcagcatggctggcggacgctgcacagccaaggagaggtggactcaaacaagggcggcctcgggggcggtgtgcaggcgacacccaggggatcttgtgcacttaaaaacgtagggatccatttgcaaagcgaagagcacgcaaggggagcacacatccagacccggagtcgccatcctccctcgtggggccaatccgccagggccaacgcggcatgggcagggaggggaaatgtcccggcaggctccgtgtgacgcgtcacagtagcgttttgtccgatgtcaggcagtgcttttcttagacgtccccagggctccggtggagaccaacccgtgtgtgaatttcagtcttgccggctacttcgggtcgcgaggctcacggctttgctcgcactatggggaaaaagccgggcactgaaggggacgtgggtgtgtgtgtgtgtgtgtgtgtgtgtgtgtgtgtgtgtgtgccggctccgcgcatgcgcctatttcaactccagccacagcctggggccaagacagtgtcttcaaaagaggcccctgaccccggggtcagagttggctacaccatgccttccaggcacgccacaccgtgaggtcacaccgcggacgcccctcacacaggggacgcccctcacacagcggatgcccctcatgccacggaggcctccgcacacagggacgcccctcactccgcggacgcctctcacacagggacgcccctcacacagggacgcccctcacgccgcggacaccccctcacacagcggacatgcctcgacgccccttcacatggcggacgccccctcacacggcggaccccgacctcgccgctttctaaacgggaggggaggagccgtggccaccgtgacaaccacaaaacaggatgagccccgcctcccagaacgcggagtcgcggtggaagagggtgacgccgccgagagttcacgagcgtgtcccaagccgagtgaggagcgcgcgggggcgctcttgctcccaaggccgcacgagcgccaaggcctcgcggggagaatagccacggggggagacggggcccgcgctgcccccacgaacgctgttggtggggaccccacggctgcgcccgctgaggtggaggggccgggaggacagagccccgcgcccgccgccgcccgcttctgaccctgccggtcccg

SEQ ID NO: 33232 - DNA, 2300 bp, Homo sapien
acatctgcatttagcaaggaccagagctcagtcagcagaggagtgaaacacaatggcccttccccacctggctggggcacctcagccaacctcccccagtgggaccttctcggggtcttgggaggagggcccatgcatgtgtgaggcaaggctcccagccacacaggggacacgagcccaccagcagatcttcacccagggtggctcatcggtcctcatgtaagggcaggatttagaggcacgggaagggctgcaatcctcaggctgtgctactttgcataacatgtaacactatcatcctcacacactcactaggaccctgagaccacagaagatggcattgttaccttccaaattgggagttaaagtccacttggggtagcgcaagggagagaggaggggccgaaagagcctgggagggtggccctggccctgaatctggacgcctggacgctatacacaagggcgctctgagcccatcgcaggcacggcctggccgggtgcaaccctgctaccaggtgccagagctgtctgcctgcaggaagtggcccctccactagggttcttcagaggatggtgggaatggctcgcaggcaagactactcccaggagggtccgtgtgcccttgttcatgtgctcgcccacagctcatgtatctgcggacagccagcaggggaggctgctggggtggggggcgggcctctggtttaactttccgttttgccactgagcagcctaggcctctgtaaaatcgtgtgatggcggcatctgccccgaggatggtctgagaatgggaggcagtaattggagtgaaagggcttggctggacgtcagctccagaggtgcaagtcagcactgggcagccgcggagctgcgctgctcagctgtgagacagggctccagccaggggagtgggaacagagagaccgggtgggacctgggccagcttagcggaggcctggcagggccggagctgggcaggtgaggggtcccgcaccgccagcctcggagctccaactccagggacgggagctgccctggcagaaggtggggtcacccactgaggttggagacgtgggcgtggcaacagcccgtggggaaaatgctgagctagctcttgaaaggctggggagatacaatgtatcaatgcaacagggcgtggcagggaggagagtcatgggtagggaagggagaaatgtcccagaaacaggagcaagttagggttccaggaggaagtgagggaagaaggttcctctgaaggtaaataaggaagagagccctgaggtacccagcagggtaggaggcagagagggggtccagtgaagggtactgagggacgggtctccagagccagctggaggagcttgagatgaggccagggaggtagcagctgaagccactgagttggacacgtggaggaggcagcgcaggtggccaggcttggggctcctgggaggctccaacaccctcaaggcacaggtcggaggagaccctgctcaaaccaaggacaaagtgagggggtgcagggcccttccagccggggccggggggggccaacgctggttcttcatcaatttggagcgccaggagagggcggggatctagtcctgccggataccacccccctttgggctgcccacacccccaccccctctccagcagccaagggaggcgggtcctccctttcaaagggaggtgccctcaggctcctctggaattggggatcccttgacccaggacggcctggtgaggggtcggagctgactcccgccaggctccgctgcagcacctgaccgcccccacaggtggccgggccgggtcctcatcgctggtggggctccaggctgggaacgggggtcgaggccgatgcgctgcgggcagcggccgccgggggcgctgcgggggccgcggttaaagccccggcgcgggcgcacgcgctcagagggagccgggccgccgtcgctgccgccgctgtccccgcgccctgcgcccggtggccccccacctccgccccgcggccgtacctggcgccccctggctcccccggcccccgcgcggcgtggagccatcttccctcacctcctaccggcaccctagcttgctcccggcccatgcggcccccgcgggctcccggccccggcttcagaactcagccctgcacctgagcgcggggcccggcggggcgtggcggcggcgatggggaaactgcagtcgaagcacggtgagccgcgggccggtagggcgggagggcgggcgggcgggcgtggggccgcctctcactgtcgttttcctctccccgc

SEQ ID NO: 33233 - DNA, 2300 bp, Homo sapien
gcctttccgggaggaccagtgtcccctacagggtgagtgcagctcccgcagccctccctccccaaactcacagacttcatcccgtaccaaggcaacgccgaaaaccacccttaaaacaaccccgtgtgcggagcgagggcacttcccaggcttagacgcactttgttcttaaaaagccttggcagcacaactcacagggtcctcgctggactggcagctgcgatctggcagcagagaccaaaaaggcctgtcccatgggcagagccctaagcgttacctttatgtgtttggagtctctgtgagcctgtgtttgtggatgggggtggctctgtataaaggggacctgtgaattttcaagttagccctgggctggaggatgtgtgagatgctggcccagcctaagtcactgccacgcgtgtatgcctcagtggcaccagtcctacctgtggcgcgtggcaggtcagcacttggcttacctgtgggtctgtgggagggtgctgggaggccagcaagcagggccaccttcggatggctgctgaagccaagagaggcacccacaccccctcagtgggaaggcaggcccagagcatcgtcccagctcaggctcgacgtgcacctgtctgcaggtgctgagcccggacagtcccacactcctatcctggggacgcagcttgcaagtgctggagaataacggaataattgtgctccagaaaccagaggactgttcatccatcctgcccagaggctgcggggagggggccgcctgttgacacactcagtgcacaggtggcctgtgtggcctgtgggctcagtgctaggattctggagtggagggccggagggactgtgtctatggggagggggcccaatgatgacacagggagcatctcctggaggcccaggctatgttcccctatctgtgctcctcggagtctgctgcacccccagctctgaggtggtggttgcagttgggggccaccgtgggctggtgagaggagggcacacccggctgtggctggccgggatagggcctccctcccctccgcaggggtcccaagatcgggctctcagctcaggcccgtctggacaggatcatggtgtggtgaggggagagcagcgagggtccccaatggcgggccacatcctccatgtgccctctgccagccccttcgcctcctcttgtccccctagtggcactccccgctgagaaagctgagggccgcgagcacccgggacaactcctcagcgcagatgacggagagagggcagcaaaccgcgagggcccgcgaggaccgggcgggcagcgcctcaacattgacgtgggtctctctccggcctcacttgcgggaacacgtccctggggccgggggctcagggacaggcatgtgttgccctaaactgggcatctgtggacacggcgtagttcactcagtcttccccacagttcaccccgtttaaggcattgaagcagaacttgaatgtgcaagccaaagtcagcaggagccagagagtgcaggatgttgctgtgaatttggccaaaactgactggtctggcatcaaataacttgagccgcattcccagccttggtgcccttggcactacaggagtaatgccaaagctgacttgacggacagcccgactctctgcccgctggaggcagggcacagggcttccgtttcccgggagggctcagggaggactggggtctccgtgtccagtcaagatttctggaattgacaacacttgacggccagtgtgtcctcttctccttctgggtgacgtggagtgcttgcatgagctgagataggtgtcactgtgggggaaccgaatcacagggcacaaagctgggtccccccaagaagggctggagctgggcaagaaggggtctgctggttcagggcttgagctccagccacgctgccctctaggctccgcctttcctagctggcatgagggacccctgggaaaggccccagaagatccttccccctgtggagttgggcgtgttggcgtgggtaggaggcgaggtcccggcccccacgtccccccacaggcactccagtgcgatgtctcggtggaggaggacgaccgccaggagtggacgttcacgctctatgactttgacaactgcgggaaggtcaccagggaggtaggtgagcttgtgtttgcgtcaggtccacagtagtagacagacggggcagacagactgtgctggcctcgcgatacctcagggggcaggaggggacctgcctgctgcgaggtcctcatgccagctgggcttgcgtctccccagggccca

SEQ ID NO: 33234 - DNA, 2300 bp, Homo sapien
gtggcctgtgggctcagtgctaggattctggagtggagggccggagggactgtgtctatggggagggggcccaatgatgacacagggagcatctcctggaggcccaggctatgttcccctatctgtgctcctcggagtctgctgcacccccagctctgaggtggtggttgcagttgggggccaccgtgggctggtgagaggagggcacacccggctgtggctggccgggatagggcctccctcccctccgcaggggtcccaagatcgggctctcagctcaggcccgtctggacaggatcatggtgtggtgaggggagagcagcgagggtccccaatggcgggccacatcctccatgtgccctctgccagccccttcgcctcctcttgtccccctagtggcactccccgctgagaaagctgagggccgcgagcacccgggacaactcctcagcgcagatgacggagagagggcagcaaaccgcgagggcccgcgaggaccgggcgggcagcgcctcaacattgacgtgggtctctctccggcctcacttgcgggaacacgtccctggggccgggggctcagggacaggcatgtgttgccctaaactgggcatctgtggacacggcgtagttcactcagtcttccccacagttcaccccgtttaaggcattgaagcagaacttgaatgtgcaagccaaagtcagcaggagccagagagtgcaggatgttgctgtgaatttggccaaaactgactggtctggcatcaaataacttgagccgcattcccagccttggtgcccttggcactacaggagtaatgccaaagctgacttgacggacagcccgactctctgcccgctggaggcagggcacagggcttccgtttcccgggagggctcagggaggactggggtctccgtgtccagtcaagatttctggaattgacaacacttgacggccagtgtgtcctcttctccttctgggtgacgtggagtgcttgcatgagctgagataggtgtcactgtgggggaaccgaatcacagggcacaaagctgggtccccccaagaagggctggagctgggcaagaaggggtctgctggttcagggcttgagctccagccacgctgccctctaggctccgcctttcctagctggcatgagggacccctgggaaaggccccagaagatccttccccctgtggagttgggcgtgttggcgtgggtaggaggcgaggtcccggcccccacgtccccccacaggcactccagtgcgatgtctcggtggaggaggacgaccgccaggagtggacgttcacgctctatgactttgacaactgcgggaaggtcaccagggaggtaggtgagcttgtgtttgcgtcaggtccacagtagtagacagacggggcagacagactgtgctggcctcgcgatacctcagggggcaggaggggacctgcctgctgcgaggtcctcatgccagctgggcttgcgtctccccagggcccagttcacgtgtgtttctgggccgagcctgcgccgcccatttctgcggctgtgcttcccacactgcaaggctgccctcagggcactggaggcgctcacagggccacctgggcagacccaggctgctccgagaagatgcctgtgttggttcctgtggtctgttggtggatgcaaggatggcataggaaggggcgggggctggatgtgttttctggcagggagggcgggtggtgtcccctggggtctgctctgtcagtgaaactgatgccgggccccaggacatgtccagcctcatgcacaccatctatgaggtcgtggatgcctcggtcaaccactcctcgggcagcagcaagaccctccgtgtgaagctaaccgtcagccctgagccctccagcaagaggaaggagggtcctcctgctggccagggtgagtgaggcctgggcacacacagaggaccctacccaacattggcaggggcctaagctgtgtgcgcgggacagggagggacaagtgagtggatggaggagtgagtgggtgaatggatgggtgagtgagtgaatgagtaagtgggtgagtgagtgagagagtaagtgggtgagtaagcagattaatgaatgaatgaacaagtgagtgagttaatgaatgagtgaacaagtgagttaatgaatgaatgagttaatgaatgagtgagtgttaatgaatgagtgagttaatgagtgaacgagtgagttaatgaatgagtgaacgagtgagttaatgaatgagtgaacaagtgagtgagttaatgaatgagtgaac

SEQ ID NO: 33235 - DNA, 2300 bp, Homo sapien
tgccatgccctccatgcctgctgcaccccagtcctgtcctggtcttgagggagctgagcagcactgtctcacgtctccgtcccttcccttgaatctgggcagaacagaggttgccccccgccggcgtggtcagaccctgtgtgtgtccaggacgtccagccggggtgggccgagctctctgggcagcagtcacattcctcttagcagaaggtgtttcttttgagtgcggacatgcggatgccccgggtcctgaagttgctttactctaaggctcccgggtggttcctgggaaacgttcaggcccctggctgtccatggcctgtgcgctgacccccgcgggctccgtccctcgcctgtgcgctgacccccgcgggctccgtccctcgcctgtgcgctgacccccgcgggctccgtcccttgcctgtgcgctgacccccgcgggctccgtccagcacggatgcgtcccgatggccccggcacctgttgggaggaggcccctgtgtggcgctgggggcttgcgggagggacgggcactggggagttgtgtccggggacggcctcccgaccggccttgttcccacagacgtacatctccccgggtgcggccatcttccaggcggaggctgcaggtggcgaggcggccgccatgctgcacaacatgcgtgtgtacggcacgtgcacgctcgtgctcatggccctggtggtcttcgtgggcgtcaagtatgtcaacaagctggcgctggtcttcctggcctgcgtcgtgctgtccatcctggccatctatgccggcgtcatcaagtctgccttcgaccccccggacatcccgtgagtctcggggcctctgagccgtgggtgggtgtggggctggggccaggtcccatgggctctgcccgcctctcgtccatcatccttgacgccgagctccccgcaaggggtgggctgggtgtgaccgtggcgggaacccccgtgggctcgttctggggattacaggaaacccaacggtgaggtgggccgaggtaccctcgtggccgggtctgagcatgaagaccctcctcagtggcaggagggctggtgaggggtctggcaggtttcaggggtggccggtggccctgagcacggtcaggtgcagtgagcgtcatgggtgtggccctggctgctgctggggcctgggtgtcttctccctcccagaggtgcttggaggggctcttttcttgtccttttggaggagcagctgggaggcggcccagggtcctggaacatgggagtggccaccagagcccgcagggagcaggtccagaaagggccagcagccaagccccttgaggctcccgcggttttgccgtctctgcgtggagggagcccctgaaggaacagcctcatagaggcctcaaaacagagggaggcagaacagctgcaaccccacaagcccgttttagggaagcacagctgccctccccctcggggacccgtcctgagaccccctgccgatgcttgacgctacggccctgtgtagactgttttccacgtacaggcctggcttatacgtcgggggcggcactcctgtgctcttggccgttggcacgtggcacgagggtggcttgaactcagacactgagattgtgacagctgacccggccaggacgccgccgagggcctcggggagggagcggctgcagcgtggctgtgctggcgcggggggaggttgctgggttccacctcactactcggcaccgcgcggtggaaaacgtgtgaattgtttacgtctagaacgcttcatttagcacgtttggaccacgggtggccgaaccatggatgaggggacggctgtacagtacagcgttcctgctgcagcctggcctggtccccggtccctggtccccagtccccggtccccagtgtgatccctggcccttgcattcctgctgcagcctggcctgggcccggtccctggcgtgatctgtggccttcctgtcttgggaggtgcagggtgccaggagccactcgcgggcgacaccatgggtgcccgttgggggagctgggtggggcagtaaaagccacttcggtggcagcacacgtgccgtgcctccctgtcccgcccagggtctgcctcctggggaaccgcacgctgtcacggcgcagcttcgatgcctgcgtcaaggcctacggcatccacaacaactcagccacctccgcgctctggggcctcttctgcaacggctcccagcccagcgccgcctgtgacgagtacttcatccagaacaacgtcaccgaaatccagggcatcccgggcgcggccagtg

SEQ ID NO: 33236 - DNA, 2300 bp, Homo sapien
ctcctgggcctcagtttcctcctctgtaaaatgaagctgatgagtcctgagtccgggagctggccctggccacagaccctccaaaccagctcctctgaaggtccacagccagcacatggcgggcagccggccctggggtcctggggtgtgaagcagagcttggatgtgcgacgggagccctgcacatctgttgctcctgctggcatcacttgggaaggcctcgtgcccaccctgagctctgtccaaccctcgggaatagcgctgggtggcaaccagggttgaatgtacagaagcccctgctggggtgactgaggagagggtttacccagcaccctaagtgtgaaccctataattgaccccattgggcacttctgttcccaccccctggatctttttagcaaagccagccctcctcataaggatgcctgggaactattttatcttctggggaggtgatggtttcctaccttccaacccactgacccagggaggcagctgacctagcaccatccacagccctgagctccctttggtgggaggtggggtgagagtgtggagcaggcacagctccagacacccaggccagaggaacccccacctctgcaagggctggtgctggatgggcgacgttccaggagggtcccaggcctacagcttctgcccagaagagtccatggggcaaaggggtagaaccctaggccaccccagggcatgactggctttactggaaatggctggagaggttgggcttgcgttccttgaacccacagagcccggtgatcccacagcccggaggccatcactcccctccagctgccttttaggattagacaggcaagcggctaaaacatggccaggccatacccattttccacgtgacaagaggctgtggccgtgtttgcccacaccacctgtgtttctgctttgttgtcgtacagcagttgtgggtgattaggaataaaggctgactcattgcacctgtgtgccatagcattttagcccaattccccattgacggacatctgattgttccgtttttcatgagtcatttgttgagaaatgtgccaggtgctggccggtggtatcctggtgtctgcctggtgggttctggaactccaccttccctgcatcaccctgtgagcttctggaacatttcccaaggagggaagggagggttctagggcaggggccgcggggcactcctggggcaggtgtggaggagactggggtcttcgtgggtggtatttgtcatgggtggggggggggactccctctactgggttaggtccctaaactggagctggaccaagctccggagtaccccacccccaggctatccaaggctccttccactggagttgcctttgcagccaggttgggctagccaggagccaggctaggagcccagggtctgagcgggtgttgacagcctggagtgggtgggcggactgtgtgggaggtgggtgctggaggatggcaggggggaacaggagggggaagaaggaggggtagggggctggagcaggaaatggggggcaaacaggagggggtgcgggagggggcgcagaaggaggaggggcccagcaggagggggtgcagaaagggcaggggttccagcaggagggggttcataggggcaggggggcccagcaggagggggtgcaggaagggtgggggggtgcaggaggggtgaggggttccagcagaagggcgtgcaggaggggcagggggctggagcaggagtggggggtcggggaaggggacaagaggggaggcggggagggggccggggagggcggggagggcggggagttccagcaggaggggcagggggctggagcaggagggggtgcaggagactgagcggggattcgcgggctctgcgatggtcgggagcgcaggcagcgaaagccccgcgtcccgggtcgcggcggtcagacagacgcagcctgggttggggtccctgcaggaagtcgccgcgggccaacttttcgtggggccgcggggcaagcaggtgaagtcacgtggcccgggcggggcggggcggctcggtcggaccccgcccctgcctccaagtcccgtggcgtcggcgggagcggcgcagcgcgggccgggccgggacggggactgtcggctgcaggcggccatgcccaccaacttcaccgtggtgcccgtggaggctcacgccgacggcggcggggacgagactgccgagcggacggaggctccgggcacccccgagggccccgagcccgagcgccccagcccgggtgagcgcggccgcacctggccggacaaag

SEQ ID NO: 33237 - DNA, 2300 bp, Homo sapien
gagcatggctatgaggcccccaccccacaggggacccagaggcacaggctccaggctccagcgggaagggccctgctccccacccccatcccccgcctcaggcttcactgagatgggccccggggaccccgggagctttctgtgactgctcggcaatgggttccccaaggcctggcacaggctttccttagagccaggctgtggacccaaagccttgggccaagtctcaggaccagatgggcggctctggagaggaccccacagtccagggtgaggcgcgccccgctgggggcagcgctgcctgtggagaggaccccacagtccagggtgaggcgcgccccgctgggggcagcactgcccgtggccgtctccatccatctcaccctgacgcaaggccggcttcctctgcgtccagtggtcggggccttggagaggccagcagggcccgtgggggtcgcgtttcttccctgtggcatcagctcttttcccagcaggcctctttgcagctggatgcagcagccaagccctggagtctttggaaaactgtggcctggcgggggcccaggcaatgccaccttacaggggacacccacacaggcggtcccgaggaggggtgtgctgccgccctgagctcagccaggcatcaccgtggtgtcaccgtcagctcgggtggcacctcccgggctgccctctcggctgccacttctcatgaaactgacagggactgaacacgaatgatgtggcttatagctgggtgcccccaccctgaccacaggtgccacgcgacgggagccacattctcttcctgattctaactccacgggtacagagacagaagctgccatctttagaaataaaacttttttctaactacaaaataatacagtttaatataggaaatgtggaaaatggggtattcggggtggatattgagaagagagaagcaacaccaattctatgtgcgagacgctggcacttcccagcgtagccttgtgttcctgaccctggggtggcctgagcgtggcctgtggggcccgtgtccaggtgcggagggggccctgagtcgtgcggggcaagtggtcagggccccaggcccaggctgcctggagcgagatgactgggcctggcccctggggacttgctctgacaaaaccccccggtccccactcctgagcccctgcaggagcagccctgggaacatggggagcagctccttctgcctatgtgctccggactcaggaactctggagagaagaaacacaaccccacaggccccgcctgcctctcctgcagtcttgaggccccagggaaagcccccactgcaggcagggggtgggtgcccgagcgagggtgtggggtgagcagggtcctgggcatgtcagggctgcgtgggactccagcgggccgggtgcctctcgccctgcaggacgtggctggcctggtctgcccccagctgagcctcacctgagggagagctggggtgggccgcctcgtttacgaccgtgtagtcgtcttttgcacacaaagccatgtgagtccgtacgtgagtcctgtggaaagacaagacatggaataggagtgacgtccgtccccaggcatgaagtggagagcatcacgctgtgtgagttaaacactggccaagcacggtgtgagtcggagccggggacctggccagatgagggctgcgtgcagctttcacaccccaggcacgtgagcaccgccaagcccagcctcagccagcagctgctctgcaatgtggagtcaccagtggccccaaggatggcaggtgggggtggccttgggactgaattaggccgacacccaaggcctctgttccttcccgtcccttctctcccttcggaggatcaaatgagagtttctaggaaagaaaacatggccaggccctcctccagcgcccaggcagggctcgagcggacgcccgtgtgacccccacatcccttctacccctgtagctctctgactctgatatcccagtgggaggaacgaggaggggacgggtgaggaggaggaagaggaggagacatgagggttaggaggagcacatcctgagtttgtgaggcttcactgacctctggcctcacaaacacacacaggcctgagctccggatatttctcctgttctggagacagtgagaagtgaaagagaaatggctgcccctgcaccacttaccgcgaaggaggctcaaggctggggggcccctctgccttccagtgaccgcccgtgtcacatcctgacccgctcagcaggtgagctgcaggctgccaatgcactggtgcta

SEQ ID NO: 33238 - DNA, 2300 bp, Homo sapien
tgcctgctcccctcacaatgcctgttcccaaggaaatagtttcttttttttttttgagatggagtctcgcactgtcacctgggctggagtgcagtggcgtgatctcggctcacttcaacctccgcctcctgggttcaggcgattctcctgcctcagcctcctgaagagctgtgattacaggcacccgccaccacactcggctaatgttttgtatttttagtaaagatggggtttcactatgatagccaggctggtctcgaactcctgacttcgtgatatgccagcctcagcccagccacaaatagtttcttttagtctctctgtaaccactctctaggtttgacaataacagtgcaattactttttgtatattgaccttacatcaaaatctttttctaatattttacccattgatttttagagatatctttttttttttttgagtcagagtttcgctgttgttgcccaggctggagtgcagtggtgcgatctcagctcagcgcaacctctgcctcccgggttcaagcaattgtcgtgtctcagtctgccgagtggctgggattacaggcacctgcccccacagccagctaattttttgtgtttttagtaaagatggggtttcactatgttagccaggctggtctcgatctcctgacttcgtgatctgcccacctcagcctcccaaagtgcagggattacaggcgtgagccacagcgcccggcccttttaagatatcttaatacaaaattatgccaactgcaggtgccggctttatttctcctcccccactctgtcacctttgcttcttctgtgtttcttgtcttgccgcgttgtgtccagcacagtgctgggtggggtccccatggcggcctcctggccttgacctgcctgtgggaagccatcagcaggtcacccctggagtcacctagtatggtggagacttttgtacaagctcatttcagattcaaggctcctccttctgttctcagtttactaagagtttcttttaattttttcatgagctttattgattctcacaccgtagaatccactcgcttcaagcccatgatccagtggctttcagggaactcacgtcatcctgcaactgtcactgcaatcgacgctggaacgtgctcatcccgaaaaagaaattcccattgccctcaaccctccttgatgttctgctttttatcatgaatggtgataaacttcataaaattatctcctacatttttgaggagacattgttcctcttcattcttcattatcttcatgaggtgattacacagtattttgtttgtttgtttgtttgttttttgagatggagtctccctctgttgcccaggctggagtgcagtggcgtaatcttggctcagtgcaatctccgcctcctgggttcaagcgattctcctgcctcagcctcctgagtagctgggattatgggcgcgtgccaccacacccggctaatttttgtattgttagtagagacagggtttcaccatgttggccaggctggtctcgaaatcctaacttcaggtgatccacccgccttggtctcccaaagggctgggattacaggcacaagccaccgcacctggcccacggtttgattgttaaatattaaaccaattttaccatcctggaataatcccaatctgtccatcatgcataatttttacaacactggcttcagttcaccacaaatagacttagagttttataatctatgttccttgcccatatgacttaatccacatttccaacggtgtccttggggtggattgctgtgatgggaattataaggccacaggctgcccttatcttccaggtagacacgtacatcacaaaattctccataaaaagctgagttatgcttccgccagcaggaattacggatcttctactcactgaactttcactcacagtaggtaatattatttatttaaaaccttcactaatttcataagcttaacaacatacagctgaaatataccaaagagcttccggaatcctttgtaaaggggatttgacccttaatcaatttcgtgtttttgcctctcggattttattgaaatggggcaggctttcagctttagatgtttcccacataagatgccccatctttcaaatcatctggaagagacgacattttagccggcacaagagaggctacgctgcaggaacaaacatcccccaactgtccatgacaatgttctatgggccagggatcctccaggcagctgcacctccagagcacctgcagagtccacagctgctgaagctggcgggggagagctggg

SEQ ID NO: 33239 - DNA, 2300 bp, Homo sapien
tgtctctgtgtctttctctctctgtctccatctctctctgtctctctgtctctgtctttgtctctctctctgtctctgtctctccctctctctgtccctgtctttctctgtctgtctttctctctgtctctctcttttttctctgtctctctctctctccctgtctctctttgtctgtctctccctgtctctgtctctgcctttctctctctgtctttccctctctctgtctctgttcctgtttctctttctctgtctctgtctctcctcgtctctgtctctacctctctctgtctttgtccctgtctctgtttctgtctttgtgcctgtctctctttctctgtctctccttgtttctgtctctccctgtctctctttctctgtctctgtctttctctctctgtcttcccaagtccccacccttccctccaatctgcgctgtgctcggaagccaggagtccttaaatgcaaacgtgatctcttccttctggcctccctttctgagttcctgtgtcctaggggcaaaggtcaggcgcctaaactcgctcatctctgagtgacgcccccagcgccttcatctccattactcagcgaatgtcgatgagccctgtgcagggtggaggtgggggcgggggcggctctgggtccttatcgcccagcggtgcagactgagataaaggaaccaggaggctagggagaaagtcccatgcctgccgggaaggccccggctatggaaggagccatgtgggcagtgggggcagggggccagcgagggcccccagggaggtgagcccagaggctgaaggaggcaacgggaggaaggcctggggaggcgcagggtgtggcaccgtccctggcctcaggaaggctggtccgggattccagagcttgaggtctcctagatgggagagacgtgaggggaggcccaagtgggggcccaaacgggcagcgcccgacagaggatggcctccaactccctgtgcggaaaaccaggagagaatcccactctggctttggagacacaacccccaggatcctctcctgaactccccgcaacgttcctcctgcccctcctggaccccgtggtcagccctgtggcttccctgcacggcctctttgctggggagcaggaacaccatctccttcgctgtcccatgcccggcacaggactgccccccacaaagtgctccacagaaggacagaaaccgtgcagtcaccgggaaggtggggatctggggtggctgcaggttccatgacacaggaccctccatcccccgtgaccccagagggcccttggggacgaggctgccctagagggtggctctgggtcctgaacctatggccgggagctgaactcctcctgctcgatgttctccagctcagccagggatgggatccgggcatccaggctggggttgggcagcgtgagctgttcattatgaagttcattacgaaccccagaatgaaactgtggcccagggggcacagccacgggaaccccactctcaggttgattcaggccacatcccaaggagccgtggttccgtggggactggtgggaagccgggcccccgagcagccgtctagagcccagagccaggctggaggggtccagggcctcgctgtgcttggtgtgagcagaccaagagctgccccagggcccctgctcccgctgagttccctctccctggactggggtgggggccggggatgcctgtgctccagggagctgtggagaggcccacccggcgtcctgcaggtgggggtgtgcggcagccaggggctcccagaccggggcagagccagcatcctgtttgccttggttctttctccccggggtgcaccggcgtttgtacgcatttgtgtgtgcgtttgtgcagggggaggggtggccagcgcccacggagcagcctccggttgcccgaaggcagtgggtggctctgctggccccggggccgggcgtctctgcagataaggcattaacagtccctccgcagacgcaccctgcagatctgctgacgactggctccgttctgcccaggtgcctggggcgaggtgccaaaggttctctataaagtgcccggctcccggcccacggccactcgccctccagcttctgccctgcctgctgtgtgcggagccgtccagcgaccaccatggtgaggctcgtgctgcccaaccccggcctagacgcccggatcccgtccctggctgagctggagaccatcgagcaggaggaggccagctcccggccgaagtgggacaacaaggcgcagtacatgctcacctgcctgggcttc

SEQ ID NO: 33240 - DNA, 2300 bp, Homo sapien
gtgacccaggagaactttgtggacatgcagcagcggtgcaacgcctccgaccccgcggcctacgcgcagctggtgttccagacctgcgacatcaacgccttcctctcagaggtaggtccattccggagctcgaggcagggagagggcaccccttgctggcacctcagagtccggccacccctgggcccctggcctgtggaggacgcagatgctgagcttcagccgggaggcccagctcccactgtctgctctgcctggcgtccagggctcttcggtctggggcgctggtgtctgccaggccacgagatttcacttccgaggctcctgttaacgcagaggcgtaggctcagaggcaggagccggggaacaccacgggctgcccctccattctctcctatcacacacacaaaacaccccctggggccatctgtaacacggtgacttctatcgacattgaaagagtttttgtagctgtttttgaacctgtgaggccaccaggacaggttttattttggactggcgggcgaggctcagccacgctgatgtcgaggatactccacgtaacgagtgtttttgaatactatttccacagttaacgaagtttagatgctgttacaattaaaggtcgacatttgctgattttcattatgcagtgttcttttggggagccaccccatattttgcgggcatgaggcacttcagggcccagtgctgcttctccagtggccactgggagaagagctgggcagagcgagccatttccgcaccagctggagccaggcagagggctccgcggcctctcccgaccctgtgccaccaactgtaggaggcctccaagtgcaggatgcgcaggcaggaggggcccaacagggccgtctggtctaaatgtcttttaaaagcaactttagtgagttataattatgcaccatgaaattcgcccacttccagtgccttgcacagccatgtgcagcacccccgtccacgcccgcaagctttccgtgtgctgttgctccccacccctggcagccccaggcaccccctctgctgctctgcccacctgccttttctagaaacgccacagaaagaaacccccgtggtgtgcaatctcatggcagggctgccctcggcagtgccattccgagaagcaccagagttggcgcctccatcctggcgcctcctcccgccacctcccaccacctcctgcctcctcccgcctcctcccacctcctgccctgcactgaagagcggcgtgccttgtatgcacgtgctgctgcctgcttctaatgatttccttttaaactcttcagagccctccacaagccacgtcctgctgtgcaaggggttccactcttgcctctggaactcgcatagttgtgttaagcggccgtggaggaccctgtcttcagatgggtccttgagtcctgccatatccaatccctgagccagttccctgcagggagccccacggagctgggcaggtccctcagcctcatgggtggaggtttttctccggagattccacagctaggaccactgatcgccaggaccgtgatgggccggggcctggttcttggtgacggtctgggaccagacacaggagcagaaggcgtccgggtggttgcgccttggtggttcttacccgagagcctgtctgtgagcacagcctgctctaacccggccgttggccacctgccttccgagcacgtccagggtatgcgtttattaacaggtgactcgcgtaacaccttgggtacgtggctcagctgcactggatcagggctgtgcaggctgtgagatctcagaagctccctgtgttgggagagcccgtctgtgggcggaacggggctctgagtgccgcttggtgatgggatccacgtgctggtcctgatgcatagttcggcttttgaaaatacactttgggcctaaaagacaagatctagctatttcatgacagctcagacctgcccgccccatgctgcgtggcttggcgacgcacgagacctcgggcggggaggagacggagcccacggagggcagaggccctggtgactgtgtgtcatccgtgcaggccgtggagggcacaggcctggccttcatcgtcttcaccgaggccatcaccaagatgccgttgtccccactgtggtctgtgctcttcttcattatgctcttctgcctggggctgtcatctatgtttgggaacatggagggcgtcgttgtgcccctgcaggacctcagagtcatccccccgaagtggcccaaggaggtgctcacaggtacgtgtgcagtcgggaggggtcccc

SEQ ID NO: 33241 - DNA, 2300 bp, Homo sapien
tggcataattcaaggcaaataccactctgtgcattttcttaagaggacatgagctgtgtgaatttttagccagcctttggaaaagatgggttacagggtaactcaaccctggctgccatccttgggcactgtgtgtgtccagggcaccttggaggaccgtgcagcccccagaagcttccagctcccgcaccactcagtgaagcccagcctggcgcctgccctgcccccgtcacgggatgggcccccattggggttcaacattccatcgcagccaaaggcagtcggcacttgggacatctgcttccacggacaggtcacctccgctttgcacggaagaatctggatgcttacattaaactggtgttctgagagttcctacggacaggtcacctccgctttgcatggaagaatctggatgcttacattaaactggtgttctgagagttcctacggacaggtcacctctgctttccatagaagaatctggacgcttacattaaactgatgttctgagaattcctacaggcaggactgaaagcctggtgtgtgccagtatgatgttccacccacagaaacctggtcacaatcgtcccttccagcaccccatccagcagtgactgcacacactgagtcccctaccagcccctttcaccctgctgactgtcactgggccctgggatgcgcaagactccacagcagcagaggtggggggacatatcacagcctctgcccccggctgtgatgccaccgaggggctcgcctgctgatggcttcaacagggtctcacctcatcttttcctgctctttggccctggatcgagaaaatttccatcagtgccccattaatatgctgccctgtggcatctgcccaggaggccctgccaggcgtgcacaggtgtgcattggtgtaccctggcatgcacaggtgtgcactgatgtgccctggcatccattggtgtaccctggtgtgcctgccataggaccctgggcgggagctcccatctcatctacatctcctgattcatgcgttgtttcataggtttcaatgtctctgtaaatgtggtagaaatgcaggctttatgggcataaagtgtacatttctaaataaatcccttctattgagtatgctcaccctagaagttactgttgtccagacgtagagggatgagtgagccagtgacctcagacgggatggtggggacggcaggtccagctcctgcctcctcctggggggtctggctttgggggcttgctccgaagaggccatggcccaggcctgtggcctcacaatggggaccaaccagctcttctcatcttcttccctcacacttcctctcactcaaataagaaccttccaaaaatgtgtccacctgggcccctgccctgggactcatggatttggagttgtggccacacggttgaggggtgcagtgtccagtggaatggggcaattgcgggcctgggggcccttggcctgtccgtggcgggagcatctgcaaggaggagccccagagtccagggagcactgtggggagctccttagagctgaactcacccggcgtcaactcatcaaccctccacccatggacaggggtgcccccagcacaggagaggactcagccctctgcccccacgcacggtgggtgcctgtcaccctgtcctgcccagcggcccgagggcagcagtgggtgtgagggcagcccccggcctcccaagagcagctgagaggatccctgcgggaatccgggcttcgggtgcatgcgatctgatctgagttgtttctgacagtgacagagtgacaatctataagtatctcaagatcaaatggttaaataaaacataagaaatttaaaacgattaaaatatgcctcagtcttgggaatcctggtgtctgcaacaaaaaaacttgaggctgtccttgcaaacggtcctcatggtgctgggggtggtgccaggcccggcgtttgcctggaacacagagcatgcgagaaggagcagaggacgtgggtgccagggaaggaccctggcgtcagagccagggcctggacctgagttacccattaacggcactccactggttttcctttaaagaaatgaataaatacaactgcagtggggctgcttgtggtttccaaacgtcggcagaggctggagacggctctctagtgctgggtgtggagtgaggcaccacccttgccctgaagcctggggcactcagtcaccatggctcatgccccagaaccggacccggccgcctgcgacctcggggatgagaggcccaagtgggacaacaaggccca

SEQ ID NO: 33242 - DNA, 2300 bp, Homo sapien
tgtgagctggatgtgtggtgtctggatggtgcaggtcaggggtgaggtctccaggccctcggtgagctggaggtatggagtccggatgatgcaggtccggggtgaggtcgccaggccctgctgtgagctggatgtgtggtgtctggatggtgcaggtctggggtgaggtcaccaggccctgcggtgagctgggtgtgcggtgtctggatggtgcaggtctggagtgaggtcgccagacggtgccagaccgtgcggtgagctggatatgcggtgtccggatggtgcaggtctggggtgaggttgccaggccctgctgtgagttggatgtggggtgtccggatgctgcaggtccggtgtgaggtcaccaggccctgctgtgagctggatgtgtggtgtctggatggtgcaggtctggggtgaggtcgccaggccctgctgtgagctggatgtgtggtgtctggatggtgcaggtctggagtgaggtcgccaggccctcggtgagctggatgtgcagtgtccagatggtgcaggtccggggtgaggtcgccagaccctgcggtgagctggatgtgcggtgtctggatggtgcaggtctggagtgaggtcgccaggccctcggtgagctggatgtatggagtccggatggtgccggtccggggtgaggtcgccagaccctgctgtgagctggatatgcggtgtccggatggtgcaggtcaggggtgaggtctccaggccctcggtgagctggaggtatggagtccggatgatgcaggtccggggtgaggtcgccaggccctgctgtgagctggatgtgcggcgtctggatggtgcaggtctggggtgtggtcgccaggccctcggtgagctggaggtatggagtccggatgatgcaggtccggggtgaggtcgccaggccctgctgtgagctggatgtgcggcgtctggatggtgcaggtctggggtgtggtcgccaggccctcggtgagctggaggtatggagtccggatgatgcaggtccggggtgaggttgccaggccctgctgtgagctggatgtgctgtatccggatggtgcaggtccggggtgaggtcgccaggccctgctgtgagctggatgtgctgtatccggatggtgcaggtctggggtgaggtcaccaggccctgcggtgagctggttgtgcagtgtccggttgctgcaggtccggggtgagttcgccaggccctcggtgagctggatgtgcggtgtccccgtgtccggatggtgcaggtccagggtgaggtcgctaggcccttggtgggctggatgtgccgtgtccggatggtgcaggtctggggtgaggtcgccaggcctttggtgagctggatgtgcggtgtctgcatggtgcatgtctggggtgaggtcgccaggcccttggtgggctggatgtgtggtgtccggatggtgcaggtccggcgtgaggtcgccaggccctgctgtgagctggatgtgcggtgtctggatggtgcaggtccggggtgaggtagccaaggccttcggtgagctggatgtggggtgtccggatggtgcaggtccggggtgaggtcgccaggccctgcggttagctggatatgcggtgtccggatggtgcaggtccggggtgaggtcaccaggccctgcggttagctggatgtgcggtgtctggatggtgcaggtccggggtgaggtcgccaggccctgctgtgagctggatgtgctgtatccagatggtgcaggtccggggtgaggtcgccaggccctgcagtgagctggatgtgctgtatccggatggtgcaggtctggcgtgaggtcgccaggccctgcggttagctggatatgcggtgtcggatggtgcaggtccggggtgaggtcaccaggccctgcggttagctggatgtgtggtgtccggatggtgcaggtctggggtgaggtcgccaggccctgctgtgagctggatgtgctgtatccggatggtgcaggtccggggtgaggtcgccaggccctgcggtgagctggatgtgctgtatccggatggtgcaggtctggcgtgaggtcgccaggccctgcggtgagctggatgtgcagtgtacggatggtgcaggtccggagtgaggtcgccaggccctgcggtgggctgtatgtgtgttgtctggatggtgcaggtccggggtgagttcgccaggccctgcggtgagctggatgtgtggtgtctggatgctgcaggtccggggtgagttcgccaggccctcggtgagctggatatgcggtgtccccgtgtccgaatgg

SEQ ID NO: 33243 - DNA, 2300 bp, Homo sapien
aggcagtttcactcttgttgctcaggctggagggagtgcaatggcgcgatcttggcttactgcagcctctgcctcccaggttcaagtgattctcctgcttccgcctcccatttggctgggattacaggcacccgccaccatgcccagctaattttttgtatttttagtagagacgggggtgggggtggggttcaccatgttggccaggctggtctcgaacttctgacctcagatgatccacctgcctctgcctcctaaagtgctgggattacaggtgtgagccaccatgcccagctcagaatttactctgtttagaaacatctgggtctgaggtaggaagctcaccccactcaagtgttgtggtgttttaagccaatgatagaatttttttattgttgttagaacactcttgatgttttacactgtgatgactaagacatcatcagcttttcaaagacacactaactgcacccataatactggggtgtcttctgggtatcagcgatcttcattgaatgccgggaggcgtttcctcgccatgcacatggtgttaattactccagcataatcttctgcttccatttcttctcttccctcttttaaaattgtgttttctatgttggcttctctgcagagaaccagtgtaagctacaacttaacttttgttggaacaaattttccaaaccgcccctttgccctagtggcagagacaattcacaaacacagccctttaaaaaggcttagggatcactaaggggatttctagaagagcgacctgtaatcctaagtatttacaagacgaggctaacctccagcgagcgtgacagcccagggagggtgcgaggcctgttcaaatgctagctccataaataaagcaatttcctccggcagtttctgaaagtaggaaaggttacatttaaggttgcgtttgttagcatttcagtgtttgccgacctcagctacagcatccctgcaaggcctcgggagacccagaagtttctcgccccttagatccaaacttgagcaacccggagtctggattcctgggaagtcctcagctgtcctgcggttgtgccggggccccaggtctggaggggaccagtggccgtgtggcttctactgctgggctggaagtcgggcctcctagctctgcagtccgaggcttggagccaggtgcctggaccccgaggttgccctccaccctgtgcgggcgggatgtgaccagatgttggcctcatctgccagacagagtgccggggcccagggtcaaggccgttgtggctggtgtgaggcgcccggtgcgcggccagcaggagcgcctggctccatttcccaccctttctcgacgggaccgccccggtgggtgattaacagatttggggtggtttgctcatggtggggacccctcgccgcctgagaacctgcaaagagaaatgacgggcctgtgtcaaggagcccaagtcgcggggaagtgttgcagggaggcactccgggaggtcccgcgtgcccgtccagggagcaatgcgtcctcgggttcgtccccagccgcgtctacgcgcctccgtcctccccttcacgtccggcattcgtggtgcccggagcccgacgccccgcgtccggacctggaggcagccctgggtctccggatcaggccagcggccaaagggtcgccgcacgcacctgttcccagggcctccacatcatggcccctccctcgggttaccccacagcctaggccgattcgacctctctccgctggggccctcgctggcgtccctgcaccctgggagcgcgagcggcgcgcgggcggggaagcgcggcccagacccccgggtccgcccggagcagctgcgctgtcggggccaggccgggctcccagtggattcgcgggcacagacgcccaggaccgcgcttcccacgtggcggagggactggggacccgggcacccgtcctgccccttcaccttccagctccgcctcctccgcgcggaccccgccccgtcccgacccctcccgggtccccggcccagccccctccgggccctcccagcccctccccttcctttccgcggccccgccctctcctcgcggcgcgagtttcaggcagcgctgcgtcctgctgcgcacgtgggaagccctggccccggccacccccgcgatgccgcgcgctccccgctgccgagccgtgcgctccctgctgcgcagccactaccgcgaggtgctgccgctggccacgttcgtgcggcgcctggggccccagggctggcggctggtgcagcgcggggacccggcggctttcc

SEQ ID NO: 33244 - DNA, 2300 bp, Homo sapien
tgcccaggccccgaccccatgcagagccaggggcggagctgggcagcctctagcagaaagtagttctcttgtataaattctaacacactgatttttaaatgtaaaaagtcagtcctgtgtgtatacagtagttcccccttacccgatgtgtatacagtagtccccccttatcctcatccggtgtgtatacagtagtccccccttatcctcatccggtgtgtatacagtagtccccccttatcctcttgcggtgtgtctacagtagtccccccttatcctcagccggtgtgtatacagtagtcccccttatcctcatctggtgtgtatacaatagtccctcatcctcatcccgtgtgtatacagtagtctccccttatcctcatccggtgtgtatacagtagtccccccttatcctcatctggtgtgtatacagtagtccccccttatcctcatctggtgtgtatacaatagtccccccttatcctcatccaatgtgtatacagtagtccccccttatcctcatcccgtgtgtgtatacagtagtccccccttatcctcatctggtgtgtatacagtagtccccccttatcctcatgtggtgtgtatacaatagtccctcatcctcatcccgtgtgtatacagtagtctccccttatcctcatctggtgtgtatacagtagtccccccttatctggtgtgtatacagtagtccccccttatccggtgtgtctacagtagtccccccttatcctcatccggtgtgtatacagtagtccccccttatcctcatccggtgtgtatacagtagtccccccttatccggtgtgtctacagtagtccccccttatcctcatccggtgtgtatacagtagtccccccttatcctcatccggtgtgtatacagtagtccccccttatccggtgtgtctacagtattccccccttatcctcatcccgtgtgtatacagtagtccccccttgttctcatccagtgtatatacagtagtccgccccttatcctcatctggtgttatacagtagtccctcatcctcagggggtgtgttcaaagaccctcattggatgtctgaatatgtgtatcaaataacgtaatgaatgaatatatgtattatgtaatggttttgataaagttcaatttataagttaagcacagtaagagattacccacaataactggtaacagaaacaggacaggacagtgtgataaagttacgtgggtgtggtctcactctcagaatatctgtctcatcgcactgctccgtgctaaccgaaaccatggacagtaaaccatgggtaaagcaaggctgctgtgctcttactgttgttcgtggagctgagctgctagggagagccatccttgtggctgttaggctggcctgtggttaggcggcacccaggagtgcggccggcactggttctgagtgcctgggagtttggctgccagtcaagctaaaactttccaaagccgtactagagaattaaacgatttttattaaaaggtcagtgtctctaaggatgagatcatgcatggttaggtttttttaagttttttttggagacaggtctcagtacgttgcccaggctggtctcaaacccctgggcttaggtggtcctttggccttggccttgcagtagctgggatcacaggcatgggccaccatgcccagcccttgcgtttttagcacagttgagagatgaggctgccctgagtgggcacaacccgagagcaggggtgcccagccaggcccatgatccaggggaatccagagcctccaattgcctgggggcctttccagcagttcaagtcaaaggtacgtattatttcagaagtgcccctgcaaagcccgcctgggcactctaggttctgacatggcaggccaggcgcgtagaggcatgggtcccgagtgtagacacttatcctgatgcatcctgaggctgagtacacctgcagtctcacggtcacacacgaagcctctatctctgtctcacaggagatggaaacagcaggagatgtgagttgctgtcgtgtgtgttctctctagcttctctttgatttcctggcctttaaaaatgacatcagtttctggaagaagaagaagagcatgatcggcatgtccaccaaggcaggtaggccccccgagcgtggccctgctcagatactctgccccagggagctcactggagcctgcggtagagggctgcctgcctcactgctggctgcagacacagccccgggtgtgtgcttggctcttgagaagcctctgagaccaggcaccgtaaa

SEQ ID NO: 33245 - DNA, 2300 bp, Homo sapien
taattgaataagtatacttttaaatatgatttgcttctcacaagtcaaccatttcccttcattgcctgggaggtatctgaggagagaataatgaaagtttgagactcatgctggactccacgccctctaggcagccagtccctgggggtagctggaggcgctggcaagccggtttctgcctggcctctttaggcctgtgacctcaagccagttcctgccctctctctgcctccatgaaggggaggccagaagtgctggtgaccaagctgcccgctcggttgtagctgcccacacctttcaaaaatgctcaggattcatctgcactgggtttaatttcccagacatgaatactgcctcttccgtgccgggccgtgtaccagttaccaaggacagctagtgaggttttccatttgacctggcacagtgtcagcctggaggaagtggggagaatgagcactcttaacacagctccgcctcaagtgtctccaagtgcacattccaccagaaatacacagccctgcaccctctgcctgaagagagacacttaagatgtcctggtggagacatactctttcctgggtagtgaggagccatagatgcctttgtgtttttcattacaactttggccgtaagatttttttttttttttgagatagagtcttgctctgttgccaggctggagtgcagtggcgtgatctctgctcactgcaacctccggttcccgggttcaagggattctcctgccttagcctccaaagtagctgagactacaggcacccgccaccacgcctggctaatttttttatttttagtagagacagggtttcaccatgttggctgggctggtctgaaactcctgacctcgtgatctgcccggctcggcctcccaaggtgctgggattacaggcgtgagccgccgcacccggccaaccgtaagatttttaaggagaggccgggcacagtgactcatgcctataatcccagcagtttgggaggccaaggcgggaggatcacttgagcccagcagttcaagaccagcctaggcaatgtgacaaaaccccatctctacaacagttttcaaagttagccaggcatggtggcacgcccacctgtagtcccagctactcgggagactgaggcgggaggtcacttgagctcaggaggttgaggatgcagtgagctgtgattgcacccctacactttcagcctggtgacagcgagaccttgtctcaaaaaagagacttttaaagaggaagaagaactcatgtaaccgtaaacaggtggaatgcgaggtttttccatggggctgtagtatggacgtcgggccctggtgtgcgggtgaagagccaggcacctggtccgaggcctacagttgtagcagctcgccgggcctttcctcagctcgtgctggatgccacacagtcaggactgacagccttgaaagtcagtcctttgtggctgatcatctttttatccttaaaactacaacacccaaaaaaactacccacattaaatttctgaggttccagtagtgtgggccgaggcacctggagccctcgtggctgctgcccttcccttctgtcgcttcggagttgggtgattcagtgtgtgtggtcagctggtaccctggccaggcccagaagctgctttccatctggctgcttcagccttgtggcctcaggtgggttattgacctctcagcctcctgagatggaggcaggaagtgcgggccgttttgctttcggctgtaggcgcccacacctgtgccgagttctcaggacgcgcacgcgtgcgcgtgcacacacacacacacacacacacacacacacgactcgtaaagccctgggcaggtgggtttcatttttagtacttctgagctaaaattagtttattgaagcagctttataaaggtatttgaataggttctagagacccagaatataatatgtatgtagtggaaatgattgttctgtttcaggacagttaatgtttctgtaccaaagaaaacgagaaacaatgggacgctgtatgcctacatcttcctccatcacgctggggtcctgccgtggcacgacgggaagcaggtgcacctggtcagtcctctgaccacctacatggtccccaagccagaagaaatcaacctgctcaccggggagtctgatacacaggtgagggtcttcatgggttactgataacaggctgtgcctctccgtcagaacggacatgtctttctccacacaggtgggcgatgtctagggctccagtgactttgttgggagtaaagccaaaagccattggaa

SEQ ID NO: 33246 - DNA, 2300 bp, Homo sapien
tcggaaggcgacagatgcagggctccctttcctcatcggttctctcaacagggcagggggacggccatgagtgggcaaatgtgtccagaccactgaagaacctctcatctgctcagctggagaggcccttcctgtctctgtgatctttcccaagatggccaatgtcctgtaccaccggccaccccttccgttggtcactgtggatgacactaggggtggacactgaccaaggaggcaccaacctgattccagctcctagagctggccaggtgcctgacaggaaaatgaggcatctgaagaacacggagagatgggggtagggtggtagggagggagggagatgaagccacaccccagagctcctgggtttgcagctccttcccgaggcctggctaggtccctgcctcggtccctgcctctggatgccgtgagacaatccaccctggagagcctaccagtccccttatgtttgacagctggagttggaatttgcctcccgcagaccacaggtctacagccttcattcacgtgtcgcacagactgtggcaggaccagcacccgctgctggtgtgggacgcctggccctgtaggggaccccaagagtggctggagagcagggcgtgatgcctcttgggccaccctgcaaagggctcacgagcctcctgaggaggatgcatttgatcagggtaacaggagtcagcagagggctttccaaggacaggtttgccaagaagcgagaacagactgaggggggaacgatagaggcactgggtgtagtcagacaccactgcaatggtagccgaaaaccgcgccgtgagaagactctgtggggagggtaactaggtgcatgagagtgagaggagcgaaaaaagcctcggatggctccgaagctcctggcccagcttccaggggttggtggcccaggaccgcccctgcacgcggcctcgggtgcctgctccaggcagacctgcttctctggcccattctcggcaccaatcactgtcccatccgcccgtcagccaagtcctctgagttcttcccggagcccagcaccctgatgcaattgtccctgctctgaaaaccctcagcaatctattgggtcttcagtagcatctactctttctagaaatgtcgaacaaggtttttcgattgtgctgcacgtgtggcagacacagaaacggaaacgaccttccagagaactggccaaaggacgggagctgctccagtaactgaagggcacagactgagcgcttctgatggagtcggggaggtcgccggcccatccaccggctgcccgagggcctcccactgacctcccccggccgccctccgaggggcctctgctgacctcgccgtgctgggcacgctcggctttagcgggaagctgggggtcaggttcaaggctgtgaggagccacttcagcccgggaatctgaattttttcttcaaaagcgcctgtccccacaatgggtttgtactggggaaaaaacccacacacgggatgaggtgcccggcttctgtgagggttctgagcacttcgtttttcttccctttagattctgacaactgtggactaaaagggttgcaggcccagtgccggaattccagtatcaccttccaccaggctcctcacacgtcgacatggcccccacttggtggtctggcaggcgtcggcggttggggacggcgccccggggaccccgcggccctagccttccccggcgccccgcgaacgccctccgcggccccagcagctgagcgcctgggtccctgagaggcaccccaggagggcggcgcgggcgggtaacgtcacacacgcgccgcatcctggatgcgcgtgcgcggcagcggccgagactccgtttcccagggagccgcgcggcgcgtccacttccggcaggcggcggggcccggaagcggcgcgcggggccggcgaatcccgcggcgccaggtgggagcggggccggagcatgcggggcggccggcggtctgcggcgcgcggcgcattcgttcccccgcggcggtggcggtggcgcgcggcggctctccagtgagcggcggagcccggagcggcgggctgggcgccgggcgggcggggctcgcggctgagaggcgggcgggccgggggcgccgggcgcggggccgccatgtggagcggccgcagctccttcaccagcttggtggtgggcgtgttcgtggtctacgtggtgcacacctgctgggtcatgtacggcatcgtctacacccgcccgtgctccggcgacgccaactgcatccagccctacctggcgcggcggccca

SEQ ID NO: 33247 - DNA, 2300 bp, Homo sapien
ttggagaccacctccctccgaggcctcccttctactctcagagaccgcttccctcattagctctgcggaagcaagccctcttcccgggaccacggtggctgcagtacgggtaagtgggtgccgcactggctttttctggaaccacacgatcaagagggtttggctaccgaaatgcctagaaagcttcaggaccaggcgctctcctgaaaagctatttggtcaagtgagtggtttaggtgggcatgcgtgtatatgtgggcgtgtgtgggtgtgtgtccatgaaagtggccatgtctgtgtgcgtgtgtgcatgtaagagtgcctgagtgggtgagtgttgaccatgtgcatacgtgggtgtgtgcaggtatgtacggtgtgtgcacatgtgggtgtgggcatgcatgtgtatgggtgtgtgcacaggtgtgtgggtgtgcgtgtgggggtgtgcatgcaggtatgatgtgtgtgcacaggtgagtgtgcaagcgtgtgcaggtatgcatgggtgtgaggtgtgcacgtgtgtgtgggtatgtgcctgtgtgtggatgtgcatgggtgtgtgccggcatgcatgggtgtggggtgtgcacagacaggtgtgtgcatgggtgtgcatgtgtatgggcacgtgcacgtgtgtgggtgtccatgtaggggtgagcatgtgtgtatggatgtacgtgtgcacaggtgggtgtgcaagtgtgtgtgggtgtgcacagtgcaggggtgtgtgggtgtaggtgtgcacatgcctgatggtggacaggaacctcaggttccttcctactgctctttctggccccactagtggatccggagtagaaaccagccagagagaagcgcacaggggaagcacagccatcacttagcaaaatcacttagtgaaatctgggggaaaatgagagtgggctgaaggcaaaatcagtgtgctctttcagctggagaacatagcaatcaggggaataggggcatggaacagcccagaaactggatacacagagctgcgcagccgtcatatgccccaggaggaggagggcggcgggtgtgttcacgcaccacgtgcagccctggctgctctgctgctggagtccattcgggctgctgtgacaacacgcctaagcctgagccacttgtcaacaacagacatttattgctcacagtcctggaggctgcaagtccaagaccagggtgctggcggatgtggcgtcccatgaggcagccctctgcttccaagacggcgcctcttgacaaggctcagggtggacagagcgagggagctccctggagcctcttctacccgggccactcatgccattcgtgagagcacagccctcgtgatctactcacctcccaaaggtcccacctgttaacaccatcacattgggtattaggttccaacctatcaattttgggggccactaacactcaggctacagaaactactaatgcatcttgggatattgtgaaactgaaaggtgacaacgtgccagcagccctcgctggctctcggcgcttcctgggcctccgtgtcggctctggccgtgcttgaggagcccttcggcctgccgctgcgctgtggggcccctctctggggctggccgaggctggagccagctccctctgctggcggagaggcgcgggcgggagcgggggctgagcgcagcgctcgcgggcggcgcgggttccgggtgggtgcaggcttggctggcccgccgacgcctgctgggcttgatctggggatgagctccctctgggctgccggagtgcccagggtagatgctgcaaagttctaaagggagtgctactgagaggtgaggccggctgggcttctggctccggtggtgacttggagaacttttctgtctacctaaaggattgtaaacacaccaatcagcactctgtagccagctaaaggtttgtaaatgcaccaatgagcaccctgtccaaatggaccaatcagctctctgtaaaatggaccaatcagctctctgtaaaatggaccaatcagttctccgtaaaatggaccagtcagcaggatgtgggtggggtcagataagggaataaaagcaggctgcgggagccagcggtggcaacctgttagggtctgcttttgtcctctgggagctttccttgtttggttttcgtagtaaatcttactgctgctcagtgtttgtgtctgtgctgcgtttgtgagctgcaacgctcacggtaaaggtctacagcttcactcccgaagccagcgagactgtaaatccactgggaggggcaaagaactctggacgtgctgc

SEQ ID NO: 33248 - DNA, 2300 bp, Homo sapien
ttgttttgtttcgagacagggtctcatcctgtggcccatggcgcaatctcagctcactacaacctccacctcccagcttcaagctattctcccacctctgcctccccagtagctgggactacaggtgtgggccaccatgcctggctaattttttttttcaaagtcagggttttgccatgtggcccaggctggtctcaaactcctggcctcaagagatcctccttcctcggcctcccagagtgctgggattacaagcgtgagccctcactcctggcctgtgtatttttaatatacctgaacatccattctctctgtgtgttttatttaacagcctcccttagtcacctgcaaagtcttttccttgggagactgtttcctcaaccctgctgctctggggccaagccctggctcactcctttttattgaaacctgtgccatggagataataggggtagagagatcccttctgtggcagccactgacacactacagcttcgaggtggcacatccccctctcctgaagtcccctcacctccctggcgatgaagtcccacccctgatgggaggtggtgtcaggaggccttcaggtggtcaggccaggagggctccaccctgaggaatgggaccagtgccctcataaaacagaccccggagagctctccccagcccctagcgtggggagatacagggagagaactgtctgcaaccccgaagcggccctcaccagacacagagtcggccaggccttggcctcgggacaccggaaccgttagaactgaaggcttctgtgtgagcccccaggctgtggagttttttgtcatggcagccccagggggtcactaggctcccacttgattccaactcagcgtgaagtcacagccctgagtgccttctgcctgggtgccagccccggagccggggagcgggggagcggggggcggggaggggagtggtggtgtgcggggagtgcggggcgggcgcagggggtggggcaccgcgctgcgggcgggtactgcggagtcaggcaccaagggtccctgcctccctcactgctgagcgcgggctgcaggctggaatggctggagagccccagggctcgcctggacgcccagggcagggtgctcacgggagcatcgagggtacacggggaggaacgccggggttcgggcgaccctaggggcgacgcacagagctgggcgcggccactcacctcggtgccttctaaggacctggacatcctgggccttggcggcctgggggctccattcctccgcgcgctgaatggaagaaatcccgcccgggcatctcggaaggaaagcctcggagtccattcggccctggagccggataccaaccgccagggctttccaggcccgtcccgggaaatggttttcttaggcgagtgcgaggcgggcccctcggttccgatgcaggcgcactagatgccggcaaggcggggactaggcctaggggacctcggtcgcctcgaggtcgcggagaccccaaggccacggaaggacccgcgtctccgcagcccgcacgccgggaagcgtgcagagtcctcggcggggtcccgagcccgctggtcagagcgtggagcggcggggtgggagggacgtggtccccagagcgcggggccaccgtaggggcccctgatggggagggagggaagggtcggcccgacggggtcccagcagttccccgcgcgcagccgctcggctccctccccgtccagctgggagccgccagccctgggcgtccgaagatagcgggtgcccggggcagcccccaggggtgcgggcgagggcgcagggcggcccagacagttcccgcgtggaaggcgcccgtctagatccgcgacgtctcggacccccaggcccccgcaccccgtgtccgaggctccgggacgcgcaggacagtggagccgtggccgccgcttgctcccagccatctgcgtccgggaggcgggggcgggggcgcggcccggggaggtgaggaggaggagccaggacgcgagggcgaccccgtcggcgggagggcggggcggggcggaccctgtctactggataagagcccgaggccgaggctgagaccgcccagcgctgcggagcgggaggggaggcttcgcggaacgctctcggcgccaggactcgcgtgcaaagcccaggcccgggcggccaggtgaggccagcgtcgctcgcggcatcggggcgccccgctccttccgcagaccccgaagtggggcgcaggggcgggggccggggaccgggcacagtctggggtccccgcgtcccgcagac

SEQ ID NO: 33249 - DNA, 2300 bp, Homo sapien
gggtggcagttgccttgtttctcaacatgaacaatgggctgtggagcccgaccttcctcctgcacaggccccacctgcaggtgggcagggtaactggctgtggtagggttgaggacgcccactggggaggacagtgtgcaccgggtccctgcttggggtggggtatgtgccactaggaggtctttctcaggtgaaccaggcgatgggtgaggcctaggctgccctacagtgaccacctgggggcaggatgggtgatcacttctcacaggcttccaggccgctgatatggctgcgtccccacggcgacaccagggtcccgcctcacctccaccctcagcagctccgccctgacggcatatgccctgccttcctcccaccttcttgcaggctgcttccccatgtccctttctgcagcctatacctttcatggtgtcatcatttcctgaagtcatggccattgtgctttgctgctgctctgggagcctggcacattttggggggactgcatgtagcaggaagggcttccacggagcagtctcgtgtgagagagcgtggcaagtgcaccagcgtgctgctcttgggacacagagatccaggaagctgccccccaggctgactgtggacacagaactcctagcacctaggaccccagaggcacacgccggtgctcaggactccggatgcgcagcgcaccgatgtgcttcatacgccttggggccccttgtttttgttctttttcgttatcattactgtgtaaaaccttaagatgtggccctggtaaaacttccagcggctcagagagtggacagtgagaacctgaagtctgttgcctgtggtagcctcagtcctacctctgcgtttcccgtgcagcatctacacgaggctccgaggatgaaagtctgcatctgcagttctcatgtccaaatggacacagatgtcaggttgtcccctctgaagcagccttgcaaccactagggggcaggaggcactgctctctgggggctgagtgggatccaggtcggccgaggagctggaggccgtggccctgaagctttgacccggcccgttctgaggctccagcagcaccaacgtggatttcgtctgcagatgtttgattcagcaaatctaaaagcaggagagaaacgtagaccacagaagacagggtggccgcgtgcggcagcgctgtgggatgaggcccaggggagggagagtggagggtgaggatggggtctccagagcctggagcagacccggtccatggggtagaggcagagccccgggaagagggtgtgaacgcggggacagcttgccaggccggaaggctggaggcgtcagcgtttcttccctgagcaccgcaaggaggagccggtggaggtgaaggcgcagcccctccctgaagagaggcgacgcccctcccaggcagcccacttctcggagggtggagcaaacgctcacaagatcacagcgcgctgcagcaggagaaggggactcggagtcagggcgacggccccgtcggagccccaggaaccgtggaccccaggcagagagagggcggcgggggatggtgcagccccaggcagaggactcggggaagaaccaggtagaagagctggcccatctgagggagcccaggggttggagcggaaggacacgggcggcgtcgggacctcagaggaaagcgctgccacagagcccgtgggccaggctcgagcctaaagggctggggcaggaccctgcaccccacagggagccgaagtgtttccaaggaggtagagggacaaagggatgggcgggccctgatcaaggggtctgggggatctccagggcacagagtctgtggagccagggaggggagcgccgtggagttgtggggagcgggcggcaggcgcctcggcactgggccctgcacagagagggccggagccgccgcttccacacctggagcaggaggaagagaggaggcgtcacctgtgaggctcaggagagagcccgggtcctggttcccgctccccgctggagccctcccggccctcccaggtccttctcatttctgctcctgatctgccctgtcgatttctaaccatcagggctttttcatgttattactgatgcttgtgaacacgtctgctgtagcctgcactcacggaggcagagggccgtgggggaactctgcagcccaagcttgcgccgcgctcgcccgtggcccaggcaggacccttccgcggcctcccagtggcagccacaggtgctggttggtttgctgagctatcacgggtggggtgggcagcgtctgagccctt

SEQ ID NO: 33250 - DNA, 2300 bp, Homo sapien
gggagccctcaggagctcaagctcagtccctgtgttctgtgctcgaggcctggcctgcaccctcccggccactgcccatccagccacataatcctgctgggtgggggaactgccgccctcaggcccgggccaaggcccttcagcccagtcctctgtaatgagagcagcttatcctctatggaagtgaacagccgggctgaaagccgggcttatcagtatatttcgtagtgctctccaatatttactggaaggcagcaaattgttttattaaatatttaagttgcatgtgactcatcttttatttccagatgcaagaagtgcatattaattccccttttaaacaaaaaaagaactactcctcatcgacttagaaaaaattgtgcaggctacacagaggtgactatttagcccaaggtcttgactctggagacctgggtcaggctgagaagggggatctttgactatgtattaaacagagcatggtgctatgacaaactcagcggtattaaatatgtaaagtaaaactaagagccaaacaaataattatttgcatgtgggccagcttcatatgtccttaagctacaatacccataataatgaatggtaggtttaaaaaatcctttccagctgggtgtggtagttcacgcctgtgatccccgcactttaggaggccaaggcgggaggactgcttgagcccaggagtttgagaccagcctaggcaacaaagtgagacccatctctacaaaaattagctaggcatggcgtgtgcctgtggtccaattacgtgggaggctgaggcagggagatcacttgggcccaggaggtcgaggctgcagtgagcccatcgctacactccagcctgggcaacagagcaagacaaaatgctgtctcagaaaaacaaaaaacaaaaacccaaatcttatccaagtggttcagactcataagagagacataaagtcattgaggtaaagcaaccagaggctcctcgaaggagccctgagaaacggaaagatgggaaagcaagacaggtgatatgccacattgtacaaggcttatctgggcatcctggtgtaagctcgtgtctgcatcaaccactgtgaagagcgctgtgtaactctgtatccatacgaacctcgatttccacttggttgtgaaactgacacagcgtgagccacaggatttccagccttaaaaacagattgcacaatgttgagcagatttacaactcgggttaacaagtaaattactcccaattctggggtgaaacctccagacgcgccctccagagggcgctactgggcagtcaacgctcccacggagggggtgccgtgcccacccagcccgagccccagtgtgacgtacagccgtgggtggaaatgctgcttttccgattcaacacctgcttatgtccttggttcgtctagcaagacaccatctcctgcttgttctccagctcaggagacctcgtacagcccacacctgtccctccacacctgtccctcctcgctgtccccaggcagcacaggccctgagtcatgccacccctccagcctggatccagagttcccaacctcagaaccaggatcaccatgcctttgccgcaggagttgacatgggagacatttggagctgctcccagggccacactcacgcctccgacagcccagtgccccaaccctctttctgccctgtcatgccagccccagccctaggcccccgggaccccagaacccctataccccccagagccccctcccagctctgctcccagctgggagcctccacacgccagcctgggaagcgctgacctcaacaccttcacctgaaagcaccagcggacccacatcctcccaaacgcctggaatggagctgctctctcttggactttcccgctccctctgccctcccgacgtcagctcagacgtcagcacccaggaggccctgaccagcctgtggccccgggcttctcctctggggctcgttcccgtttccgtggggttgttcattgttgcataactgaccttcggtgtctctgctggggggacagggacactgactcacagcaggggctggcctcccacccagcactactcagtctctgtgcctgtgcagacggggtccccccagacacccctaaatctccactttccttaccaggggccaccaggtggacgatcgtaattactgagctggcaaactcgagagccgaatgcaagactcacagttcccttcctgctggtactgaagacgtgcaacttaagaccccagaatccaggagtgtcaggcctgggccacatctg

SEQ ID NO: 33251 - DNA, 2300 bp, Homo sapien
ttgcaactagtgacgttagacccatgcccagcacaagctatgtgtgaatatggaggtttctgtgcagtttagaagcccgtacctcctcccctctgccttgttcctgcattcagaagccctgggctctgactgcctcatcttggtttctcccagcctggcccttgtgcagcctgccttgggtgcacagtgctggcggggtctgggtgctgctgaccctcaggggcccctgggagactagggaggccagagacccctgcagactttcccaccggggtttccatgaagtcactgacctttcaggctcatggggggtttctgtgctcttggggactttcctgagaggtccccagggtgttgaggtttcctttgattcttactgagtttcagtgatgtccccttgacacatggtcgggatggtcggctgagctgtagcagcagagccattatcacccacagcaggtctcggcactccacgcgagctcctgggctcggtcccaggcaatgaggactatttcctccacactgcgtgtctcaggggctgggactcggctgccgggcgttggagctggggcttgagcctgggtctgtgccagccctgccgtcctccgcctcccctgacacagccacccgtccacctgggcacacagaagtgctgggtgaactgcatgagcttgctcccaggtgctgctgagcccacagcaggaagggggcaacccagccctggacacaggggaagctgcggcacacgggcccagggacttggggtgccagctggacaccaaggctgcaggtggatgtcctgcatgagacgaaagctgagtgggttgggcggtcagctcgaggtttcagccctgacacgggcctctggcctcaggccaccgtgaagggagaattggccctagggacagatgctcctggcagccctaggggcaagcatgggctccattctcccagaattgtgcagaatcccgcagccaggaccaaccgcaaattcctgaccacatagtggcactcgctggcagcctgggaggaacgcgctgcctggggattcactcgcctggcctcaggtcgccaggcaggggagcccttctcagaccgcctgtcctgttctaaaacttgagtacttctgatgcctgagttttccagttaaaaaaaaactctttcaatagagatttaaatagaatttaaaatagaaacaatcatccacagagtccatggtgccttgctccagcccgcaagggcacaactccggccagtgagaaggcggagcggctgctgggtacagccacaattccagtgggaacggggaagttcctgagcctctgcggcctgtggctctagctgggcctcgctggggctcctcctgattccttgggagcccatcaggtggcagccactcagagagagaggcagatcccgggcaagtcctgctgcagctgtgaccaaatccgcccgtccttggagctgagccccaggggcaggtgagggcggcgggtggggccccgaggcaggtgtatgtgcttggtgagggcagaccctaaccccgtcaggtgggtgagcattggccggtgatgaggacccccacttcccaccaacgccttccagctggtgcgcgatgttacagcagaaagtgtccctccacggatgtcttccagctcgtgcgcaatgttataatagcaagtgtccctccacagacgccttccagctggtgcgcgatgttacagcagaaagtgtccctccacggatgtcttccagctcgtgcgcaatgttataatagcaagtgtccctccacagacgccttccagctcgtgcgcgatgttaaaacagaaagtgttccttggccggggagcgcccctggccgatgttcctgcccatccgtgctgtggcgctgggtgtttacggtcaggacagatgttgagatagtccaggcatggagtgcccttgctgaccaggaaggcctagacagaaaagctcacttttatcccaagggcagcatgagaaacgcagcagacgctgtcctgcgtgggctgccatgggcaacaccgctgttcctttctcggcaggtgcattcatccctggagcgcccgtccagcctgtggttttacgatatccaaataaactggtgagttgtgtttttttggggtcagcttccaggggaattctccgggaaacgggaactgcgagctgcctctgtgcacctgtgtctctgtctctccacaccctttatctgcgccacagcccacacttggccatgctgagtccatccggcctcagcgctggagagggcaggacaggcccgg

SEQ ID NO: 33252 - DNA, 2300 bp, Homo sapien
gcacctgagcaccctgggcttgtgctggctccctttgccttggggtgagtgggtgctgggtccccaaccccacagcaagcggagcttttctctgaggctgtcatccacaccagcagtccgggttttcacatgtggatagtttgggtataaaattcctccaagatctttagagaagagctgaggctgctttttccctgccccgacacccagtacagttcccctgagcaccgtctgtccctgcaattcgatttcggggctggcaggtgtgttcctctaagggccgcccgggttttaatcccttttttcctgctgtcctctctcctgcccctgaacctgcccgagactggctcctgtgcccgccgcagcctcctctgcagcctcgcttctccctccgccgctgccttgtttcttccatcttaggcatcaattgctgtcttttggcttttgtttttgtactttttttttttttttgtggaaaataacatgtgcacagaagagtacatctttattttttagtttagttttcttgagatggagtctcactctgttgcccaggctggagtgcagtggcgcaatctcggctcactgcaacctccgccccttgggttcaagcagttctcctgcctcagcctcctgagtggctgggattacagacgcctgccaccatgcccagctaatttttgtatttttagtagagacagggtttcaccatgttggccaggctggtcttgagctcctgacctcaagtgatccacctgccttggcctcccaaagtgctgtgattacaggcgtgagccaccatgcctggccagaaaagtacatttttaaatatgcagctgaacaggtggtgaagaagtgcacacctgtgtaatcccccctcctctagacaagcagcaccctgggttggtccccagcatctccatgtgtaactacaccattgtttatcatcgcatacacaaaggccattccaaggtggccccacgagaggaggctttgtgccctcctagcaaccgccttggctcagatccatggggacccctgtcctggaagtcttctgggaggatcatctgtcccagggcaatgtgaatccagtaaggcttcaggctcttgtttctctgtgcagtagttttacccagtgtgatgcgcccacttaacccagtggccgagtgagccgtggcttctcatgaggctgaatcatgttctctgtgtgcctgacctgtggcttctcacacaccgtggctgtctgctgcgtgtcaattccctgaggtgtggaataacagcctaatctgtagcctcatatgaaagagaatacacacatttaaaaggctaaatttgtacctattttaaaaagagataaagagtacacaaattcagttaacctaggctgatttttactttattttccaaatttattggccatctaatttcctccagaaacagctcactgtaataacacaacgcctggttgtgggaaccccgggcttcctgtggagatgagatggggaagttcgcacgcaggtctcagcttccgccctcagctctgagcgcccccccccccatattgcgatatgcgttttaggtgttttaatgtttttcccatttcaaaatgataggatgctgataaataagttgctaacatgaaggtccggaggtcttctggcctgggacttgtgctgtctgtgttccggagtctcatgttgtcttagcactgcctgccgcgtggcccgtgaccaccacacagggccccgcggcctccttcgtaggtgagagcgcagccagcgaggacacaggcggaggccaggaaggcgcggcgtcttttcttccctcaagcagatgtcccagcggcggcgaccacaggaagcccgtggcctggactgcgccctggagggctctcccgtgggaccgcccctgtgcctcacacagactccgagactgcggacgtgtgcccgcgtgacgcagcgccctcttttgcagggttgtggacttcctgctgaaggccatcatgcgcaccatgtggttcgccggcggcttccaccgggtggccgtgaaggggcggcaggcgctgcccaccgaggcggccatcctcacgctcgcgcctcactcgtcctacttcgacgccatccctgtgaccatgacgatgtcctccatcgtgatgaaggcagagagcagagacatcccgatctggggaagtgagtgagacacccctgctgggagtgagggaccctgccctgctgggagtgagagatccccctgctgctgagaataagagattcccctcctgctgggagtgagggtccccc

SEQ ID NO: 33253 - DNA, 2300 bp, Homo sapien
cagaaggaatttattctctcccagtctggaggccagaagcctgcgatcatggcaccctaggcctaggctccctctgagagcactagagaggacctgctccaggcctctccagctcctgggaactgcttgcctgtagcagcagaaccctggccttcccatggagctctctctgtgtctgtctctgagaccgaatctccctctctatagggacacaagccatttcagactagggcccaccctaatgacttcctcttaacctgatcatctgcaaagaccctgtttccaaataaggtcgcggccacaggtgctgtgggttaggacttttgcatcttctggggacacagccatgactctctggcagctctccccattgaatctggctctgcaccatctccagcaggtttcccctccgccacacaccgcttcctggcctgtgcttctgggaggaccccactttcatggctctccaagtccagtcctgaggctgctctcatcccaggactgggacaccctagggcccctcctctccagagcactcaggcagcaggtggggccgcctggatcgctggggtgcaggtgctgccctgtggctggcaggctttgtgtcctgggctttcttgatgatcagttcggtgaggagccttgggtggcctcgggtgctgggctctggttttggggatcagagcaagtggccactaaaagcccaggaggtgggtgcaacgctggtggctgggccacagagccaccaatgcccaccagcacacagggctcaccccatccccgtgggtgtggcacttgggacaggtgctgctgctaggcatgggctgggactcttatggggcaggaatatgggctgggactcttatggggcaggaataaggccatgcagcgggtctggcctgccggggccttctctgtgcatgatatgtggatggcacagacccctggccctcaccccggtctcagacacagaagggtctctgccagcccgctgcactatgaggtccacaagggcgcaggcagggtcattggaggggtcggggcactccctggcgtctgctgaggatggggcccagctggggccaacacagcagtgacatccccaggagccaggaccctggggggttggccaggtggcccaaaccggctctgtctgggtgaggtccgttggccatgaaggaaccaacagggccagccggggtgaggaagccgtgagcactgtgaccgaaggcctgcgtgagttctgaaatccaagcgtgttcacccggaggcaggagcccatcctactctcgctccggctaattatgggccccaccctggggctcctcacacggctcctgagcaccacaagggcaatgcccgagccaaagcagctacgggtgagaaagcgctgggatctcatcgcagcccctgcacaaccagcacggacagtcagggcccctatgtgcgcctcctgcctgggccatccctgcggggcctgaggcctgagaggtcctgagatcggaggggtcctgaggtctgagggggtcctgaggcttgaggggtcctgagatctgaggggatcccgaggtctggggggtcctaaggtcgagtggacctcaggcgggagtcgcctgggctgaggcgcggctggaagaagctccctcagcccggggcagcttccagggtcgccggtgcgagctaggagcccaacgaataagaagaatggcgtggggccttcgccggaacagcccggggctcggcacccagggcctggcccgccttgcgcgtaagctggacgcgtgcccgccccttcctccctccccgcgagcaggcgggccgagcggcggaaggggacgacgtggcagcctcgcgggcccgggggacctccctttctcctggcgcagaccctgccggggatccctgtgctccagtggctgcaggaggcgcccccggtccccagcggccccggccccccacagaccccagagaaaccaccaggtagcggaactccggctggtgccgcccctgccggccggcgggaggcgaggcttccagggacgccccgccccggccggcgctcccgctccgcccacgtcacctcccgcgcctgcgcgcccggcccgctccagccgccgcgcatcctcggcccgcgccccgagacccgcgcccagctagccccggccccgctcggcgccccaggcagctcggctgcgctcgccgcgggacggcgcggccatgaggctgcggggatgcggaccccgggccgcccctgcctccagcgcaggggccagcgacgctcggctgctggcgcccccggg

SEQ ID NO: 33254 - DNA, 2300 bp, Homo sapien
catgtccagggaccacagtttgaaaacctccatggctgacatgtaatgggatgacatggtccaataaatgaaggaaaagtaacaggtggcaacctcaggcagcttcatcccaaccagtaagaaagtaaatccttttgtaaactaagaggaagtattaatatgggcgtttgaacaaacatttaagtgttaggacaaagaattaaaaactagcacaggcacccctgaagcatgataggatggcaacagaagggctgatttagtttccaagaaataactgacaggcagtgttgtgtgtgtgtctactgcttaggaacccaaaacaaaccttcagaccattttcatgagtactgagaccaagaaaaccactgggcagtgggtggtctggaaatgtaaatgtttatagtactccactaatgagtcatggaacgatgtttcctattgaaaatgtttttgtaaatgtgggtttcaaggtttcaaagtgaacccatatgttttaggagaaaggacacaccaaagaagtaaaataattgggtcaatataaaaagaaagtagaatactgcccagagagaagatgtggataattcctaacacggatcaaaggcaccaaaaaggtgagctgtgagtaagatattcagacctgcaccgtcccctgcagtagacacagtggctgctgtgagtaagatattcagacctgcaccatcccctgcagtagacacagacaacatcttggtaggcaactgggtgaatattcagagacaaccctaggaactaggaggatgaaaaaagcattcatggaatgaggcactgaagaaactgaaaagctggaataaccccatgaaataacgagaataattgtagtattctgaaccggggcacaggacacaggactggagtggaaggccgcatgagaccacccgtgcgggaaagacccagggatcacactggcccaaaggtgggcacttcccaactccgggatttgtgctacaggcactccaggctccaccacagaactgtgtccagcacgaaggcagtgctgtcttgagggaggcagggctgcaccaccaccggggcgggaaggggcgcggcagggaggcgcccagtgtttccagctgcacgggtcggggaccgcgctgatgcagagcgcggggccgcaggttaaatctaaaggagggaagcttttgggggcggaacagacaacggagaatgctgcacactgcccttcccacgcgaattgtgctttgcctttttttttttttttttttttttgagacggagttttgctcttgttgcccgggactggagtgcaatggcctgatctcggctcactgcaacctctccctcccgggttcaagcaattctcctgcctcagggtcccaagtagctgggattacaggcgtgcgccaccacgcccggctaattttgtatttttagtagatactgggtttctccatattggccaggttggtcttgaactcccgacttcaggtgatccaccggcctcggcctcccaaagtgctgggattacacgcgtcagccaccgcacccggcctgctttttttttttttttttttttttttttcattgtctcgctatccaccgggctggagggcagtgatctcgactccctgcggcctcgacctcccgggctcaggccatcctcccgcctcagcccacggagtagatgggcccacaggagcccaccacgccggactactttttgtaatttttgtagggatggggtctagccacgctgcccaagctggtccacgctgcccaggctggtccacgctgcccaggctggtccgcactgctgggctcaagagctccggccgcctccgcttcccaaagcgcagggatcacaagtgtgagctaccgcgccccgcccagagtttccgactgttagcgtgaatcacattcacctcaaaacttcttttcatacaagaactaaaaggcaaactaagtccctgctccatcactgcctgtcccgggtcgcagcacgggacattgtctccaagcgccttcccggcccgcgcgcaggcggcctgtgcatcccggacaacgcgcatttcctgcgcccccggaagtggcggtaacgcccggccctgcccccagcagaggcggaagcggtgtcgctctgaggggtcgccagtcgccgcaggcgcttcagcccagcggcgggccttggcccttggctgcctactcctaccgccccagccccgggcggccctgggcctgctgcgggcgcggcgctgcccgaccagagcttcctgtggaacgtcttccagaggtgcgggctggca

SEQ ID NO: 33255 - DNA, 2300 bp, Homo sapien
ttcaactgatgagctcctccctccaactcttcccagacccaggggccctccctcgggccagtttcgggacaggcccccgctccggaagagcacggaactctggcaccccggtcgcccgcccctgcttccccacgcgccccggcccttagggttcagcggccccggctgggaagagctgggcctgcagggcccggaggacactgcggcaccggagccggccctgcgcgcgggctgtgaggtcgcgttcgggagccgccagttctcccgccccggggtcgctggacaccccctcctgtcgccaggtcgggcgcccacggtcggacccgcaccccccaaccctggccctctgagaccgccaggccccggcccacgctcctctgaccgcagcccactcggggagacacgcccgagggtcccaaggtggccggccccaccctctcgcagcccccactctcaagacacccgggacccctgacctgagaagacggctcccttacccggccgcacgctctcacccggcgccgacccctgcgtctgcgcactggcacgcggacgctgctgccaggaaggaagatggcggcgggggggggggtcacgtggcgtgcccacgtccagtgcggggcgcagagacgcagcagcgagtgcgcaggcgctggagtgcgacgtatcactccccgactgcgcgcactctgcgggccaccgggatcgtcgtgctgtttggagcgctctcgggaaaaaaaatgcaaaaaccaggaacgaaaatggatatccgcaacgaaaaagaaattacaaccacttaggccttagaaaaaactggcaaataccaatgtcaaaacaaactgagaaagaggacatgtttttaagtggacaggagaaatgtaaacaggctccgggaaacgagtggagacgggcagtagtttcaactggttacggctgttttccccaacattatgaaaaacttcggacatagagaaaaagggaaagaactgtacggtgaacacccatatacttgccacctagattctacccttagctcgcttatccctgccttttcaggtatctacccgtaactccattcgccttcctttttgtgtgtgtccgggtgagttgcagacgtggctgcgtccactccgcgctccctgcaggccccaacgcttcatcgcagcgcccactttttccacctgacccggcgaacaccgggcgggccgctggagtttatcagctccaggacaaatctgcctctgaccaccacgtttgctgggacatctttgggaccggaggttttcatgtgcattcttgtttctcatgcctttcctcctctttatcatcttccccgccactcatccatctctagtgttttgttcttggagtcacgtggtcctcaggctctgaccacagcaaaagaaaagctggatgctggagcttaagctgggatttatacccaagtcaactctaagcaaaacgggcctttttagaggctgtatttgcatgctgtaaaatcagtcggtgtactaggctttgttgcagaaatccccaatatacgtttcctctgcggctccccgtaaccacacacaggaacgcttgccttgaacgaggagaatgcacttccagtctcgtctgctaagcagttgactccttcacccaataattttgatatttaaatgtctcatgattatcggttaccataagaatataaacaatgtattttcagtttacatcctcccctgcctgtccgctaaataagaaccactgggtactcctaatcgctgaaggtttcgcacaccattgcctgcctcatcagggccctagctctagcctgcggctgcaactgcatgaggctgcacctgccggcgcaacggggccgcttaacttttaggccattgatgaaaagtcaaacaagcgcacagtactcggtgtaatcaggggcatttttagcgagatacctgggatgaaaacgggtgaccacctgaatcagagagcagctccggcgcaccctctgccccgacccgcgctccccgcccccagggcgaaataaataccgggtgtttggcgccgccagaagccgtgcgcatgcgttagcgctaagcgggacgttgcgccgggtcaaaggccagcggcgcaaaatggcggcggcgatgaccttctgccggctgctgaaccggtgtggcgaggcggcgcggagcctgcccctgggcgccaggtgtttcggggtgcgggtctcgccgaccggggagaaggtcacgcacactggccaggtaacggccgctgggtacaggatgcaccttcctccagccgcacct

SEQ ID NO: 33256 - DNA, 2300 bp, Homo sapien
ttttttgtgccttggactacaaccgacttctcaggttactaaaatttattattgaatattacacaaattctaaacgttctgacccaaataatcggctgccacaaatcgcctatgggcagccagtccacagcaagtgctgcccgctggggagacttcccgttccagagcccgcaggccctggaaggacgagacccaccgctacaggctgccaccaccgtcccgactcgcgggcgtcctccccggcgcgtgagcgacagcacaaccttaccacgacctgcgctgccggcgcagaaccagggccgcggatgcccggcgagcccactgccaccagtcgcccgaggtgcggctggaggaaggtgcatcctgtacccagcggccgttacctggccagtgtgcgtgaccttctccccggtcggcgagacccgcaccccgaaacacctggcgcccaggggcaggctccgcgccgcctcgccacaccggttcagcagccggcagaaggtcatcgccgccgccattttgcgccgctggcctttgacccggcgcaacgtcccgcttagcgctaacgcatgcgcacggcttctggcggcgccaaacacccggtatttatttcgccctgggggcggggagcgcgggtcggggcagagggtgcgccggagctgctctctgattcaggtggtcacccgttttcatcccaggtatctcgctaaaaatgcccctgattacaccgagtactgtgcgcttgtttgacttttcatcaatggcctaaaagttaagcggccccgttgcgccggcaggtgcagcctcatgcagttgcagccgcaggctagagctagggccctgatgaggcaggcaatggtgtgcgaaaccttcagcgattaggagtacccagtggttcttatttagcggacaggcaggggaggatgtaaactgaaaatacattgtttatattcttatggtaaccgataatcatgagacatttaaatatcaaaattattgggtgaaggagtcaactgcttagcagacgagactggaagtgcattctcctcgttcaaggcaagcgttcctgtgtgtggttacggggagccgcagaggaaacgtatattggggatttctgcaacaaagcctagtacaccgactgattttacagcatgcaaatacagcctctaaaaaggcccgttttgcttagagttgacttgggtataaatcccagcttaagctccagcatccagcttttcttttgctgtggtcagagcctgaggaccacgtgactccaagaacaaaacactagagatggatgagtggcggggaagatgataaagaggaggaaaggcatgagaaacaagaatgcacatgaaaacctccggtcccaaagatgtcccagcaaacgtggtggtcagaggcagatttgtcctggagctgataaactccagcggcccgcccggtgttcgccgggtcaggtggaaaaagtgggcgctgcgatgaagcgttggggcctgcagggagcgcggagtggacgcagccacgtctgcaactcacccggacacacacaaaaaggaaggcgaatggagttacgggtagatacctgaaaaggcagggataagcgagctaagggtagaatctaggtggcaagtatatgggtgttcaccgtacagttctttccctttttctctatgtccgaagtttttcataatgttggggaaaacagccgtaaccagttgaaactactgcccgtctccactcgtttcccggagcctgtttacatttctcctgtccacttaaaaacatgtcctctttctcagtttgttttgacattggtatttgccagttttttctaaggcctaagtggttgtaatttctttttcgttgcggatatccattttcgttcctggtttttgcattttttttcccgagagcgctccaaacagcacgacgatcccggtggcccgcagagtgcgcgcagtcggggagtgatacgtcgcactccagcgcctgcgcactcgctgctgcgtctctgcgccccgcactggacgtgggcacgccacgtgacccccccccccgccgccatcttccttcctggcagcagcgtccgcgtgccagtgcgcagacgcaggggtcggcgccgggtgagagcgtgcggccgggtaagggagccgtcttctcaggtcaggggtcccgggtgtcttgagagtgggggctgcgagagggtggggccggccaccttgggaccctcgggcgtgtctccccgagtgggctgcggtcagaggagcgtgggccggggcctggcggtctcagagggccag

SEQ ID NO: 33257 - DNA, 2300 bp, Homo sapien
caaggagtggggaggagggagggtgggagaggggaggaaggagggtgggggaggggaggagcaggaggagagggaaaggggttgagagattcatttctagcgagaaaccccggtggctagtttcttattatttacaggaaggtgatattagcgattcaggtgagaaagaaagaaacgcggcctgccgcgaaatcaatacagaattcagaaacaattattaatgtcatttgactcgtgttctttatatatttctcgcggctaccgacgctaaactgtctgaataatttgcatggagcggctattcattatttccgatggtttccctctgcaagcagctcggacgtggcccgctccggtccaacgcgatcggagaactcgtattttcatctgtaaattaaagcaattacgcagcagatattatatgatgtgtactgtggtctccagatagtcatcaatcaccttcaaccgagctgtcaaaagagcaggcagatttcgtttctgggaggcaggcttgcagctggggagagggcgaggacgtcatcattaattagagggtgaccctggggcgattcacaggtctgaacccaggaatctttctgagcaagtctgcacaacgctgccttgcacggcttccttcccaacttaccacgggaggccggcccagggggcgagggcaaccggggcgagtcccggtcccggagggcgatggcgcagaaggcggggaacgggttcgggatggcccgggcgcccccttgccgcccccttgccgcctgctcactggcctccgctttgaacttgggcaaggtcccagggagggtactggccgagggagtcctggggtgggcgctcggtcccctcttccgattgctccgtgcgccccagacagaaagctgggcaaaatggacaggggagggcgcctccgccaggcacccaacgccccctccctcgcagccagccctgcggggcgccgggagggacgagcttagcgggaggggccggggcctgggttgaggaacctgctcttccgagcgcgcagggccgcccggcagtccccggcttagccgcgaggggcagggggaagccggcggagcacggccggcggaaaggggatcggggaggaaagtcggggaggcgaggtgggggcggtgggctgagcgggaacttaaaagaccgcggtggagaagatggggcgttctccgcgacactcggctgcccagaggtgcaaagccggtgggcgcacgcccggggcggccctacagccctcgggccgccagtctcagggtgtcgggctccaactaaggccccgaagcccccacgcacctgagggcattttgaccagctcttgcgggctgtcttgcggccgcagtgggttctgaaagtccattccggcgtagggtggaaaccggcgggaggcgttgctgattctcgattaaacaatagtgacgagacgcgtgcggggcgcctgcgagccccttcctgccactcggagcagagcgcgccagcgcgaggccgggccggccgcctgcgcagcgccgggctaattttaactgttgattacatcttcagcgtgtcctttcataggtctcatttgtaattgagacgaatgattacagtggggcgggaaggagcagctgctcattaattaatttctaattaaaagtgcctctcgttctcgggtgactaaagagaaacaccgttcgctgggcgatattgactcggatggaatttatttgctaacgcccggaggaatggcccctccgtccaccgcgcggccgggactgtcctggcccctcccggcctgagccgccggcgagtgaccggcgagtctgcggccaggccgggctgcgcgaggtggggctgacgtcagagcctcctccgcttcaagccgcgcacatctgacttgacgggttcgcgcgactcgtttttttttttttctttttcgtaaaatatgtatttctgtcgccgctgcgaggccgctcggtcccagagccccctcgagcctccggaatgcgaagttaaaggaatcgcggcggccaccgctgctcactttgttacccggttagaaaagtttgcggagcgcggggatggactaaccggctctcctgcttcgccctcccagcgcctagaagcctgcagctccggagcagtggccgcgccacgccggccccagcgcgcagaaccctgcaggccccgcccgtccgccccgggccgcgcccgccatgtcctacccgcagtttggatacccctactcctcggctccccaggtaagcggagccccgccccgcccaggccaccgcagg

SEQ ID NO: 33258 - DNA, 2300 bp, Homo sapien
gagccgaagccccagaacaggcggccattcatcttctgagcagagtctgggagaagcagcctccacttcccagggcagccagtacgtgggggccctttcgggggcttcctttgaccaccaccgccaccttctcctgttctcttttgcctttccagcctgtgtgcataaatcgacgctccagtccccaccagcgggcgaccctttctccgtgacccagaaacctggcctctgaatcggctttcccaggccgccgcacacacacgctccacttcctgcccgccagcaggccccagcgcctggggtccgggcccagtcacagtcaccctgcctcgggaagctcgcaactgcccaggaggcctcctgacccgcccggcctcacccaggccccactactcattccaggacacagggtcaatccagcctgtggattggcgaccaccgggacatctcactgaaaccctgtagcctggcctaggcccgcctgcccaaaccggggattctcactgggccacccttctcccatagataatactggaatattttccaagtgccttcaccaaaaggccaagcctggagcggaggcacccagtgtccctttcaccaacgataggacgctcagcatctcaggtatcagctgaacgcgtctgcatagactcggagtgctgagccttcctccctctagggacccccggtactaaatacacccgtgagcaggtgggccagaagtcagccggctcccggagtacacagcaccggctcagcttcggggagatgaggtgctcccgctggcctggagcgctccgaagagcggaggaccagggccggagcaggccgcaggggaggcaggggatggtcagcccctaacgcgaagcgcaggcgggtcgcctattttgacggggttaccgttggccgtcggaaccatggaaggcctccggggagacaggccgggccctgacccttcttcggccagcctagccctggtgcttcaggagttaccctgggggccaccagttccccgcaccaagagctcgtccggagggagctccttccagcccagagaagttaactccagccaaaggcgaagccgggagcccggggcaccaggcaagggcctttctttctgagacctggggccagagaccttgggggcgcctgtgcccgcccaccgctcgggacacccggctggggtgtgggtttgagaggcctcacggtcgctgacgccgcactggcgaacctcgaggttggcaggtcatttcctcacagccccgaggccccctcggagccagtggtaggagaaggagccacagggacaagcggtgaatctctggattcccaaccgccctccatgggggcccgcggccctctccctcctctctcccgctgcgcccccgccgcttgctccctgggtacggcctgaggctggacggagcgccgtccgggcgtccaggactcaggcctggccactccgagccccccaccccccgccccgcgccggcccgcgcaccctgcttcccgcaacttgcagcaaacgcagcggcctctggagagcctagcgacgggtagcaaactttgtccccttaagcgcaagagcaatcctcgcaaagtttgtgcggcggagcccactccctacctgagctggggaagctcccgcccgcgccgtgtggctgccggggccgcggggagcagctcgcagcccgggacgcaccggggagtcgccgcagccgccgccgcccgctcccctcggcggccgcgcggagcctccgcctcctcggaaggggggaggggtctcggaaccccggggcgggggcgggagcgggggacctcacctacctgcggtggcgctgggccgctcccggcagcccgcgagggctccgcgcggaagctcggcgcgcgcgctccagcggggagccggcgacaactaatggagacatttccaggcggagcacctggcgagcggagcgcgccggcgtccccaggcgccgcggtcgtcagccgagcccgcaccggcgtgacgtgggcgagcgagcgcgctgctcccacccggccgcccattaacgctttctcccgcgggcgccgcgctcttgccaactttcccctccgtccggtctgcgcgcggcgcgccgggtgcaggagctggggtgagggcgccccgggtgccagcaggggcgctgggagctgtttgggcggggacgtagggctccgggaggtcacacagccctaacaggacagtgggaaggcgcgcgagccagatttggccaaacgctaagctcgctgcggcctcgggccctcggcccacgggg

SEQ ID NO: 33259 - DNA, 2300 bp, Homo sapien
ccggagccgctcgtggcaatgtacacaaacccttgcacgtgcgcgcacacaggcccacaggtagctctttgatatctaaatttctgcagatgcttggagtgcggctgcctccccctactccctcttcccctcccttatatggttaaaaaaacaccccagagcccccaattcactattcactgctctaaagctgggcaaatccaatttgcaactcagaagccagtcaccgtttcgaattcttcaaatacgccgtaattagcattttaattcatcctttaacgtttaaattcgaggcatttgcagccttcgccaaggccccagcgactcggtcgctgcccagaaattccgccgagggccggcagtcgcgacaaccccgtaatggcctcaatcgcccgtaacgtgcttcgccgcggcccgggcctggcccagctcagtaacctcgagactcgcgagccgcccccaggtcgccggagcaggagctgcgctcgggccacggaggactcaggcggcccttagcgggtcacgcgcccgcaagcacgatatttgaaagcatggtccgctggacagagtaaggccgaaacctgggcgcctcgggccggactccggagccgcagctgaatgctcggctcctgggcctaactcggtgacccccaccgccctgagccccgcgagtgaatgcgaaccgcccggccgtcggctcagaggccgcagtgacgcggaccctcgcgccccacgccaatgcaggcgagcacacagcccgctccgaacgcctccccaggctgcggtgcggaaaccagggacaaacggcgccagaccccggccccggcggagacgcacttcccaggctctcagagaaaatcagccggcgagccgaggggacgcgcggggggcgcgcgggtcccggccgggctcagggacgtccccgcctgccgcgctgccctccccacccggggcccggctcagcctgcggggcggccaaccgagccggcgactcctgagtcgccagccgcgccacattcccggcggcccccgcccgccgaacccgagccccgctccgcctgagccccgtctgggtcccggcgcccaggagtcccgcgtcccgcccgcgcccggttaccatgtaggacgggaagccggcggcggcggcggcggcgtcggccgagtactgcagcgggctcccgaagccggtggccgcctgcgccgtgaaggccgccgagcccgggtaggggctgaacgccgagcccgacgccgagcgcgccagctcctcgctgcgcggagccgccaaagccgacgcgccgtaggccgggcacgagtagagcgccagcgagccgggcgcctggtacaggtagccctgcgggtaggacatggtgggcgcggggcgcggggcccgcgtcacgccgagcagcgggcagggcgcgcggcgccctccatccacgcccggccggggcgcggcgcggcggcgggcacccggacggccggcggaggcaggccggcccgggtactagcctgggcggcccgcgggccggggcggcggcggggtggcggtggcggcggcagcagcgcggagccggtgggcgcagccgcgcgccaggccggcggtcggggtttgggggagtctggagtcgggagtgaggagttgaggaaggagcgctcgagtttccgagggacattggaacgcgcagctgtccatcacgcgctcatctgcatattcgggggcccgcccctcccctgctccgcccgctgcagcctccgggccgcggccgggggaggggcagagagacgggagggaggcgggggagggcggaggcgacggaggcgggcggcgggagggaccggcaggcttttgtggcgcagccgcctctctagcagctccggccccagcccgcggctcgcggacctgcagcccagcccggccgcgctgcgtgccccggcgcgcacccctcccactcccatccactcggagccacgtcccctgcccggctccggccggctcccaccgtccccggccaccgtcttcgcccctgcccggcccccgccccttccagccactaccccgcccccacccccttctccaccctcacggactaggcagaggccgcccgcggtcaggccaggccgggtccaattaggggactcacagcctgccccgctgtgcaccccgaggaggcccggcccctgtgtccaatccggaagtcgcagggaagtggggaggtcaggatggtggcgcccgcggctcgggtcttcctccgggcagtgcgcgcggctctcacttccacggtcccggacctgctctgcctcct

SEQ ID NO: 33260 - DNA, 2300 bp, Homo sapien
gcaaaaatgtcgcagactgtcgacggcttgcccaacccggctgctttctctctctctctgtttttcagctctatagtaattgattaaaaatatctgtcctggactgaattaggatgtcccatgtggagtcgcaacaaggttgaaaccccccgctgggtcgttgcagggggcccagcctgtgggaacggggtgtctgtgggtggagggagaggtggtcgtgggtgtgtgtgcgtgtgcgtgtgttgagatggcctgaagaggatgtgtgcaggatgggggtgtggtttgtaggaagagtggtgggggagcagtgtgggcgaaggggtgggtgggataactggtagggggcgagtggctcggctcgggagctcctggcgggaggggtaacgtgcctggaccgcgcctaccgggagcctgccggctcaggaggagccatcctcaagcacagcactgcagtttgcaactggttcccttgcacctggggaaagacagcctgatgccgtgagtgtttctcttgcgccctggaccagactggcaacccgggctccgctccctccgcgccgctgcagccgcaccacagggaggccgcaacatgccctgcgtcctgagatcactaaggctgctccgcaggctgcagggccagcaggggtgcaggagtcggctgcaggcctgagctgaggcccgccccaggccactgcgctctctcttctccaccgcacccacccgagacggcttccgaggatagaggcacctgctgggtgggtgctcccaataggccagcacagacctgacactcttccatccccctgagcgccccccataggtgacccttcggagtgggcagccagacgccctcttcggccatccccgagtggaaaagggttggagaagcgtgatggggagagggttctaggaagctggggtcctaggaaccctcgccaaccgcctcgcttctgagccccgcaaggcaaccgcccccctactccagccgcgcgtcacctgagctacctgtaatgcccactgcaccggcggcgccaacctgagctcctgcccgttctcgacgtgactgggaggcttcaggtcctgccagaggcggtttgtcaggtaacaatcatccccccagtgttttgacaacacaaatctgaaagaggagtcaacttagaaaaacaaaataaaataaaactctttaggggacggcgtcttcttagctgaagccctggcgtcattcccaacagtggaaagtcgtaacgttcagggccccgggggttgcgctgcggatttgggggcagaaagctcacctcagggccctcctggcaattcgcaaccaaggcgccccggatccaggtccatgctgggcggagtggaccgcgaggggtaggcgaccagacgcgaggccacgcggggagcctcgggccaggaggcagagcaggtccgggaccgtggaagtgagagccgcgcgcactgcccggaggaagacccgagccgcgggcgccaccatcctgacctccccacttccctgcgacttccggattggacacaggggccgggcctcctcggggtgcacagcggggcaggctgtgagtcccctaattggacccggcctggcctgaccgcgggcggcctctgcctagtccgtgagggtggagaagggggtgggggcggggtagtggctggaaggggcgggggccgggcaggggcgaagacggtggccggggacggtgggagccggccggagccgggcaggggacgtggctccgagtggatgggagtgggaggggtgcgcgccggggcacgcagcgcggccgggctgggctgcaggtccgcgagccgcgggctggggccggagctgctagagaggcggctgcgccacaaaagcctgccggtccctcccgccgcccgcctccgtcgcctccgccctcccccgcctccctcccgtctctctgcccctcccccggccgcggcccggaggctgcagcgggcggagcaggggaggggcgggcccccgaatatgcagatgagcgcgtgatggacagctgcgcgttccaatgtccctcggaaactcgagcgctccttcctcaactcctcactcccgactccagactcccccaaaccccgaccgccggcctggcgcgcggctgcgcccaccggctccgcgctgctgccgccgccaccgccaccccgccgccgccccggcccgcgggccgcccaggctagtacccgggccggcctgcctccgccggccgtccgggtgcccgccgccgcgccgcgccccggccgggcgtggatggagggcgccgcgc

SEQ ID NO: 33261 - DNA, 2300 bp, Homo sapien
tgcaggggaggctgtgcctttgcatggcacctgtgcctttgcatagcacctggacacctgtgtcatgtaggtaagggcatttgcacagagtataagggacctacatgcataggtaaacatatacgcagtgggctacctggaaatggtttaatcggtttaacttcataatcacagagtgagccacagataatgtgaatgaggtgatggaatttgccggattcccgtgaaacgctccctccacttcctcagagtccccagccaaagcgggcacgggcttctccggcatctgctttctttgagtcaagctaaatgtgatccttgccctgagccttgctccactattagtagccaaatgctaaagtatatcagggagactggtgggcgtgtacggctttccctaagggacaggagttatgctgtataggagagggagtaagaacaaaatccacaggccccagaacagctgggcccctggattcatctgtttcgacactgctttaaagaactacttgagactggatcatttataaacaaaacaggtttaactgattcacagttccacatggccgggaaggcctcaggaaacttacaatcatggcagaaggcgaaggggaagcaaggcaggtcttacatggtggcaggtgagacagagagcaaagaagtgccaccgtttaaaaccatcagctcttgtgaaaactcactcataatcacaggagcagcacaggggcaaccgcccccatgatccaatcaccttccacaattcttgatgagatttgggtggggacacagagccaaaccatatcagacccactgtgtgacggagttcagggcctgcctttgtttccctctgtgaaactgggtgagtggctcaaaatgtctgagcctcctttcccttacttgggaaaagaggagtttgagctgggtcaataggaaagcctcttctgatccttgcattgcgggaatctaagttatgtcctctataggggaaactaaacagggttatccttccaggattatccttccagggtgtcatgtctttctgtctcgttcaccatgcagctctgagcacttactgcgcatgaacctactgggtaaggggaccggtggggttcacggtagagcaggaggcttttccctgtggagcaggcattcctgagtggggactctggcatcaaagcatcccgaagtctagtagaaacatttaggagggaacagtcttgcgagttggggacttttgcttgcacttcatatcactataccaagcaagctcaaatataatcataagttaaagttaaaacatattcatttcatttctgattcgggtttttagtgcttagccaagaagccgaggaaagtcctctttgccctaacagcagcttgtttgccgaggggccccatgtacccctcaagtagaagcagctgccctctgtggcctacagcccacccctcccgtccacactcccacaggctcccgagtggaaagtacttgccatatttactttttcttggattccgcagtgtgagcctagacagatattcttttgcaagggaaggatgaggtcagctgggagaaagcaatatttccttgttttagataacattatgttttgagagtgctctcaaattactcacttatatttttaaagtcctgtttttctgttagattaacaatatatttgttatccaacttccaaaccctaatgcatgggaaagtgtatgccgggcgtattatactcggaccccaggaatattatcccagcgatcttcaggctgagccaacagctgattgcattgggcacaaaccttccataaacatcagaccctgcatccatgtggacgttttcatccctcaaagctagtgcttcataaagacactgaaacagacgaaggatgacttgggacagcccggatgccactgctggcggcggccgctctcggggtgtaggcgcaggaggtggcggtggcgcacgcctgggtccagcgcacctgggtccccgcacctgggtccagcgtagccgggtcagcgcgggtgagcgtgcgcgcgggagtgcgcatgcgcggcctgccgggggcggcctcttgcagttcccgccctgacgcagcgcgagattagagctcctgctagtccccagctgaccctgggcctcaaaggcaagccctgacctcagtcacacggggtggcggtgatatggtttggctctgtgtgcttcactctgcctcactcgccttccgcctgctggacgctgccctgttccccgcaggcggccgccgtggagggcaggcaccgcgctccctggctg

SEQ ID NO: 33262 - DNA, 2300 bp, Homo sapien
atctgtcttagggttagaaggtgtctggtggtaggctggggaacaggaaaaagctgcagttaggggcttcccggatttgtgtcaccaagaatccactccccaccaaccctcggcgtccccacaaacccagcccggaatctatgtaaaagcaggaaaggaaccctggaggttgtaggcggatcctggagtgtggaggggcgaattgagcgcgggaagcagcatgactagcaagacaatctgactcagagcagggaaaaatcaagcccgatgtcggagctggttattagtaattactaccatcacgggcattattgttgctaattataggcgatgtctcagtgtctgtcctcaggcccggaaaaccggagcccctcctgatgctgctgaagtccctgggcctcgaggctccgtgaagagagggaagcgaggcagggggtgaagggaccgcctggccggtgtccaggatacgggtggctcaaaccaccagcagaacagcatgccgactctggcccgatggccgccttcatcccgtagccccaacccggcctaaagccgagaagacgccagagtgcgctgctgaaattcccgcggagtccggtgtgctggagagccgcagcggggtgaactcccggccccgtctctgcgtaggaggtggttcgcaaagtggccccgggagccgggactggtacccggttccccacggcaccgtccggagctctccagccacgaggcgcagaagtggcctgccagcgccttcccaggctcagggaggcgaggaggcccgtgcacttggcatcttctcccgggagccgcacggccagggccgcggcgaaacggagcccatctcaagtgcgccgcgcctggccgcgtcctgtagcccgacgaggctgaggatggagaggggagacgcagggagaagagggacgcgggacttggacccaagaggccgctccgttgccggtctggcggcggcgccgactcgggttcgcgcgttccacacaagtttcctgtctgcctctgcacacctggtggacaaaccgggcgtccaggccacaccgtcttcccccttcgcgggggcgcgggggatgtttccctccggctgccagggggctttctgggtgaagagaaagcccctccccccgcgtctcccccacccctccctccgagaacccgcggcgccgactgcgcctgcttcccccgagctggcgacttctccgcgggatttgccctcgctcaaagtttgcacaattgaaagagcccgcagagctcggccgctccccgcttccccaagggcggcgaggccggtcattggcagacgatcggttactacccagtaggggcccacgggaacccgcatctggagtcgggggtgtcacgccacgccggttcagtggctcgcggagagcgtccgggtgcacttctgccaaagatgtcccctggaggccccggccgcgcgggactcgggggagaggccgctcccccctcgctgtcaccagcgtccaggccgccggccccttccccgctgcccaaacagtagaaaagcaggcgccaagttgtttttgttaaaaaggggacacacctcggccgcgaaactgcaaacccggtgtcagacagctgtaaacccgtgtcgacaggttgtcagacagctgcgggggctggtcgggaaggagcccacggcctccgggcccacaccccgccgccccgacgcgcgcgcccaccgcgagagtagctggccgggccggcacggggcaccacgtgctcgcgggaggggcgggagcggccggcgagggcgggcgggaggcagggagggggcgggaggggagccaggggcggggcctgcgctcaaggggatgccaatcaaagcatcaacttcaaattgtgtctgaaagccccgccgccgagcggagggcggccgccgcagtcggcgcgcgattgcggatccgggcgcagccgggagccgggcgcctgcgagcaccgggcagaggagccgcgaccggcctccatctcccggcccgcccgagcgcgcccggccggccgcccgctcctccctagacccctcgcggcgccccctgcaaccccctccggccggcctccgcctccctccccgcgcctttaatactcgcccgctgcggcggtcgccgagtccgcggacatgtccttcccgcagctgggctacccgcagtacctgagcgccgcggggccgggcgcctacggcggcgagcgcccgggggtgctggccgcggccgctgcggcggctgccgccgcctcgtcgggccgaccgggggccgcggagctgggcg

SEQ ID NO: 33263 - DNA, 2300 bp, Homo sapien
ctacaatgaactcaaacaaatttacaacaaaaaaacaaacaaccccatcaaaaagtgggcgaaggacatgaacagacacttctcaaaagaagacatttatgcagccaaaaaaacacatgaaaaaatgctcaccatcactggccatcagagaaatgcaaatcaaaaccacaatgagataccatctcacaccagttagaatggcaatcattaaaaagtcaggaaacaacaggtgctggagaggatgtggagaaataggaacacttttacacggttgctggaactgtaaactagttcaaccattgtggaagtcagtgtggcgattcctcagggatctagaactagaaataccatttgacccagccatcccattactgggtatatacccaaaggattataaatcatgctgctataaagacacatgcacacgtatgtttattgtggcactattcacaatagcaaagacttggaaccaacccaaatgtccaacaatgatagactggattaagaaaatgtggcacatatacaccatggaatactatgcagccataaaaattgatgagttcatgtcctttgtagggacatggatgaagctggaaaccatcattctcagtaaactatctcaaggacaaaaaaccaaacactgcatgttctcactcataagtgggaattgaacaatgagaacacatggacacaggaaggggaacatcacactctggggactgttgtggggtggggggaggggggagggatagcattaggagatatacctaatgctaaatgacgagttaatgggtgcagcacagcagcatggcacatgtatacatatgtaattaacatccacattgagcacatgtaccctaaaacttaaagtataataataataaaaggaaaaaaaactaaaaagaaaaaaatgaatacacttatgtaattcatacccctatcaagacagaccatttttagcacccagaaatttctcttgtgtacctccccagtgaatcccctgctagaaggaactgctgttatgattttttcaccacagattaattttgccttttctggaatttcaaataaatgggatggtatgcaaaaaaaaaaaaaaaaaaaagaaaagaaaaagaaaatatcaacttttcatacaaggggttatttttattcaattctctcaattaaatgcaccaaaacaaataatcagattcttccacagaaaaaatagcaaagatgctgtgatttataatggttctaaaattttttaatgctgagaaaaaatataatagaataaacacattgtggggaaataggcaaatatgatgaattcacaaactgaatactttaaatttttcatactcaagaatgtgtgacatcccacagtttgactgccaagtttagatgccaatggtgaaaagggaggttctgttttatgaactgaaggaatttttgtgctggtaaatgaagtcgccatgcaaagtttataatctgctttcattggagactcaaacagagatgtgttctgtgagttccatccttcttaaaataatttgttcccatttttaatgttgtttcttctctttcctctttttcagcatagcaaaaattggttagcaaacagacctggcttctgcagctgaagccttctctttttccaagaccaaaacccagtaaatgaacagcatcacaatccctgagccatggagcacattttccctccctttgcttccagaagaaaaatatttagaggctgatctttaggaaactttctcttgtcaggtgccatttcatcctcttgctgagctacctcactttgagcataaaccccatttctctaccctgtcctttccgttgtgaaaagtcttcacaaaatacttcaaaaaccatgtttcagcccatgtcgtatgagtaacccacaatctcatatctgttatttgtagccaggatagtcacataacttatcatcaaaacaggacacttttgagagtgaacgatgatgatattaataattttgccaggacaacaggcacaatccagaatttagaatcatccaagttctgaccagattggaagttctggaaagactttacccatcaagcccctgtgcatataaccatttatgcttcattaacacaaagtaaatgcttcatatttgtttattatcatgatgacctgcacaataagaaccaaaaccaagccagatagtgtagaattggcctgttcaactggcagtattaataaacagcacctgcaagaacgggttagtaccaaatagcaaatggatcataccaatttaattctttacttgattccag

SEQ ID NO: 33264 - DNA, 2300 bp, Homo sapien
tatttttaaaattccgaattgcttattctcattcttaattattttttcagattctatctttcttaattatttgcgggacatctttgtgtattaatgatattaacatttatgagtcacatttattgttttttatttgattttggataatatcatcatataatgatttcaaatttctgtagacacgactctaaatcttttattctatagtttctggtttaggtttttgttgcatacttaacttggccttttgcaactccaagttctaataaataaactactttttgttctttttctggatttaacatttaaatagctaatccctctgcaaattgtgtgtgggcgtgtggggaggagatggagagtttgacttattttctttccatcccctagattctaatctgcctggctaggctcagttcttttttttctctctaaaagagagatgaattttataattatgttttagaaaacatattcttttatacattttgaaaaggttatgtcatagccatagattcatttgattaaaaaaataaagatttcacattttcatttgtgtcagatgtttttaaaaatcctaatgtacaggttggattcactgggaagcagcctctgaaatacagatgaacatcctggaagttttttagggagtgatcacaggaccaatacctatgaatggaggggaagagaggagaatcgggcagaggaagaaacgggttgaggtgcagccccagtgagatctctgctaaccctacagggagcagaccttatatctaaaatgccccctaagagcgttctagagttggtgtgaggagacagagcctatatactactgcattaaccagtcattgtcaaggctgcccagaaggcagcaggaccttgggcaaggtgactctcagccaaggcaattcctgaagatctaccagcccaaaatgttttcggcagccagggaaatggagtccttctgttctggaaggggatctgggaggtggagcccaacacccttgaaagcccactgttgtggcctctctgatagggtcactacatgtgagacctgggagcagctcacccaggaggctgctagcatgtcctcctggaaaaacttagcagaggaaatttcctggaatgaactacagtctctgccactacagccagcctcaaatcttcaaatgatgctcatatctttcccttctttccatacaaggctgtcatcacacttggacagcatctcttctggtttgcctgggccatgaaccagctcctgtccctggaggtctgagtctgtgtttatcatgctcttatcagggaatggttccattcactgctaaaactggagaagaaagtcctaagaaatacccacgtggataccatgtgtcaagcttatttctccccggctccatggagaggtgacggcacaccctactgaaggcaggggcagctaccttgctgcagcagtaggacctcttctaggtggcctggcatgccatgtgcactgcagcacctccctttctatcaagtgggccatttagtctgatgtggtgtcacaagaaatgccatactgggaatcagtcattctgtaagagggttcccttcctttggcacaagcagtctgaactgcccacgtggtgactggagttttgcattcagtggaattctgagtgtatcctttggaaatcaggacttctaaaatccacagaaatctcaactgtctagatgaaaatcacacattcacaagtggatatgatgactgaagaggccacttctgctgaaacctaatgattttatatgttggaaatgtagcacatgaaatggtcattgacttagcacctacactgaattttaaaaaatgacccctcatcctcacaggacatcacctctgagctggcccagcagatgtatcttcgtaggctgtcccattattctggactggacgcttctgatggtgtgatgtgtggtgagattagtgctgtggtcacgtccccaccgtcacgtctccgtttttataaagtgggtccctgggtatgacgtgatgtcacatgaaatgccttattatgcaccaaacattctgtaaacccccagagcaacagaatactgtgctgaggccccaaaacagaaaggaaagctcaccaccagaatgtgccttttccttatcaaaaagaattgctgccccttacaggacaggaggactccaattgtgaccaagttggagcagccttgagccacaactcagacttattttcattctctgctcattggccattaggaacccgatccttatggtatgttcacactgtctccag

SEQ ID NO: 33265 - DNA, 2300 bp, Homo sapien
cagtatgaatgtctccaggtaacaaagaggggtggttgagtccaggctatagaggccagagtgggagctgagatgcaaaacacacgagtggaccgagtttaagactggccatctaacatggtggcagtaactcgcagctgcctgtccgtctcagggagggatggagagggaggggcaaactggagcacacgtgtctgccttaaaagggactcctggcactgagtggccagcgcatgggttggtgccatacagtattggggaccagacctgcctaatttttaaaggtaaaatggaaatctaaatatgtatatggagtcccttcagtttaaaggtgtcccagcaaagtaaccctgagaacaaatattggaagagtcaaaacaaaccgccagcctcaaactacttcactttgcagcccttcaagaacttagcactcttaactttgaggtcaaagtttaggaaagcagttttgtcatcatttgtttacatccagggtcagaaaactctctactgcctaagatcaaatctggccagctgactcattttgtaaataaagttttatttgtttgcagatcgtctgtgaatgctttcacaatggcagagttaagtcactgcaacagagactgtgtgccctgcaaagcctaaactatttaccatctggcccttcacagaaaaatgttgctgtaaattatttagaccattcacagttagcacttgtttcctttcagacagaggttctgattacttaggtcattttgaatatcaagtagacgtttcaatagagaataaaaattaaattaaaaataaaaacaaagtgcttagcaaaggatctgagagagagtttcttctaacggctgcatgctctcccatgcccagtgccctttcacaatgaaaggagccagggccctttctcatgtggaaacaaatggcattttagattaaaaggaccaaactttgtcataacccttttctaaattgcataaactttaaactaaagcagtgcaagtgggcacattaccttgtatgtaaaaccaccatccatacaaccgaaacagagaagaattggatgtgtttgtgccctacaaagattctgtttagtctgtaattttgttccttcctcatctcacacacagctgaaactagtcaggtttcaaagaaggtagcattgtattgtgcatcaacacttgtctttagtggaaaaaattacaatgattgtgtgcaaaatttttgtagttcatattcttttctgaaagattagagtcgttctttattactttatacaaattatgagaacacagtgtcattaaaacacagacacaatgatgtcaaataactttccagcttggaggcctatgggtggctctagtccctctttgcaggttacagttgagaaaaccaagccccaggaaggtccagcaggtctgcggacccaccgtaggggcacagcgctcaggcctcatatacttactcttccccagccctgctcttggcccctccgcaataagatgatttataggccaaaagtagtgaggcaccgcactgtctcccagtgctcacagcaccccgacaatgtgagaaggtcacatagtaaaacacaagaaaaagatattttgaagaagaaatattaaatgaattatataaaatgtagaactcactatgaatttggactcagtataactttagaaatcagagggctctggaagaactgtgcctccggagtggttggcaacacttgtcccagccccctgtgtttccacaagatcctttggccaagttctaactgaacctgagcatctcagctcctcggtgctaataggattagcgtccttccctccacaggccaaacacgtccttcaaatgcctaggcagtaaccagatcacgtcagcccacggtttacacgaagatcctgttcatgactgcactcttgtttctgtcgtcctcccttactttgagacttgactgtttttagtaaaaagaagaaaagaaaattgcaaaccaatgacaatcacaatatggcatttataagctcctttccttttattactaaacacagaaatacttaggttaaatagtaataatgtatctaattatacaataattatcttttttctaataataataagttaaatatttgttattattttattattattgctattggtattccatagcatctcttgcggtgagacccctcactcttccccagtgctgaagatgcacatagaagatcagtcactcagacacctcaggaaataagtctcagcacttttccctgaagacttctggtccatactaacactgg

SEQ ID NO: 33266 - DNA, 2300 bp, Homo sapien
ggtgaagccagctgggatcctgagtctggtggggatgtggagagtctttatgtctagctcagggattgtaaatacaccaatcagcaccctgtgtttagctcaaggtttgtgagtgcaccaatcgatactctgtatctagctgctctggtggggccttggagaacctgtgtgtggaaactctgtgtatctaactaatctgatggggacgtggagaacctttgtatctagctcagggattgtaaacgcaccaatcagcgccctgacaaaacaggccactcggctctaccaatcagcaggatgtcgctagggccagataagagaataaaagcaggctgccccagccagccgtggcaaccggctcaggtccccttccatgctgtggaagctttgttcttttgctttttgcaataaatcttactactgctcactcttttttttttttttttttttttttttgagacggagtctcgctctgtcgcccaggctggagtgcagtggcgggatctcggctcactgcaagctccgcctcccgggttcacgccattctcctgcctcagcctcccaagtagctgggactacaggcgcccgccactacgcccggctaattttttgtatttttagtagagacggggtttcaccgttttagccgggatggtctcgatctcctgacctcgtgatccgcccgcctcggcctcccaaagtgctgggattacaggcgtgagccaccgcgcccggcctactgctcactctttgggtccactctgctttcatgagctgtaacactcaccgtgaagatctgcagcttcactcctgagcccagcgagaccacgagcccaccgggaagaacgaacaactccagaggctctgccttaagagctgtaacactcaccgcctaggtctgcagcttcaatcctgagccagcgagaccacgaacccaccagaaggaagaaactccgaacacatctgaacatcagaagtaacaaactccagacgcaccaccttaagagctgtacccactcaccgcgagggtatgcggcttcattcttgaagtcagtgagaccaagaacccaccaattccagacacactatgggctcacagcgtgtactcgcgcacacgcagtcaggtgtggatgtacacccgcgcacacccaggcacatgtacacccgcgcgctcacacaccccatccagctacagcagaattctggccaggctgttgaccgcacacctgctgcctccttggccaccctgtccacacagtagcccgatcgacccccgtggcggccgagacccaggcccatccgcagccctgagacctccctagggattgcacccagcagccagtcaccggcctccgcggcctggccagttgagggtggccgtgaccgcggggccaggagcgccgccacatctcggggcaaatggcgcgggggaagagtttcctcctcagcctccccgtctccgatcgctccgcaaactccagagcgaggcacgcgcctttaaaggcaggtccgcggctctcccacgtcctggcgcccggttttccgcacccagtgtccccacagctgtgcccgggcacagaggcgcggccagaccgcactccgcgggctgcaggtgtcccggcctctggcggcgccggtgcggcccggaggtgggagcccgcggagccactgcagtagctggagtcccgccgagtccccagccccaaggcagggcaggagcgcgcaccggccggaggtccatgctgagcatcgcccgcgccggtgcccggcagcctctccaactgtgtggtccccgcgcgggcagagaggcacggactgcaggccgtgggcagctccatcttcccgcgtcctcctcctctggcgctgcccgctgtctcccgccttccctctgctccccgctcgcctccgcctcagcgccccgctgacctcgcctcctcccctctgctctttgtccctgcactctcccctcctcggtcctctgacccccccgccctcacctcctcccctcctctctcccctgcccgccccgcgctctcccaccgctcccgccgcccccgccgccgcggctgccactccgccccccgcgccgcacggagcttcagtaataaccccggcgcggcggcggagtcgctgtggggaatcctcccgcgctctgcctgggtcgggtcctccctgcccgctcgcacgctgccggccggggaccctccggtggcccctagcccctcggagcgctcctggatgaagccccgcgcgcgcggatggcggggcttggcggcgctgtggatgctgttggcgcaggt

SEQ ID NO: 33267 - DNA, 2300 bp, Homo sapien
ttctacacatgtatcccagaacttaaattataacaaaaaaaaaatcaatggtcacatgctcactagcgaacataataacaatgcagagaatataaaatagaattgtgctagtttctcttcctacccccctctgcctttactatttgccttctgcattttgtccagataatctacaagaatttacttattgccctgtgttccttacaggctacactttttttcctttaaaaggtcactttggcttcagagcttacaacgtactttgaaagctcattatttgatcaactttgcctcatgtggtgaaataatattttagatttcattcttttagagtatatttttacaagctttaaggtattcctttctatagctttatggtaatttagttaccaattatccgttgttgattattgtttaaaattttacctcattacaaataatacttccatgaaaatatttacataaactttttaaaattcgtctgggattatttcctcagggtgatttcccaggtcaaagtattttgcaactcattgccaaagccgactttaggagggtagtgtcatttttatttcctgatatcagcagcgtttgaaagaggtggccggtggtggactgattttttgttaatgcgattgatttctatttagaaggctatacatctcctgccacctgtcccacccttctgtctctgttttctggattctccttccctgctatcctcttagggtgctcgtgaacattcctctgctcttagagagttacaggctctgtctttgagtctggagcaagctgcagtcaggtgccatctaagcagccaactgtggaaagagtgggaagggtggagcccgtgggagatgctcctgttgggtgggcgaggcatggagctctgtccgtctcccccagccttttggaattgagctctccgaaaacaactggggcctcacgggagccttgcagggcttcttggagttcagtttgcctgaacgcggagattatgagcctaccacttatatatatgagtttttagataggacaaacttttcctcttgcaagattattgtgtttgaagtctttcaaatacgtctttcccatttatggaaaaaatactgtattaataaagacaccaaatcactgtgagaataattaaaatacatacatttacagtgaaattaattatattaaaaacattgcaatactcaaagctcatcatttcataattatttcactatatttgataataatctaggctcttgaggccactggcctcttttgcatctgtatggtagaaatatcacacactgggggctgctgcgtatctctgtgcactgaatattcagtgatggcacagcagtcattgaaatcagccatgaggggaagatttacaccagggaaattggcaaatgccaaaatccaggtcgttcttctccagacagcgggttgttgaatgtttattaccacagcattgtgtttatgtaaacatggcttaccagtagttattttgcatgataaatattatatgtgcccccagtaaaggacgaatattttctctcttcaaaataaaggtcataagaatatgacttatttcatctgagaataatttgatttcttaaagagtaatcacctttttatacacaataaaatgtgctaaccttccactgtttggaacaagccatcctgctttctgtcatccttcccctgactcagctacagtggtaggagctggtgggaggtgaggagcatgcccctgagtggctgggagggcagatgacagctgttaacatcaccgcatcactgttggagaatttcctggcttggtaatagcacattatggggcccttgttacaatttttttctttaaactgtgatgttccatattgcacactttgaattcagtatgggtaggtgttgcatttttcttcatcatttttgactgggtggaaaggtcatgtggtaaaataatattatatcttaagacttcctgattcttctcggaattccgaaatgactcagcctctgctcactcttttgatttcagaatatgacctggtctctgcctacgaggttgaccacaggggcgattacgtgtcccatgaaatcatgcaccatcagcggcggagaagagcagtgcccgtgtccgaggttgagtctcttcaccttcggctgaaaggctccaggcacgacttccacatggatctgaggacttccagcagcctagtggctcctggctttattgtgcagacgttgggaaagacaggcactaagtctgtgcagactttaccgccagaggacttctgttt

SEQ ID NO: 33268 - DNA, 2300 bp, Homo sapien
acctgtgtgacctacaaagcttaaatatttaccatgtggctcttcagagtctgcctatccctgcattacgtaaacaagactcgttttcattagatgtcttgagaactggctttgagaaaggtaggagaaaatacacttttattaacatttttgaagggaaatatttgttgtttcttaccttcaattatttgcagcacatttgattctttctgactttcatttaacatctactatgcagcactttgcagcatttaaagggaagactcatctgtaagacataaaaaccaccatcatccaactcaaaatgtgatgttactaaaaattactccgtgctaaggggattttttgccccttaggtggcagatccttggggttgtggaggtaaaccccggagcctggaagagcaggtaggatttctacacctagagctagaaggaagcgtgttccaggtaaggggaaaacactagcaagggtgcacagacagggaggcagcagtgagaactccaagtgcccctaatcataaaagtgcgtcatggctgcgggtggatggtgtagagggagagagagctggtgtcttctccagtaaggtactttggaaaaacacacatttaagtaactgtacataaaagggaagtaatggtgaagataaatttgtctgggatcagacgctagcaccgggacgatcatgatccctacaggtctttctctaatacctgctgcccctttccctaatgggtcacatggtctgtcttccactgtatagctgcgtcccgctatggatctgctcacttcccttttcttttttaactttacccttgttttctgcccacctgtctctgagaaaagctgagacttctatcaccggcaggtcctcagttaggtacacgcctgtcttgcttgggtgtcaacgacaggaaacttagctatcgctggatgtctgcttccgccactccacagcaggtggtatccagagtgtgtaagcaaggtcaggggtgcgaaatttggagaagaaaactcagagaaaaatgcagactgctttttttggaaggggtgttttcagttgcaatttccatactgaggagctagaaattggctggtaaggtctagacattaacttaactaaacgtgcattcctcctcttgaatttggactttataaggaatttggattgtataaccacacgatggaagctgcgagaggcttctgaacaaggtactgacggcgaccagctgtgatgactaaaaagacgattctggtggtggtggatacggtggctggagataagaaaaacctcggttcaaacgagatctgaatttacccactaactacgaccacgaggagtttattcctttatctttccgttttctctctctcccgagaagtgtcaaaaacaggatttggaggtggcaggataatggccaaaatgggtagacaaggtggcgaacgattcaaccaggctctgggcttggcgcatggtgggcggtggcgcccacacctgggcctgggaacccgccgctcgggcatcactggctgccgcggcgaccggcgaggacacatgaccgaggagcgaaaggtcagaagacaaggggactgttacaggagcaggggagccgccactggctgctaaggccgtgcaactggcgccgaagcgcacgatctccgcccgccccgcagcgcgtcgggaactgtagtccctccctctcctgctccctggcccaggacgggctccgggacagcgcctatccctctagctgtaaatcacgcactttcctgtcctggacgccgggtccttccacttctcaggcgtctggagcttacgtcacgggcgggtcaccgcccacatagcggaggcctttaggtgtctatggaaagcctgtcgtacagcaaggtggcaataaaggatcgacccttaacagtggtaggaatgcaccttcgatccttctactcctattggctgctcctctgtgggcgtctcccccgccgcatagcacagctcctctcccggtgttgctcaggcagcgccttaggcagccccgcgcccaggggaggggcggggcgagccagggcggggcggggcgagccagggcggggcggggccctgactggactgcgtcgcgctcgggggccgcgccgggtagcgtttctttttagtgcctgaggcagctctggctcggagagccttttgctagccccacggggacctctgtgcacggatggacccgcccggacctggcgggaagcggcctggcaggcggcggccccggcggcatcagcagagacaggacggggccgacgccgcg

SEQ ID NO: 33269 - DNA, 2300 bp, Homo sapien
gccagaggccagcaacctgggtcagagcctttgttactagatgatggggaagtaacagtgtgcaagtaggaatgtttgaaagttaagagaaacataaccctgtgtagagtggggtgtgacacttggaagcatgtctgttattgggggaggtgtctctgcggggtgctgggcacccttaaggagagagcagaacagtgttggaccaaagctggagaactccccacccaccacagagattcctagcctgcccctgctcaaacgtgattgtaaagattcttcaggaaacgtgtacttttaaaaaataatgcatttaattgatagtcatgttaatctgttgaattagtgtttgacaagtgtaattcatattttttaaggaaacctactttggagaatacacagattccagcgataatgactcagtccagcttagaaattctgctgagtgtgtttcagaagatgatacaactgaatcacagaattattttggctcattgagaaaaaataaaggaagtggcacatgggaggaaaagcccaaatcacatgaagctatccaagctctgaatacatgggaagtaaataaagtgacaacttctggactcgagactttcacagcaacactgagagaatcttctgccacacactccttagttggtgaaaaacactggaccacagcatctcgatccatgagtgatagaaaaagagacattttacatgagacaaaaacacaaatggaggttagggagatggataagtcagtacaaactgagaagaccattcataaactcactcgaggtctatgcattgagagattgtctgccagccctgcacaagagaaggaagctgcccctgggaagtctgagttgtgttcttctccccttggcaaaaggccattaaatgaactcatggaatctgaaggaaaaaccgtattgtctaaaatgatgggatcgcccaaatcagagtttactaagtggacacgaattaatgaaatcacttctgaaccagaccgtatcacagtttctggccattttcacagactatctagagaattggaaaaggaaaaagaagatactcaagggttcactttaggagaatcacctgaatcagaagatgatgactcaggtgatggaatggatgtagcagggcttgacattgaaaccagtttttcttcctcttctaccttggtagcattgtctgttggcagtaatccccagtcttcttctgggttagactgtggtaatgatacagatattactactaaagtattctctactgaaccgcatcattcagaacataaattgcaaactaaaactttaaacacattacatctgcagtctgagccaccggagtgttctataggaggaaacaacttggagaatagcttgtgtgccttgagccctgaattgggagcatctaattttaatgatcagaagagcagtgggatagaatatacaaaagtagtaaaaggcttgaccaaaatacattcacttcctcggtcagtatttatgaaagctacaaaagatgggcaatgtgaaagtcaagatccaagaattgagctcacactaaataagccagatttcacatcattaataggttctcaggctgccttgatcaagagtggtttgggttttgttaaaagtacttcatggcaccatagtgatttattaaggaaaggtggcgaagaaagtctgagagccaaatcagaacatgaacagaagactagccatcagttacaaaaggcaatgccattcctacaaaatagaggaccaacacccaagcctgatcttcttagagaaaataacaatcctgtagaattcaagaccactgcatcggtgttgcctaatcaagtatcagttatcacaaaacagacaagacctgaaaaggttcagagtgccaaattggaacacttgaggccacatagggttgagcctaccttagtaacagaaaatagtggcaacaaaaccggtatgtcaactgtagcaaaatgtgatggggaaagagatgatacaacacaaaacatcacggaggtggctgctgtgaaaagcatttcaccagaagtttctgcctctaggagaaaattagattttaattctccaggtggttcttcaccagtagaaaattctgattgttccacaaatagcagattatctttctctcctgaaaatatcctcatccaaaaccaagacattgtgagagaagctgcagtgcagggagatgggcagaagcaaaggcagcctcaggccacagatctggactccagtgggacacatggcagtgagatgcttccagccacagaagtgact

SEQ ID NO: 33270 - DNA, 2300 bp, Homo sapien
ctaatggactttggaaattgaaatctacaactcccggtggtgctttgcctgagtgttttggcaccacagacactactttttcttcagcattttgcagaaaacatggagagacacaggatacctcccaaagtagcctgcctggtaccttacattgttacacaggcattcgagaggggggagacgacactgaggtagagagtgaggcatttagctgcagtgaggggagcgaacagcaagatgctcctgatgactcacagaaaaatttaggagacacagatgctgctgtagccgaggtgagaccttccttagaggtaggttatttgacgtcagctctgcaagattttaacataagtactttttctgagctggatagactttccacatcagaggttgtgatgtttcttgagagctgtcagttaggggattatagttcaggggactctgtttctgaatgttctagtaaaggaaccctaagtaaagaaatgaacaaagaattaaaggcaagtgaaataggagaaaaatacagaaagcaaccctgtgaggaagaaacacttggaacctgtgaagagtggattgaatcagaggaagatgattattcgttaaaaaatacaagtcagctcactcagtgttctttggaaactctgtctgaggttctgaccaagattaggcaagaacttcaaacaaattctgaagattgcaatggtaaagatactggcagtttattgctcttaaatgtaaataacaacatgaccactgagaatttaaaagagaaaagtccatttcgggaaacgactggctcctcatcacatgcttcagaaccaaccccacaagcagctgccttggacactgagggcagctctcccatcagcggtatgcctcagaatgaaaaccctcagagcagaccagaggcccgttcagatgcaggcaggcaaaccgatggtggggaagaagacctgccagaacctgtggagccatcagccttgtgctctgactctgtgatggagccatccatagagcaaagttctaactgcgaggccgaaacaacatttcagtgtcagatagcaacagtgacctcagaagttataaacgtacttataaataaggatcagaatctagtcattgaaaagggggacaactggacaatcatcagtggtgtagctgtcttgccacatgtggaccaggtcacactgtgtgacattcctggagacatccctatttctcaggatcaaggagagctggaagctggttgcatcccagtgacttctgctgagaagtccccagaggccagtcacactggccctgcatttcaggaggctccatgtggcaataatctttcatgtccccaagaggatgtttcaagcagtggtcagagcaccaactttgataagagtcgtttgcgaaatagacccgttaagcctagtatatggattagttctcaaatctatgatcaaaacttcgagactcagattgttgcgtctgatcacacatattataactcaaaactagagccatctggcaaaaataagaatcgatcaaagatttcaaacaaagatcagtcaaacaaaccagtaaaaacttcagcgtcgagcagagttgaaactcatcagagtgaagttgctcagtcattttcaggggaaaaagctaatacaaaaactcaaagaagccaaactcagaccattttagcaaatgctgatacatccactcctacagattgttctcctgacacactgagtaaaatacggcaagaggtggggcctcctttgccgcctctgcttgctcctctgatagctacacctccaaggacttcacagccactgtctccactgatatcgagttctagtccttcctcaccagcctctcctgttggccaggtttctcccttccgtgaaaccccagtgcctcctgccatgtctccatggccagaggaccccagacgtgcctctcctccagatccttctccatctccatctgcagcttcagccagtgagagggtagtgccgtctcctctgcagttctgtgcggccacgccgaagcacgcacttcctgtgcctggccgactcccaccctgtgcatctggccacgctgctgtgggagggcctcaggagaattctgtgaaaatccttgacaccatgtatccagagttatctgccagggcccggaccctcaacatcctcaaagggaatattcaactcacacgaggtccgcctgctgactgtaagaatttaccgggacctgccagtgctatgataggattcaaaacgatcacttcagcagcaactgcttttgtcaaaactgggagc

SEQ ID NO: 33271 - DNA, 2300 bp, Homo sapien
ggccaggtttctcccttccgtgaaaccccagtgcctcctgccatgtctccatggccagaggaccccagacgtgcctctcctccagatccttctccatctccatctgcagcttcagccagtgagagggtagtgccgtctcctctgcagttctgtgcggccacgccgaagcacgcacttcctgtgcctggccgactcccaccctgtgcatctggccacgctgctgtgggagggcctcaggagaattctgtgaaaatccttgacaccatgtatccagagttatctgccagggcccggaccctcaacatcctcaaagggaatattcaactcacacgaggtccgcctgctgactgtaagaatttaccgggacctgccagtgctatgataggattcaaaacgatcacttcagcagcaactgcttttgtcaaaactgggagcagctctggtggtgactgtaaccaagacaagtcaagagatttggggactcagcaggattcaagcgggaaaagaacactgtcaacgtctacactgagaagtgctaaaagactgcgcctggacactgggtccccagaaccagaaaccaggggagtcactgcagaaggaatccacaaaaacctcccagggaacctccctccagctgaagttgcaacaacaaatgaggaaagaagttgttctagtccagccgtcagtgcagtttcacagttgcctttaagcccaaaagaaactgtggagtcccatgataaagccatagctaatgccctgaagaaaattgcagagttttcttttgatctgttacctgtcattcgtagtcatgtgtatgtgggaaatatctccaaaaagcccgtaatgagagatcaagagaaggaagttgtttatgaatttagcacaacaaaaaaggtatgtggctgctcttttctaagtgcattagggattacatgtcctcaaagacagatgctgtttactgtcagcaaaatgtgtagatgaccatgaacaaaagttttacttcaaggatgagagttatccatgtaaacattacgactatatttctagccagcattttacagatttaaaatatgataagacactggagatttggtcatttctattcattaaattacttaaatttttttaaagtatctgtcaggactaaaattacatatatccacttgatcctggcatgtttagaggcttaaaattattttcttcaaagcttcaaattatcacataatttttcttttccttgagtttttgttacaaatcaaacaggagcaaatgcttagtgtcaagagagggaaaaaagggatggtttaaatttaaatatgtagtttattaggacttttatagttctatattttctaaatatccactggtaccttgcttggatgacttctagtgctagacggatcacacttagtgcttatctgcagacacttggagtcattttggcataaatatttatttttttagattgcttccttgcagaaagcataaggagctccgtaagtcactttgaaaggaagtgaatgcatatatcaaattatgtaatgctcctcttaggacaaaaaatgttacttagtattttaaatttaaacagtatatagagtaaattagagtttagaaaacaagaatgagagtagaattacatactgtatttcatatactcacacagattacataaggcaaaacccaagaaattatgattatttgactagtggtagtgacagtatgcagctaggtcttttgagacttgcattctggcatctgcagcatttaccagccataggaaacagacaggcgtggggatttcttcagtacccccgacctcgattctcatgatttaccatgctaggtaagttcttaccagttactatgctctaccttctgatgtagcgcaagttttattttttcaatagatacttaagttttgtaacttttagataatctttggtaggctgaagataagtatgagtgtacattgcctttttaatttttttttcaatccagcatttagcagagtgcttgcttcactctattctctcagaactaaaaattcagaagatatctatggaccacaattacattcacgccctctgcagggtgtatgtgggtatttgtcggcaactcggagacttggaaagagctcgtttgttttgctacagcctacttaaagaaggtatgcttagattgtgacaattttgtattgaaaatatacgattgcctttttcccttatactggagtctatattttcagctctgattactgtgtgtcttttaaaataatgttatgttttgtccattgaata

SEQ ID NO: 33272 - DNA, 2300 bp, Homo sapien
accaccctccactgcccacccacacaccaagctgtaaggttgggttaagtttctgatgcaactaggcaatgtgaccccacgaaaggggcagaggggcacctgtcacacatgggcacaggctgtggggccagctggctgggctcacatcctggctgcacctctcatgagctctgtaagctccctgggcctccctttcctcacctgtgaaattgtcacagcatgcgcacctgccctctgtgccatgtgggacttgggggaacatctctaaagccctttgccaaaggccagtcaggtagcaaatgctgtgtgagggtttgggacataaacacacactggcagcatgcctgagcgaagcttccgtggccttctgagtgtctggccaggtcattctgggagctgtcaaatacacctggctgtcttccttttctggtcacatggttctggaccctttgtcctttgttggggccattggcttgttctggaagctgtgctgagagcacaagtgatgtcgaacaccccaggtcagagtgttaccatgccagaaggccccaaacacagatgctcaccccaaacacattttgctgttggcttcctggcctagattccagccagggatcctcctaaggaacctctctggtctcctcccgagcttgcaaagagaggtctgaagaaagcttgcgattgctgagcatgggggctggagcactcagcgcctgtcgctcacatcttatttgaatttcagaaaaacaggaaaagtaaatgcatgagatttttctattcaatttcaaagccttttcccaaaagtgacttttgataactgtcattaaaaggaaatagacacagtataaaaaaaagcaaaaatcttataatgtaaaaattacttgatttcctctgctttgccactggtttaataaaaaaaaaaaagctccttttctacttaaagctggcatgatcattgaattcatagacttatgtcgctgctggtcttagtgcttaatatatacagtgactcattctacttaatggcatcaacaacagatgcagagaaaatgcttcacaagcccaaagattgcagttggaaaaccccgtgcagtgggaacaattctttactagccctaattgagggcagctactctttgtgcttgcctgtgacagttttttttttctctctcttttccctcctctccttacgtgtccacccagattctgcaacccatagatggtggtctgtgcagaccagcagccagagtctgcctttggcctctgatgctgttgtcctcaacatattttctccttctgcacccctgcccacaactcctctgtgctccccctcctcagggctacttcctacctgagggaagatcaaccagagggggctggtgatcaggacccagggcaagggctccagggagagtgagctcacatttgctgggaacctgggagcacacggtgctggggaacctgccatcccccaactcaagtgtgaacgcagagctggatttcagcatcactcaggccctttgtaatatttattttgtgcatttcttttttttttttttttgagatggagtctcactctgttgcccaggctggagttcaatggcatgatctccgctcactgcaacctccgcctccctggttcaagtgattctccttgcctcagcctcctgagtagctgggattacaggcgtgcaccaccatgcctggcttatttttgtatttttagtagagacggggtttcaccatattggccaggctggtctcgaattcctgacatcaagtgatccacctgcctcggcttcccatagtgttgggattacaggcaggagccactgtgcccagcctattatgtgcattttaagacaatattttataaaaggattaggaactttttcaggcggttgaagagagctctattagaacaaaaaaggttgagaattcctggtggagataaagtgcagggagagagaaaagttagaggacacgctccctgtcctaggactttggggtggcagggccctgaggctctgagagcagcccagactttgcccttattctctgtgtttcagggcctcgctacctttccaaggcaacatcgttcttggagcacctgctgaggtgctctctgctgggggccgtaagtgagcatcgaaaaagctgtaaaaagtatccctgctgctctccagggactcacagcatggacggcacctgcattgagagaagacggcaatggtatcgtgatggtgagtctgttgccgctgtatagagaaatggggagggagaactcaattgcaacttgg

SEQ ID NO: 33273 - DNA, 2300 bp, Homo sapien
acagaaccagtgtataccttacacttacatattgatttatgtctcatgtttccctaaaatgtataaaaccaagctgtgccctgaccaccttgggctcatgtcatcaggacctcctgaggccgtgtcatgagtgtgtgtcttcaaccttggcaaaataaactttctaaattaactgagaactgtctcagatattcagggttcacagtatatactcagaagtaggactgctggatcatatggtaattctgtttttagagttttgggaaacttccattctattttccataaaggctgcactaatttacattcccatcaacagtgtacaagggttccctttcctccacattttcacccacacccattgtctttggtctttttgattatagcccttctaacagtgtaaggtgacatctcattatgcttttaatttgtatttccctgatgatatgtgatgctgagcatttttgctggtcatttttatgtcttcttttgagaagtatctgttcaggtcctttgcccatttataaatttcttcttttgcttttttgctgttgagtcgtgtgcctttaatttttgcactttacgttgtgagttttattttccatgcttgttctttgcttctttattctcttcttttcttgccttctattgagttgattgtgttttctttattcccttccccctgtctactagtttgggaattatatatactagcaaagagatacccttaaatttttaaaataaatacttaccaaagcctaagttccatcaattatctatctttcttacttatgaaattgagaaaggccgttcactccatgtcgctacctctacctaataacttaaaattttttatttgtctaatattttatttccaccttttttttttttttttgagtcttgctctgttgcccaggctggagtgcagtggcatgatctcggcttactgcaacctctgcctcctgggttcaagcaattctcctgtctcagcctcccaagtagctgggactacaggcgcacaccaccatgtctgactaatttttgtatttttagtagagacagggtttctccatattggtcaggtcggtctcgaactcctcacctcaggtaatccacctgccttggccttccaaagttctgggattacaggcctgagccaccacgcccagcctccatcttgttttataattccctaaagttaattgttgttaaatcaggagagaagtattttatgtaacatttctgtttatcagcccagcccaccaactggagtgccctgattccataagtttggcaagtcacttaccttctctggctttccatttctggtcacagctgggagaggctctgaagatcatctagcaaaggagctccctcactttgcctgtttctaggcactgaaaagtacaggccacaaatatattcagtaaaataaatcacttgagaaattcaaacaggctagaggagatatccgctatcataggagatcgggcagaaaagtttcttaaacataagagtgaaatgacctaaactgaatttcaatgagataaacagcagtttactaagacagggcaaccccacagggtgctgtttggtcagaattggcccgaggaggtgagaccctgacctacgaaggcagcaggtgtccgggaagcatggttagcagcaagagctaggggaggtggccgccgattacatagaagaaaggaggcaggcaggcgctgatcccaggggttctggtagaggggcagggaaactaccgttattggtccttcatgcaaactttaggattttcatccatgtgtgtattgcttgaagatgctgcattgcagaaagtcttcaacttctcccatgaccgaggcaggtctgatgagagtgcaaacagttagtactcgcccagctgcgcgccgaggcctcctccagaatccagaccgcatccccgaaagcccgccctgccccgcacttaggccccgccccaacacgcccgtcccgataacgaggctccgcccccaagagctcgcccgcgctcccccagaggaaacggaagtcgtatctgtccggacggaagcaggaagcgggagcgtagggccacgcctgcggcgctgctggttgaggctgtgtgggtcggggacgggccgaggcgatggcggagaagtttgaccacctagaggagcacctggagaagttcgtggagaacattcggcagctcggcatcatcgtcagtgacttccagcccagcagccaggccgggctcaaccaaaagctgtgagtggcggcccgaggctgccggggtctcccca

SEQ ID NO: 33274 - DNA, 2300 bp, Homo sapien
tgttagatgagctcccaggactttacagacagacactgtcatccttctcgccttatcttaaaaatacatacatacatataaaaacaaacaaaaaacacaaacaaacaaacagacaaaacagctggatagagcaaggtctcaaaacaaaacaaaatcaaccatgaaaccagggcaaataggccctcccgtcgcagctgagattcccactgccagggcacccacctgagagcacaggcccccagccctctgcagacgcactcgtctgccggtcgcctctcggggacccaggcgtgcaggcacccctactcttttagctcacgctgtcaactggctctcccgcagacaaccccaaatcacccgaccccaaacctttcaggcctgaaactgtttccacagtggccagaagagttatttttcagtgaaaatttctaataacttagaaaaggtaaaaatggtaaaagaagttaaaaacaagaagtcaccatgacggcacccagagtgaaaggctttcctggagaactcggacgctcctcaagttcaaagccaaaccaccagcagcagcggcagcaaggtttacaatcctaaaccatgcaggcttccggcgtaatctctcctgtacttcgccaccactacagcctcaccgctggacagctcggccgcacacacacaccacacacaccacacacatcacacactcacagacacaccacacactcacacactcacacacacaccacacatcacacactcacagacacaccacacactcacacactcaccacacaccgcacacacacacacacacacaccacacaccgtacacacaccacacaccacacacacactcacacactcacacacaccacacaccgcacacacacaccacacaccacacacactcacacaccacacaccacacacactcacacaccacacaccacacacactcacacaccacacaccacacacactcacacaccacacacatcacacacagacacaccacacacacactgcacacacacaccacacaccacacacatcacacacacaccacaaacattacactcataccacacacatcacacacacatcacacacaccgcacacacgcacacactacacacattcccacacactcatacaccacacacaccctcacacacacaccacaaacacaccacacacacaccacatcagtcacacaccacacacacacaaacaccacacacacgcacacactacacacacaccacacactcatacaccacgctcacacacccccacacacaccacacatatcatgcattcacacaccacacacaagcacacacatgcacacacactacacacacaccacacactcatacaccacacacacgacacataccacacacaccacacattcacacactacacactcatacactatgctcacatacaccatgcaaacaccacacacaccacacaccacactcagacaccacacattcacacaaagcacacacaccacgctcacacacaacacaccacacacaccacacactacacacaattacacacactactcacacacaccacacacacaccacacacacacaccacacacatcaccctcacaccacacacaaaacaccctcacacactcacacatcactctcacacacaccatacacacattacatacacagcacacacacaccacaccctcacaccacatcccagtcacacaccacacactcacacactaacaccacatacacgcacacacatatcacacactcatacaccacgctcacacaccccacacacacaccacacatatcacacattcacacatcacacaagcacacacatgcacacacaccacacactcatacaccatactcacaccccacacacaccacacacacatcacacattcacacacgacacactcatacactatgctcacacacaccatgcaaacaccacacactacacacactacactcacacacacaccacaccacactcacaccatacatacatacacaccacacaccacactcacacatcacatgcacacacaccacgctcgcacacacacaccacacagtggcagcagcagcagcaccccgggggcgcgggcgacgccagcccgggacccggcaagggaaagggcaagcgcgcggcggagctggccccgcgcgacaaggcgccggcggctgcggcggcggcggcggcggctgcggcgggggccgggggcccccgcgagagggcagcgggcgccagggcggggccgggcccggcggtggcgg

SEQ ID NO: 33275 - DNA, 2300 bp, Homo sapien
cctcaagttcaaagccaaaccaccagcagcagcggcagcaaggtttacaatcctaaaccatgcaggcttccggcgtaatctctcctgtacttcgccaccactacagcctcaccgctggacagctcggccgcacacacacaccacacacaccacacacatcacacactcacagacacaccacacactcacacactcacacacacaccacacatcacacactcacagacacaccacacactcacacactcaccacacaccgcacacacacacacacacacaccacacaccgtacacacaccacacaccacacacacactcacacactcacacacaccacacaccgcacacacacaccacacaccacacacactcacacaccacacaccacacacactcacacaccacacaccacacacactcacacaccacacaccacacacactcacacaccacacacatcacacacagacacaccacacacacactgcacacacacaccacacaccacacacatcacacacacaccacaaacattacactcataccacacacatcacacacacatcacacacaccgcacacacgcacacactacacacattcccacacactcatacaccacacacaccctcacacacacaccacaaacacaccacacacacaccacatcagtcacacaccacacacacacaaacaccacacacacgcacacactacacacacaccacacactcatacaccacgctcacacacccccacacacaccacacatatcatgcattcacacaccacacacaagcacacacatgcacacacactacacacacaccacacactcatacaccacacacacgacacataccacacacaccacacattcacacactacacactcatacactatgctcacatacaccatgcaaacaccacacacaccacacaccacactcagacaccacacattcacacaaagcacacacaccacgctcacacacaacacaccacacacaccacacactacacacaattacacacactactcacacacaccacacacacaccacacacacacaccacacacatcaccctcacaccacacacaaaacaccctcacacactcacacatcactctcacacacaccatacacacattacatacacagcacacacacaccacaccctcacaccacatcccagtcacacaccacacactcacacactaacaccacatacacgcacacacatatcacacactcatacaccacgctcacacaccccacacacacaccacacatatcacacattcacacatcacacaagcacacacatgcacacacaccacacactcatacaccatactcacaccccacacacaccacacacacatcacacattcacacacgacacactcatacactatgctcacacacaccatgcaaacaccacacactacacacactacactcacacacacaccacaccacactcacaccatacatacatacacaccacacaccacactcacacatcacatgcacacacaccacgctcgcacacacacaccacacagtggcagcagcagcagcaccccgggggcgcgggcgacgccagcccgggacccggcaagggaaagggcaagcgcgcggcggagctggccccgcgcgacaaggcgccggcggctgcggcggcggcggcggcggctgcggcgggggccgggggcccccgcgagagggcagcgggcgccagggcggggccgggcccggcggtggcggcggcggcgggcggcagcctggtccccgcggcgcgccagcaacactgcacgcaggtgcgcagccggcggctcatgaaggagctgcaggacatcgcgcgccttagcgaccgcttcatctccgtggagctggtggacgagagcctgttcgactggaacgtgaagctgcaccaggtggacaaggactcggtgctgtggcaggacatgaaggagaccaacaccgagttcatcctgctcaacctcaccttccccgacaacttccccttctcgccgcccttcatgcgggtgctcagcccgcgcctggagaacggctacgtgctggacggcggcgccatctgcatggagctgctcacgccgcgcggctggtccagcgcctacaccgtggaggccgtcatgcgccagttcgcagccagcctggtcaagggccaggtaaggcgagcgcgccggggctgggggcgcggggccgagatcgggtctgcagcgccgccgggcgcccgggccccgtggtgagggccagcgccggcccctccggc

SEQ ID NO: 33276 - DNA, 2300 bp, Homo sapien
aacaagtaatacacagatgtggaacaaaatttaaaggtatacaatgtgtttccctctaattgccatccatgaggcactcagtctcctctcgagagatgagccctggatcaggctccctgcatgtctttccagagagatccatgtaaagtagacagacgccagagattctgcccatccgcgccttgcttttctgcattcaccaagatatattagaaacatgcatcagcaaatacagagctgcctgacgctttcagcaagtgtgcgatgccattcccttttgtggatacatggtaatttattcaatcagttccctattagcaggtggtttcccatctttcactcttgcgatgctgtgtgattaactttgcacatctgcctcgaacacttaccaaaagatatgttggataaattcctggaagtacaattcctaagtcaaaaggtatgagtgtttttaatttgataattattaccagccagtaggtttaatcaatgcataccctcatctgcaatatatgaaggtacctggtcaatacagctatgggagaaagctcatggttcaactttgcaccctctaatgaaatggggcatatatcaacatgtttattggccattagtgtatatatatatatatagatagatagatatttttacctctttctctgttgatctttttctgtttgatttggaggcactctttgtttattaaagaataaattagtcccttgatttgggatgcctttccttttgtttgtttgtttggtgttttttttttttttttgtcatgactattttatgggtcttttttcattcagaagatttttgtgtggttgattttattgtttttttaatgtatctgggtttgggttcaaaattttaaaagccttcctcactccaagactgcaagtctgctgacttgaaatccccacacttccccctctcacacacacaatgtataaaatttaactctattgcagttaaactgctaaatactgtcagccaaaattaaggctattgaggcagaaataatttgagaaaggtttactggaagccaaatgtgaggattgttccagggtcagaatagttctatgagaaagtttaggagcagggaggggagggcactccttacattggagttgtcctttccattggagggtaccagggtgtcccaaagaggttacaatcattagcttcagattacaacacaaacacatgctaaagcattctatctgcaagacaactggcaaaacttcatgattcagagacaaatcagggcctggtgcactggttcatgcttgtaatcccagagtttttcgaggctgaggtgggggatcccttgaggccagaagtttgaggttacagtgagctatgatggtgccactgcattccaacctgggccacagctcaaagccccatttccaaaaaataaataagtaaaacagaaataaatcagtgtcttttttcacattgatctgtatgttgacagttggagaagggtacgagaagatctgagggattcacgagaagaccctttactcaggggacaggatgcaaaccatgcatcatgaaaccttccccaagcaggtaactcggaaggctgccaagtgggacctgtaggctctcagcacctagccgtggaatgacagatccaagctggaagggatacggacaatccataggtcccacccgcctctttcagcagtgagagaattgagacaccgtcgggtgtctcctgaggtcacccagctaactggccccaagaagcacaggccccaggaagcccaccctttgtctcccccagattctgaccaacccccacatcatctccttgcctggtttctctggggaaccaggaaaagagctgaagagtagcttctgctttataatgttcacattccatttctagttgaaattcagttgatttttaaataatgcatcgccttagattgtgggttttggcaggaatttcaagatacagataaaattccagagagtaaaaaagagaaacacgtttactgccaattccttttgaggggaatagaaaaacatatttttgaataagctcatcctgggttcagcttcccctgtgagaaggacacatataacaataagaaattaagggttcgggaaggagaggggccaccctgtgctcacccccacacagccctgcaggaaaacccagtgaacggtgcccaggtgcctggctgactcctgggccgggaggggacatggagggacagtggccatcaggctctttgtggacactggggattaactactgctcgttctcagctcactggtgt

SEQ ID NO: 33277 - DNA, 2300 bp, Homo sapien
aaaaataaataagtaaaacagaaataaatcagtgtcttttttcacattgatctgtatgttgacagttggagaagggtacgagaagatctgagggattcacgagaagaccctttactcaggggacaggatgcaaaccatgcatcatgaaaccttccccaagcaggtaactcggaaggctgccaagtgggacctgtaggctctcagcacctagccgtggaatgacagatccaagctggaagggatacggacaatccataggtcccacccgcctctttcagcagtgagagaattgagacaccgtcgggtgtctcctgaggtcacccagctaactggccccaagaagcacaggccccaggaagcccaccctttgtctcccccagattctgaccaacccccacatcatctccttgcctggtttctctggggaaccaggaaaagagctgaagagtagcttctgctttataatgttcacattccatttctagttgaaattcagttgatttttaaataatgcatcgccttagattgtgggttttggcaggaatttcaagatacagataaaattccagagagtaaaaaagagaaacacgtttactgccaattccttttgaggggaatagaaaaacatatttttgaataagctcatcctgggttcagcttcccctgtgagaaggacacatataacaataagaaattaagggttcgggaaggagaggggccaccctgtgctcacccccacacagccctgcaggaaaacccagtgaacggtgcccaggtgcctggctgactcctgggccgggaggggacatggagggacagtggccatcaggctctttgtggacactggggattaactactgctcgttctcagctcactggtgtccagcccatcaataacctcatcaataacctaactttggtcaattaggttggagtccgaaggtgactgatttgcggcaaggttttctctcttcctctgtaaagtggagtccttcatcattcatcgcaagtagacaactcgcttcctaatgcctctgcattaaggagccaggcgctgcagctctttggtacgtgacctcaaatagattcatgcgtccttctgctgacacggtgagtacctcctggagtccaggactcagagcatggacacaccctaactccagctaggggagggcgaagccacctgcacctgggaggctggcgctgcctaagcgggtcaggcaagtcctcgccttggaggggagagtccttagtgattttccctggctctgctcccaccgacgagacggactcaggaggggcgaacggtatgtggggcggggacgctttgttcagatggcgtcatcaaccccaggtccgtctggtcttttttattcactgcatattaaggtgcgtgcggcctgtggctggtccctgtcctgcacacctgtatggcctggactaggcctgagcgcctcaagggccgagctgggtcctccccacccgccggattccccagcgcccaggctgtctccaaagaatccccccgagagcaggtccccgcttctcgggcgtcggggctcgccgcagtcacgctgcacaccctcccggcctagggcggcgccggcccgggactcgcgtgtctccccgcggcgccgcgcaggacccgggcctcggagcccggcagcatcccctgctggccgctgggctgaggagccgcgggaggcggggaacgcggggccgcgggggctgggcgggccggagtgcgcggtagagggggcggcgcggccggggtgcgcggtagagggggcggagcggccggggtgcgcggtaaagatggggcggcgcggccggggctcgccagcaccagccctggaaccccatgggggacctcgacaacagcgcctttgcggcgtgggcccctttctgcagctcctccacccgcgcgctgtcggctccgggacactggggctttgaagggcgccagttcccagccgcacctgcacgcctaggagggcgcaggccgcgtgtccctgtgggaggaaggccccggcaacctgcaaagacctcacgtcacagaaacttgcggcgtttgcccccgatgcgcgcgtcaggtgctccgtcccttccaggtggcagaggagagggaagggtcgcgcctggtgggggcctgagagccaccgggctgcggtgcgcgagtgtggacaccgccccgccttctgcgtctacagccctgggttctgggacctttggaaaccgctttggacgaagctgagcatctctttccccacgctgacctcccccatagactccggatggga

SEQ ID NO: 33278 - DNA, 2300 bp, Homo sapien
gctctgctgaccccaagccagcccgggttcaccttggctgcaaggaatgatgacggccttgtccagacctggctagaaagatgcagcccggcctgtttgctatggatctaaactgcctgctggttcctttccaaggcaggccaggaaacagtggtgaaggagtgttgccctcatcctaacacgcagtcctttgtaatgcgtgctgtctcacctgtatcacgccagcattatttattagttcataaatcagccttccatgatgaaagaacctggcctggaatcaaagtctggaagtctgtatttctttaagatccatgcttgaaaattaggacaaaaaacgcttagctttggaggaacaaaaaggaaacagttccgcaaagagctccagcctttttctggggcacggtttgtgcagtttaacgttggaacgtacagcctcagacgggcaaagggggcgactgcacttctgccgccaccagggtttttctgtcaggttagaaagtatttcactttgaggctaaaagtctcacaaggtatcttaacgctgatggaatgttattttcatggaatcagtataagaaattatattgtaaagtattagatactttgcattcattcatactaggtttcagtagcttgtgttttagactttgcgcttgtcacattttaagtggtcagtgaccacaggcttgtggctgcccagctgcagagcacagtgcagtcacagaggagcctgtcttagagacgcgtgctttaggttggcctgcattagggcttacattgatgtttctgacgtgttaatacttacatagaaaggttttgacattttttcaattagccccttatgtatagtcttactttttagaacaacttattgtcattttctcgtttaaataatatgaatacttctctctttctgttactatgtcagtttcttattcacttagttcaacagatctagtgctagcatggcctgtgctgctgttggtcctactgggaacgcaggtagagtctccatggtcaggatgccgtgttctgttgtggtgctgaggcctgtaagcacttggctagaagttaggccagggaagctcacactgaccttggtatttgaaggtcccagaatgaggttgttgaggtagaacagagatgggagaacatgcccttggagctggactcaacaagaaggcccctctgggggaagctgaggttggacaggaagggcgtgtgccctcactgacttgctcacaggcttggggttcatctgttttggtttttgcttttttacattatattaacatggaaataaaaggtgttccctgggatgctcccggcttctctgctcagtagctttgtggctctgagtaaaatgaacttgcctgtgttgaaatatcctaatttttaaacttacttcatagggactgaggaattacgacttttatcaattttgtgacctgttaaaatgttaaaaaggacatgtattttttaaagatctttaagtaaaacattttgctcattcccaaagccaaatttaaattataccatggccctaattcagaagttcattctttggcaggtgtttccttggtgcctggggcactctctctttctcccagttcctgtggcagtttgtccaggtgcccaagaacaattcataccctcctttctcgttatttatatacttgtctttttgcccctgccgggtattttagaaatcgtgcttggtgcactttgtgtccttcagtgtgccttacccagagcagatgcacgataagcatttttacacgagaacaagctggtggtgtaggcctctgctaaggaacaggctgtatatgctctttgtgggattaaggtagaatcagctttaactccaaagaaactgtccatgaattttgtttataatagcaagtagatttaaaatgacactttaaaaaaattctgttgtctttctctacatataatgctgtagaaaaatataactgatggattttgtgaacgtggtatttttaacttttcgtagcagcacaaagaatgctcctctttgtgtgtcaatgaaattgttctttatgacagcttcagggtaaatctgcagagaccagagaaagcacacagctgagccctgcagatctcacagaagggaaacccacagatccctctaagctggaaagtccgtcattcacaggaactggtgacacagaaatagctcatgcaactgaggatttagagaataatggcagtaagaaagatggcgtgtgtgggtaagaaaagtggttatgtcttgatctaatacgctggtgtcttca

SEQ ID NO: 33279 - DNA, 2300 bp, Homo sapien
ggtagctctgttccttagcattatgttttcatgattcttacttgttcatctctatatttagtctctctggcttacagtttcattctcctcccatcctctttggagactgtacctatatcattctgtgattttggggcagtgtagaatccctaaaagtaaattatgtcatgctatagactctgtaaagaagtatatttagatcttggactagaaattgaaaaactagaattgctttaaattaaatgtagaatatttggttttttaaaaacatgaaacagtttcttgctttgttaatagatcttagatatgtgtgcagcacctggctcaaagaccacacagttaattgaaatgctacatgccgacatgaatgtcccctttccaggtatgcattggacttgtgttcaaaatggtaggaatgccactttggcagattgtagacaaggaaaagactctaactttgcctgctaatttggctctaaagtctcctatgacaagcagttgggttttccgtctaccggaagtagaactggacatcttgcctaccaccgtcagtagtactcaaacaaacacactcataccatgggggagctttattttagaattatgtgtgttttctataaaaacgaatggcatttcttttttttttttttgagatggagtctcactctgttgcccaggctggagtgcagtggcgtgatgttggctcactgcaagttccacctcctgggttcacgccattctcctgcctcagcctctcgagtagctgggactacaggtgcccgccaccatgcccgggtaattttttgtatttttagtagagacggggtttcaccatgttagccaggatggtctcgatctcctgacctcgtgatccgcccgccttggcctcccaaagtgctgggattacaggtgtgagccaccacgcccggctgcagatggtgtttctttatcaagcctacttacagaagatagatttcactgtttgaatttttagtaacaatttcccctttcccccacctttgttcattattattactattattattattattattacttactgccttacatgaagggtagtagtgtgtagttaaaagctaccatcagactccctgggttcaaatcctaatcggcaagttacttacagtgttagacatcccatgtgaaatgggacgaatcagtatgtagcttgcgaggtgctcaggaaatgttagctgttatagtgacaccacgcccctttctcttaagtggaaacaaatacccatcgtgatgttttagagtcagctttcatctcgtcctatctttgttcaggcaaacttctctagttctgttttaataggcatatttgttaggtctgttttttgaaatcctcttttttacattgtttaaagataatgccttggctaaaaagcctgcttcacttttccctgtttttagttgttttctccacattggcagtaaagagccttggcgtcccagtagcagcaggttctcctttttgtattgtggatgttttgcatttcatactgttgtgaagagtggctttgatcatacatgttgttggtatatttgcctttttgctgggggtgtgagaagaaccagagatgagcagaggtacacccagtagacttcccagcctgcagagcctcccgggaagagcttccgtgttcaggtgcttggggccccaccctaggagcctgactcacagtcagagcagggtcccggcttgtgttcaggattttgaaacatttgtaaggtgattttgttgtttctacacctttctcctcatcttttttttttgtagttaatcgttactaataacagaaaagacatttttggcatggtaattggcacaaagtgaataattgttgaatagatgacttttgaggctttcaaaattcgagtgtccataaaatccatccagagccacctggttcctttttttgaaccacttaacgtaattctggaaaaccttgactgtgggtcttaagtttggtggattgctgcttctcactggctgacctttggaggtcgcatatttcaggatgtgattccacttaggctccatttcacctgacactgcaattctgtgccttcagagggatttgttattgcgaatgatgtggacaacaagcgctgctacctgctcgtccatcaagccaagaggctgagcagcccctgcatcatggtggtcaaccatgatgcctccagcatacccaggctccagatagatgtggacggcaggaaagagatcctcttctatgatcgaattttatgtgatgtcccttgcaggtatttat

SEQ ID NO: 33280 - DNA, 2300 bp, Homo sapien
aacccagaaggcacctccaggacaggtcaagaaagaggtagctcccagagtagtagcacgcttgggtgctgagactcggaaatgctacattggctggtgcagtctgtactgcgaagtaccaggagacaacctgacagcagacagtggtaacctgtctgtaatggaaaacactaagagactacctaccaggagactgttgtcaagctaagtctgtcctttttctgaaggcaaagcagccactctgcaacagttttgatgtgagaaaacaagggctgtaaaagggagctggcggaagtggtgacataaaggaagaggctggatgtactaggaagagctggctgaaatcagtgactcataaagctgcaaatcgcaaatcgcatgaaaacttgcgtagcaatataatgttgataaaagcaccaggtactagaacattaggatgtttgcaaagtatacccaagctctttaacagcaaatgcagtaccaagaaatataattcaagtgatagagattaatatcccaaataaatattcggcatgaagcactgtggtacctaccaactcagtggctgtggaacttcaactttctgaccgtccacctccaggtcctccaattccttaaaatatttgttctttaagcaatggagaatctcttttgcgtggctattgaaaaataaggaagtttcaaactgatctaaaaaactaagttaatacattgtatcttcttaaatttaagactgcaagtgttttaaaactaaaaccaacttttgcatggagagtaaacattctttagtcactacttttacactgtatgccttcaaaatttaagcaatccacactgtttgagccctaagagcaacactgcattccttctctcctaagcatatcctaccgttaagttttacttgcgactcatttagaaagatgtaactacaaagatggagggggggcgcggaggaggggagaaccaaggggttttatgcattctctataaattctcttacgttccaaaaggtaagaccctcagcttccctcctggaagattccccaggagccgaatcttcctcagatctcattttcatttcgtcttctaaccttgcgcctgcaatacctccgtgaccatttcattggaccctgtgctccccacctcaatgcttcctgaatccaaaccgctgaaacgccacggttctctggcactgtaacacttgtcgaagaaaacaccgtcgcctttaacctccagcatcctggccccaactcccaaaaaatcaggcactgcctccctaccttttgtaaccagtaattcttaaagtggccgggagcggctccctgagagcgtccatgaactggccccactcgccctcgggcacgatcttgagctcctggtagtagtgctcgaacagcttgttctccttgacgatctcggggtagcctccttcccagccctgaggaaggaaagagacgtctaccccgaggcccaaggagccgccccctcgccgccgcctcgcaggcctcggggtccgggaagcccaggaggagcccctggcccgcccgccgggtcccggctcctaccgcctcgccgcgctttccaccaccctcggcgccatcctccgcgtcctccggccgctgctgttgctggagccgccgaccccgcgaccgccgccccatagcccacgcggccgcgcacgcagcacgcagaaaccggcccgccacggccagaactctagccctacacctcccgggacttccggccggaaaccaaggccccacgtgtccgggcctggtcctttcggggacctttggggaccgtccaggaataagcccaaagcgcacaacccgtctttcagaaaagcggcgtgacagggaaaacagcgaacagctctaaggggaaaaaaatgctccaggaagcagccacaaaggcgtctccgcgcgaagcgcccaggtttcccacgcgggctcaaggagctccgcggacagcctgaagccgcgcgtgcgcagagcggcgcggggttactgcggccccggcgtgggtggggcgcttgcaggtccctccccgcgcaagtgctcgccccgcccccggggccgcacccacagccccggctaccccggagaagcctgacttgagaaccctttctgcagagtcccggcagtgcgggactccggtagccgcccctccggtagccgcccctcctgcccccgcgccgccgccctatatgttgcccgccgcggcctctggggcatggagcacgctgcccagccctggcgatggcaacggcgacgggggtggcggaggagcgcctgctggcc

SEQ ID NO: 33281 - DNA, 2300 bp, Homo sapien
cttctggtttccaaactcccggggccgggggactcggggaagggcacccgtgcagatgggggacgccccgggggatctggcagggagagggcatctgggtgggggaggcttcggggagagggcaccgggcagtgaggggagggtcggagaggacgccgggccgggagtagggtagggggccgggggccggggacgttaccgatgcccgtagtggacgaggaacatggccaggaggatgcagttgggcgcgctgcggagacgcggggcggactcgctggcgtactggtagagcggcagggccagcgagggcagctcctgcaccacccaggcggcccgcgccggcactcggagcctgtggctgggcagcgcgtggcggccgtacactgagttcgtctgacgattgcgcgcgaagaccgcgcagcccacggcgcactgcaggtaggcgagcgcggccagcaggcgctcctccgccacccccgtcgccgttgccatcgccagggctgggcagcgtgctccatgccccagaggccgcggcgggcaacatatagggcggcggcgcgggggcaggaggggcggctaccggaggggcggctaccggagtcccgcactgccgggactctgcagaaagggttctcaagtcaggcttctccggggtagccggggctgtgggtgcggccccgggggcggggcgagcacttgcgcggggagggacctgcaagcgccccacccacgccggggccgcagtaaccccgcgccgctctgcgcacgcgcggcttcaggctgtccgcggagctccttgagcccgcgtgggaaacctgggcgcttcgcgcggagacgcctttgtggctgcttcctggagcatttttttccccttagagctgttcgctgttttccctgtcacgccgcttttctgaaagacgggttgtgcgctttgggcttattcctggacggtccccaaaggtccccgaaaggaccaggcccggacacgtggggccttggtttccggccggaagtcccgggaggtgtagggctagagttctggccgtggcgggccggtttctgcgtgctgcgtgcgcggccgcgtgggctatggggcggcggtcgcggggtcggcggctccagcaacagcagcggccggaggacgcggaggatggcgccgagggtggtggaaagcgcggcgaggcggtaggagccgggacccggcgggcgggccaggggctcctcctgggcttcccggaccccgaggcctgcgaggcggcggcgagggggcggctccttgggcctcggggtagacgtctctttccttcctcagggctgggaaggaggctaccccgagatcgtcaaggagaacaagctgttcgagcactactaccaggagctcaagatcgtgcccgagggcgagtggggccagttcatggacgctctcagggagccgctcccggccactttaagaattactggttacaaaaggtagggaggcagtgcctgattttttgggagttggggccaggatgctggaggttaaaggcgacggtgttttcttcgacaagtgttacagtgccagagaaccgtggcgtttcagcggtttggattcaggaagcattgaggtggggagcacagggtccaatgaaatggtcacggaggtattgcaggcgcaaggttagaagacgaaatgaaaatgagatctgaggaagattcggctcctggggaatcttccaggagggaagctgagggtcttaccttttggaacgtaagagaatttatagagaatgcataaaaccccttggttctcccctcctccgcgccccccctccatctttgtagttacatctttctaaatgagtcgcaagtaaaacttaacggtaggatatgcttaggagagaaggaatgcagtgttgctcttagggctcaaacagtgtggattgcttaaattttgaaggcatacagtgtaaaagtagtgactaaagaatgtttactctccatgcaaaagttggttttagttttaaaacacttgcagtcttaaatttaagaagatacaatgtattaacttagttttttagatcagtttgaaacttccttatttttcaatagccacgcaaaagagattctccattgcttaaagaacaaatattttaaggaattggaggacctggaggtggacggtcagaaagttgaagttccacagccactgagttggtaggtaccacagtgcttcatgccgaatatttatttgggatattaatctctatcacttgaattatatttcttggtactgcatttgctgttaaagagcttgggta

SEQ ID NO: 33282 - DNA, 2300 bp, Homo sapien
tggaaaagtatatacaaacagcaaagtctgactaatattcaaattgtagcaatggttgatcccattccaaaaaaaaaataaagcaatggtaaagagtttcaggcacacagtactcactaagcctctgatgaatgttgacttgcccttgtttaaagtgcaagtcatcaaagcacactgaggacacagactgcaccagttacagggtaaggtgctggttttcagggaactcaggtaccaaaaactgtgctgggtacaacactggttccaagtagtggagctgtgtactttctcttcgctggaatgcatgacaccaggagaaagaagagaggcttataaacacacactgagttcttcctgtctctctgggaagtgagtgttttaaggtgggaccccaaatcagaaaggttgggtaaactgcccatagtcacacagccagtgagttcaacttccttgggtgtagagacatcctttttaactgtgaagctttccagagcctgaatgaaaacgtttaaaatttaattttgaactttcgacctgtcgtttgctttggctgtgtaaaagccaaaagatacgacctggagagaaccccaacttattagaaggcttgaagatttcagacacagccagttttcaaatattcaaaaaaacaaaaaccttgaaagatttagaagtcatctttaagacttcgtttgtttaaggtttaaggttgctggctttccacccccacaatcctggggtcccttgcataaggtggacatgaaagtctctgaaagtgatcaagcctataaggagaaactgctaggcagttttaggacagcaggtttccagttgcagctgatcacttggctgggagaaaacagctccaccatcaccaaagataccaaaaggggaaccggcagaaaggagtagaaaccagtggccctcaagaccgaccatcagcattagactctaggccaaccccctcccccccgcccccacagtcgtgatctaagggaacaaaatctagtcttcatttttattttacatttttactttttaactctttatttttatatatttaattttgagacagagtctcgctctgtcacccaggctggagggcagtggcgagatctcggctcactgtaacctccgcctctcgggttcaagcgattcttccatctcagactcccgagtaactgggatcacagacaggcgccaccgcgcccggctaaggaaaccaaacctaggaccactgagtggctctttccagatcagtttcatcatgtttttttccatcactcccttccagtcctttgtttcccgccctttccagacgaatcccttctggtttccaaactcccggggccgggggactcggggaagggcacccgtgcagatgggggacgccccgggggatctggcagggagagggcatctgggtgggggaggcttcggggagagggcaccgggcagtgaggggagggtcggagaggacgccgggccgggagtagggtagggggccgggggccggggacgttaccgatgcccgtagtggacgaggaacatggccaggaggatgcagttgggcgcgctgcggagacgcggggcggactcgctggcgtactggtagagcggcagggccagcgagggcagctcctgcaccacccaggcggcccgcgccggcactcggagcctgtggctgggcagcgcgtggcggccgtacactgagttcgtctgacgattgcgcgcgaagaccgcgcagcccacggcgcactgcaggtaggcgagcgcggccagcaggcgctcctccgccacccccgtcgccgttgccatcgccagggctgggcagcgtgctccatgccccagaggccgcggcgggcaacatatagggcggcggcgcgggggcaggaggggcggctaccggaggggcggctaccggagtcccgcactgccgggactctgcagaaagggttctcaagtcaggcttctccggggtagccggggctgtgggtgcggccccgggggcggggcgagcacttgcgcggggagggacctgcaagcgccccacccacgccggggccgcagtaaccccgcgccgctctgcgcacgcgcggcttcaggctgtccgcggagctccttgagcccgcgtgggaaacctgggcgcttcgcgcggagacgcctttgtggctgcttcctggagcatttttttccccttagagctgttcgctgttttccctgtcacgccgcttttctgaaagacgggttgtgcgctttgggcttattcctggacggtccccaaaggtccccgaaaggaccag

SEQ ID NO: 33283 - DNA, 2300 bp, Homo sapien
tgctctattaaggtataatttacaaataataaaattcacccattttaagtctgtaatttgggctggtcgcggtggctcaggcctgtaatcccaacactttgggaggtagaggcaggtggatcacctgaggtcgggagttcgagaacagcctgaccaacatggagaaaccccgtctctactaaaaatacaaaattagccgggtgtggtaacacatgcctgtaatcccagctactcgggaggctgaggcaggagaatcgcttcaacccgggaggcggaggttgcggtgagccgagatcacgccactgcactccagcctggaccacaagagcgaaactccatctcaaaaaaaaaaaaaaaagtctgtagcttgatgaattttggtgattgcatatagttgtgtaatcatcaccgcaaatcaagaggtagaacagctgtattcctctaaaaaactccctttgtgtcattgtggccagtctccaccctgactctatttttgccttgtctggatttcgtaagtctaaattcagtttcacaatctatttttttttattttctttattattatacttgaagttctagggtatatgtgcagaacgtgcaggtttgttacataggtatacacatgccatggtggtttgctgcacccattaacccgtgatctgcattaggtatttctcctaatgctatccttcccccgatcccccaccccacaacaggccccagtgtgtgatgttcccctccctgcgtccatgtgttctcattgttcaactcccacttatgagtgaagacatgcagtattttgttttctgttcttgtgatagtttgctgagaatgacagtttctagcatcatccatgtccctgcaaaggatatgaactcatccttttttatggatgcatagtattccatggtgtatatgtgccacattttctttatccagactatcattgatgggcatttgtgttggttccaaggctttgctattgtgaacagtaccacaataaacatacgtgtacatgtgtctttatggtagaatgatttataatcctttgggtatatacccagtaacgggattgctggggcaaatggtatttctagttctagatccttgaggaatttggttggtaggctattaattactgcctcaatttcagaatttgttattggtgtattcagggattcgacttcttcctggtttaatcttgggagggcgtatgtgtccaggaatttatttatttattctagatttttctagtttatttgcatagaggtgtttatagtattctctgatggtagtttgtatttctgtgggaccggtggtgatatcctctttatcattttttattgcatctatttgattcttctctcttttcttctttattagtctggctagcagtctatctattttgttgatcttttcaaaaaaccagctcctagattcattgatttttttgaagggtttttcatgtctgtctctccttcagttctgctctgatcttagttatttcttatcttctgttagcttttgaatttgtttgttcttgcttctctagttcttttaattgtgggttagggtgtcgattttagatctttcctgctttctcttgcgggcatttagtgctataaatttccctctacacactgctttaaatgtgtcccaaagattctggtatgttgtatctttgttcttattggttttaaagaacatctttatttctgctttcattttgttatttatccagtagtcattcaggagcaggttgttcagtttccatgtagttgtgtggttttgagtgagtttcttaatcttgagttctaatttgattgcactgtgatataagagactgtttgttatgatttccattcttttgcatttgttgaggagtgttttacttccaaccatgtggtcaattttagaataagtgtgatgtggtgctgagaagagtgtatattctgttgatttggggtggagagttctgtagatgtctactaggtccacttgatccagagctgagttcaagtcctggatatccttgttaattttctgtctcattgatctgtctaatattgacagtggggtgttaaagtctcccactattattgtgtgggagtctaagtctctttgtaggtctttaagaacttgctttatgaatctgggtgctcctgtattgggtgcatatatatctaggatagttacctctgcttgttgcattgatctctttaccattatgcccttcttcgtctcttttgacctttttggtttaaaatctgttttctcagagactaggattgcaacccctg

SEQ ID NO: 33284 - DNA, 2300 bp, Homo sapien
cactcaccgtgagccatcaatgtgctctggtctgacatggtttctctctgtcttctagtctagacctagtttttttgttctgttccccacgtatggatatagtagagattgttgtctgtgaaatttctcttttgtagattttgagttttcccttgtagtgtaaagaatgatcactttctgtaacaataacaagaccactttttaagatttatcctgtttgttctttgttgattgaaacataataattgttaaaattctctacagccttctttttcttccatagctaatcttccttctaatagtttttgctttctgttttgctgttgttgctttgcaaagctttcccctcatagcctgtacctgttatcaatataaaataatcttcctgttgaatgcttcatgacttgaattctactttgataaaaacattgccatactgctttttatcttgatgaattcatctggcattgctttgccttatcatctcatctggagtttttaaatgccatttgtttcagttgtctttaacaacataataaatagactttgccatttaacaaggtagctcaaattcttttactaattgttacatcgaaacattctttcatcatatttcctgtttttatttggttttttcaacttcttctgtttactatctacagtgatttggaaaggagatttcctttaaaacaaacaagcttattgggaatggcttttatgatttttaaagtagccttgagagcttccagttaaatctgatgagctgaacatacacctttccttctcccctctctattctgaccccagttgaaatcacctcaaaggaatttaggtgggggagtggccccataaagagagtgagagagagtcaccactgcagatggaccacagcacgggtggagatgggcctgatgtggcagagcagagaggccatgacagtgcacaccctgcggagaccctgggtcctcacatctgggctgacagaaggcagagggaaatgagcatctcaaagtgagaccaactaaacatggcgcctgcagcagaaagcagtgtcctctgcacccccactctccagggagagcacagagagcccagaaatgagccatgtgcccattgccggggaagagaaggtaggctgaggaggtggcctttcctaacacaaaaattaactaagtggggaaaaccagagaactaggtgttggcatcccaggaaaaaaataaagtctccacattttggcctatagggatcctgccccataatggctggttacctcctgcctcaagctgcagggaagccagggggtggcatggccatggcttctccctcagagaggcctctgtgcacgacttcagtcacccaacactgacagaacttggaacccaaaagcccatttctctccttccgtccagaccctgtctgctgttatctgtaggaagaccacagccaactgctatcatgaccaaagctaaaatccaatgaggcagagaacaatagttgtacccatctcctccttagtctccaaggccagcggtgcatgcatttgtgcattcaacaacatttgccaagcacttactgtatatcaagcacagcagtgggtgctgaggacggatgggtagaaaaaacagtcctggcccaggtggagtgacaggtaagaaacaagtaagtagctaaaataatgttaggtagaaaaaaataacaagaataaaagcaaggaaaagggaagggaccctcacttgtgtctgatacagccataatcttctctatcggccattgctgtaaccaaagcttaaccacctttcttaagatattgatcaaccagatcattgcaaatactgctaattgattcctttttatggctgagtagtattccattgtatatatatatataccacttgttgactgatgggcatttgggttggttccacgattttgcagttgtgaattgtgctgctataaacatgtgcgtgcaagtatctttttttgaataatgacttcttttcctctgggtagatacccagtaatgggattgctggatcaaatggtagttctacttttagttctaaggaatttccacactgttttccatggtggctctaatagtttacattcccaccagcagtgtggaagtgttccatgattgccgcatgcatgccaacatctactgttttttgatttttttggttatggccgttcttgcaggagtaagggggtatcgcactgtagtttttatttgcatttccctgatcattagtgatgttgagcattttttcatactttgttggccatttgtatatcttct

SEQ ID NO: 33285 - DNA, 2300 bp, Homo sapien
tcactgtgttggccaggctagccttgaacccctgacctccagtgatccacccacctcagcctcccaaagtgctgggattacaggcatgagccaccgtgcccggctgcagtgtatttcttaatgcaatcaagaaacaatactgaatgtaaaatgcagtttttgagacgctgggcaagggagatctttctctttatcaatttctacagataagtgcagcccattcccgttttgggctgaaaccctctcctctctctcttcggatattggaggaggaataatattagagattacaccatgattttagtgatttgttcccatgaaaaaaatggtttacaaagtgtattccatggactacccatgccagaattagcaatgctggtcaaaatgcagatacctagagctcacccaatttactgaaactctctaggagcaagcccaggaatctctattttaagtaaattttctgagtaattctaaaacacagtgaactctgaaaacctctacctaaaacagggttcccaaattcaattgctcacaggtgccaaataactgaaagtgtgtaggtattagctactgctgggtaagaagccaccccaagcttagtggcttaaaataagtgtttggtattgctcacaagtctacaaatcaactaggtggttttgctgctctgggtcaaacacagctgatcttgctccactcagctggccaatcagctgaaggctggctgggctagagtagcctggctggcagctggggcactggagttgacagagttgacaaggaccatcagtctcttgttatccaacaggctgactcaggcttgttctcaggtggctgaacagagtttcaggagtgcaagcagacatgcatgaggctcagaaccggcatgccatcacttccttaccattctgtgagacaaagcaagtggcaaggccttgacaagtcaaggagtgggaaagaagcctccacctcttgatggaaggagctgcatcatattgcaagcggtgtggggcactggaagggggagaatgggggatgaattatgctaacctctacttctgttatcacatgacatcctcccctgtgtatctctctatgccttctcttcttgtaaggacatcagtcattggatttggggcccactctaaatccaggatgatttcatctgaagattcttaactgattatacctccaaagaccctatttccaaataaggtcttgttctgacattctgggtggacactaggaggttgcatagtctcctcccaaaattcacccagaattttgggaagaccactttgcaacctactacagaggcttaaataaaacaagaaagttattttgctcccgtaataagaaatccagcaagaaagggccattggcatggtggcccagtgtcccaggatgtccgagctgacctgtctgacattcccctggccttcacctaaaggctgctctgggtccatccctcatgtccacaggaaggaggtgggggaagaaggacagtgtctgctgtctgtgaccctttgtatcagaaaagcaaactttttccaagaaacctcacgttagatttgtcctcaaatcttgttgattagagctagttataaggccaccccaactgcgagagagtctgagaaattaagacacatgatgagacacagaatgatcatgaatgacctaaaccaatcgtgagccattgtttgtgcttgacttatgaccatgttgaaaaaaactgggtctgttagtaaagaagcaggaagtgggtctcatgtcctgccagtgtctgccacctgcaatctcttctgaattcagtccatacgagtctgtttctgagagcctgcaaagaccctgtttccaaacaaggtcttgttctgagattctgggtgaacgtgaattttgggaggacactttttggcctgctacagaggcttgaatgttctgacgaaatctagtttttgaccttgaatagagtagccccaccaagagaatacaacccacaagaaatgcctcttctttccaaccactctagagcaggattgtcaaccagagctgactgtgtctcccagggcacatgtggccacgtctggagacgctttggattgtcacgactaggggtagttgctgggccccagcgtcaagcacatacaggtgacaaattccgtctctgagtgagggcccaaagaagctctcagctcaataaacggagatgtgtgtgatgtacacacatgtgcagggtactagtgggagacagggcaagggaacctagaggtgttgctggactgatcctagaagatgcagag

SEQ ID NO: 33286 - DNA, 2300 bp, Homo sapien
tggcgggcggtttcccactgactcctgcccgctcggtgcagctggaaaaaccgaagccgggggccggacgcgccgcccaccagccgttcctcggctagcactgcccattttgcccagggaattaacttggaagttttcacttcacttttcgcatagaaaatcattttaaaaagcaaaccaaacgcctgtaagcagacccgctagggagcaggactctgccgcgtgtccttcccggctccggagcggcggagccagccacccggcacggcacgctggccgctcaccccgcgaggtgcagggagcacgtgggccgacgcgcggaccccagagagcgcagcgtgacctgctgcacggaccctcggatgagagacctggggcgggatctgcgaccggggcccgcccttacgtcaggagggagggccggccggcgggggaagcgcctgcggtggcgtccgctgcccccgcccggctgctcggaaacttccaccggcggcggtgacggccacgctgccctgcgcacgcgcagcgcggctcaggcggcagcccggtgacaccggccctagcgcgcatgtctgcacgccggggtctgcgcgccgcggcgggccgagggcggcgtgcgggccttccagccgctgcctattccacccaacgccggcctagtcagtaatggctcaacgccaccgcctctccctccagcccctcccagtcgcgtagcttctgacgccgtcctcaccccgcccgcggccgacggggccccaacgcgcaggcgcggtaaccacggcggcagtgtctagtgaggatttgaaatcggtcgcgcgtgcgcaccggcgacacggcccggcgaccgaggccgcgcttcctcctgccgcccccgtccccgccccctcccccgcccctcattggagcggacgcggcggcggccccctccttcccccgcgctgtcgccgccgagagtgtcttttcaccgccgccgccgccgccgccgcaggagcgccgagccagcggcgcgagcgtgactgagggctagccgcacgggcggcggcgcctcccgcgggtccttcagccgctcggcgcctgggcccgccccctcggccccgccgcccgcccttctccgatggcctctccccgcggcccgagtggaacgccgccgccgccgcggcccccgcgcccgccccgcgccgcgtgaagcgggagcccggagaccgcagccgcccgctgggacgcgccaagcgccggagccgcccgccgcggcctgccggggcccatcaccgccgccgccgccccacgccggagcccgacgggagcgcggctagagcaggaggccggggctcggcccgcccgccgccgccgccgccgccgccgccaccggcccaggcccgtccgtccgtccgtgcgcgcgcggccgggcctcggggcgcggcgggggcggggccgcgtcggggcgggcgggcgcgcgggccccgcgggggcggcgcgtggatggatccgcgcgtggcctggatccagcccgagcagaaggggccggccaatgccctgtggatgcagatctgggagacctcgcagggcgtgggccgcggcggctcgggcttcgcgtcctatttctgcctcaactcgccggcgctggacacggcggccgcggcgggggcggccgggcggggcagtggcggcctgggccccgcgctgcccgccgcgtcgcccccgccgcccggccccaccgcgcccgccgcgctgccccccgcgctgctgacggcgctggggcccgcggccgagggcgcgcggcgcttgcacaagtcgccgtcgctgtcgtcctcgtcgtcgtcctcctcgtccaacgcggagtcgggcaccgagagccccggctgctcgtcgtcgtcctccagcagcgcctcgctgggccggccgggcggcggccgcggcggcgccttcttcaacttcgccgacggcgcgcccagcgcccctggcacagccaacgggcaccccgggccgcgcggccccgcgcccgccggctccccgtcgcagcaccagttccacccgggtcgccggaaacgcgagaacaaggccagcacctacggcctcaactacctgctgtccggcagccgcgcggccgctctcagcggagggggcggccccggggcccaggcgccgcggcccggcaccccgtggaagagccgcgcgtacagcccgggcatccaggggtgagtgcgcggggaggccgcgggggcgggggcggggcccatggtcctggccggcgcccgcggtgcagacacccgtcccaggcgcccgggcttttggaggatgga

SEQ ID NO: 33287 - DNA, 2300 bp, Homo sapien
agataaatgaataatagaacaactttgaaattttagataaaatgaacaaattgattcagcaaacacaggttaccaaaatgaatattcatatatatgtaattgaacctgtaattaaacaccttattaagaaaactacagtctcacatggcttaataagtgaattctttccaaatgcttaaggaagaaatagcacacatcttacataaattctgtcagaaatagaagaaacatttctcaaattgtctaaccagcatagctttaatacttcatattaaaacctcacaagtctgggcgcagtggctcacgcctgtaatcccagcactttgggaggccgaagcgggtggatcacgaggtcaggagatcgagaccatcctggctaacatggtgaaaccccgtctctactaaaaaaatacaataaattagccaggggtggtggtgggcgcctgtagtcccagctactcgggaggctgaagcaggagaatggcgtgaacccggaaggcggagcttgcaatgagccgagatcatgccactgcattccagcctagacaacagggcgagactccgcggaaaaaaaaaaaaaaaaacagaaaaacttagactccactttctcttgtgaacgtaagtacaaaactaccaaatgaactaggagcaagcccatctcaaccatatataatatggtattaatcatttatcacaacaaaggtgatttaattccagaaatgcaatgttcaacattcaaaagccaatcactgttaagttaccttatcaacataaaaagataagaaaaaacactgctcaatcaagaaagaaaaaagcaattgatacaattcagtacctattcataaatcttaaaacctgtctaacagagaggaagcaacatgtgagttaaacactcccccagctgagaatagtgacataacttatttgcagccaaaagatgaaaattgcaggccaggcgcggtggctcatgcctctaatcccagcactttgggaggcagaggcgggcggatcacaaggtctggagttcaaaaccagcctggccaacatggtgaaatctcgtctctactaaaaatacaaaaagaaatgagtcaggcgtggtgtcatgcgcctgtattcctagctattagggaggctgaggcaggagaatcgcttgaaccatggaggcggacattgtgacagtgagccgagattgtgccactgcactccagcctggcaacagagcaagactgcgtttcaaaaaaaaaaaaaaaaaaaaaaaggatgaaaattgaattgcagtataatcttacaacttttgagaaatctatgtttttcagctaaaaagagacaaactcagccttttgacctttcttctttccctccttggaaggcaatccaaggcctggaaaaacagcagccacattgtaaccacaagaatagaaaccaggctaaggaagtatcaggaaactgaaaagaaccctggactgccttcctctgcacattttaagtgacaaaaatgaaatctatatttctttaagtcactgaatcagatttattctttctgtggctacatgtagccctaaatgatgtattaaatactaaaataaatactaaattacacactaaaatactaaaattttggtcttgactcctgatctcaggtgatatgcccatctcagcctaccaatgtgctgggattacaggcatgagccaccacacccacctcaaaagctttgtgtttttaaatatattagacatgtctctagtttaaaaaaaaaaaaacttaacaatcatgtaggagaataagagaaactttttccaaaaaagagaaatcactgtgattattttatcttattggaatgttggataatataatctgctttactaatcattacgcacactgtaaattttccattacaacaggatttgtacctcaattaaggtgataaagttttaaagtttagaaagtgaaagccagccccgcccctctcccagagtgggcggggacagcagttgcatgggcggctttccttgtgacatcacaggaccttcatgacacacagctgcctggccccgcctcctttccctttcatctttctcattgaccaatgggcttggagcattaaggccacgccccttttccgcattctagtgcagccctggtgacgcctcctgtggctcagtcacatagctgtgtggtacatgactggaggcatatcactgtcctcgcctggatcacgccaatgtgaccccaaccccacctccctccccaccccatgatgtccgaaaaaacccaacaaagaaaattggctgggaccaag

SEQ ID NO: 33288 - DNA, 2300 bp, Homo sapien
aatccccaaaagtttacatactgtatgattccacttgcataatgtttttgaaataacaaaatgttagaaacgcagaggaatagattagtagttgccaggacttaggccctgggaggtgaggagtggggccaacggaaggtgggtgtggttttaaaagaaggaaaagccatacagaattgttctgtatgtagatatctagattgtagcggtgcatgcaggaagcaggacctacatgcataataaaattatgcagaacgaaacacacacacacacgccatacaaatgaatacaagcaaaccaggaaatcggggtcaggttggaggattgtattaatgtctataccctggttgtgataattgcactataattttccaaggtgttaccattgagggaaaatgagtaaagggtagagaggatctctgtatattattacttacaaatgcatgtgaatgttcaattatctcaataaatagttcaactaaaaaaacaccattctttcattgatttcttcactagatgccattttggggctgcctttcaatggaatagaaacggaatggttgccgtttgtcaaggcagagctctgatcattttcatcagggtgtggagcacacatggacggtagcctgcctgtttagcaaagcacagccttgacagcgttattttctcacagccaaccgtccatgaagaattcccaaatggttctaccattttcttttgctgctagattcttaaaatagataccaggaagaacctactctgctgtcttgcccgaagactggcctaaatctctgaatattttaccacacccatacttttgcttgtattatctggtgaagcagtctcattatcaatactgagtttgttttaaaagttatatggaagtttgtgtgtattttgtgtattttccagagcccccagtgagtgcctgagcccattaatttcagtcagaatcagaatgcaattttacacttttaaaactataacaagttcaagggcattcccaatacttttgtgataataataattttaaaaattattgactttgatcctataaatataggctctgaatcttatagaaaaaaaatttcatgcagcaataaatacaactgcagcataagcctgctgtgaataatgcaattactatatttagttacacacatttcttccagtccagaactcccaacactcccttcttctctcctgtctcatgaagaacaatacaaaattatattcccctgagtgatttctctttcttcccattttgaggcagcaacatggctgcccacagaggttcccccagggcttaaggacatcaattaattcagtagctaggtagagagtttccttttagagggactgttacataacgttgaatgaaaggagaatgaaaggagatgcagacagctcctgactgctgctctcaagctcaagtgggagaattaagacagcctcattcactgctcagcacttcctttgctctgatgatcatcagaaatcatctcagtcttccttgcgctgctccttcttttcctgaagttccgatgctccagcttcaatcctcaaacttggaaaaaaaaaaaaaaaaggaaatatctgtagtccttgcaactgctttttgaagttgtgctcgggcccctgttgtttctctactgaagcttgcagtgtgctttcatcggagctggcccctgccccagccagcaccagccctcaaagacttttttattctaacatagcccgagtatgttaggaaactagagctgcataaccactgcctcttaactctgctagccctggcatcttatctgtatgatttctgcagtgatgggagggaagctagtagctctctagttcattaaacggaacgtctgtctaggaagataccaggaagatattttataaatgaatgtcgatatttttccttccaatgtaattagatattctgtttcaatctaaggctcttcttacaggcaaaaggaataatgaagctttcaaccatgatacaactgagaagatttcagcatccacatagaaagaaaagcagggcaatgcaccctccaagcttaggaaggaggcagccagagaactcctggctcctttgtggggtgagagagctgccctaaggaactccaggcccaaaagagagagcaagtgggattagctgcttattgtgtaaacttagaaagggaaaacagaattaaagtaggggtaaacgggaaaaatagatgagtaaattttcctattgctttagaaaaaaaaaatctaaattcatatgtaattttgtatctacttgtttccca

SEQ ID NO: 33289 - DNA, 2300 bp, Homo sapien
gcagcagtccataaacactgcagggaagagaatttctttctgctgctagggcaggatgacccacggtgggaggtgagccttgggacctacaggaggcttcagggggacacccccccacccattgcctcctcctccactccttgtttccaggtcctcagaaggagggaagtccagggaccagggagcctggtggggccggacctgaggtactgcacgcagccctgggcccagtctcctcggccacctccctgcctctggtgtctatgagatctgcgggtgagctgtgcagctcctgagccctcatccttaggccctgtgggcactgacggatgctaaaatgaaaacctctggaaggatccgtgcccggcctggccctgtgctcagggtaacgcagctacctagcttacatgccctctgccagcgaggaggacaggacagccagggaggcggggcatggggccattcgagaaggttctgaggtcttaggtggtgacaaggctgagtcctgagagctggtcatctcctggaagagatgaaaagtgcatggaacagccctctggggctgccctctgggatgctcgctggtggcaggagaagggagggctcttgtgccttggattccttggggtaaggctttgggggaggaggtgggatttgggggctctttgggccggaccacactcgaataggaggaaacttccagaagggtgggttcctttggtgataagcaatgaagccccttcggcccccagggcgaaggccagcggcctccgctcccacgcgtgtcgggaggggacactgtccctggtgacatccgcccccacaacgctcctgccgggtctctagcgcctcctgcgtccaggcccccaaggtgacagggagggagctactcccagggccgacccgcccgctcccgcgcccagccgctctccccggcgcccctttgccgccatccccgctcagcagaggggctcggcgaggaccacgaccagccacggggcagctctgtaaacctgtgatatgacaggcttatacggcacctccaaagtgtgactgaagctgagcgtgcagggcgcaacggacgctgcccccgcgaggccgtggcgggggctcccagtgcagtcactgccgcttcacttccacatggtgccggtctccagttaggtcccctggcgtttccgcgccctgccgccctcgcagggagccccggccctctcaagagggtggagaggatgggggagccctcaaccctgctacgctgaggggaagaagggctggacggcaaaccggtgcccaccgcggggaggcgggaagggtgggaaatcctctccagctccccaaaagagtgaaaaggagggagaccccgctgtcctctgacccgcgtactaaaggagggaccccccgggtcctctgaccccggctgcgctctgtgactgtgggggagggtgggagcaggccccgcagcccactaaggggtggaggaaacaggagggtggcagcgtccctgcccgctgaccttgaggtagtggagaggagctgaggagccccgcagtgctccgagccaggtggggcggggggagtggtgggggtaggactccctccctccaccccttaggctgtgttctcacttcgtagcggggagggccgtccctcccaccccacccacgctgcactcgggatagggcagaggaggtggacgacctggtggctgagtgtgggaggccggcgggcgaggacgaccccgggccggggcgcagcgggagcccctcagttcgccactccccccaccgtacagcccccgccgtccccagcctgcagccgggccgtcgggtgggggccgacaccgcccctgcacggaggccggctgcgcgcggggcggggagcggcgggcggagggccccgtggaacccgccccctcccgcgcggtggcggtggcggcggcggcgccgggagctgcccccgaggccgccgcccggcccccgcccgcgcgtcagcgcgcccagcccggggcgccgagctccgcccgcgccggaggcccctgcgcgcagctccgggtgccggcagccgggccggccgaggcggcgcgggggtgggacgcgggcggccgcggcgagcggcgctgcccgggccgggcgcgcacggcgggcgccctgtgagcggccccgatgtggcaggaggcgatgcggcgccgccgctacctgcgggaccgctccgaggaggcggcgggcggcggagacgggctgccgcggtcccgggactggctctacgagtcctactactgcatgagccagcagcacccg

SEQ ID NO: 33290 - DNA, 2300 bp, Homo sapien
cagtggtttttggttagatagatgagttgtatagtggtgaagtcagagattttaatgcacccatcacagaagtaatgtacattatacccaatatgtaggcttttttgttttctttttgtttgttttattgagatagagtcttgctctattgcccagtctggagtgcaatggcacatctcggctcactgcaacgtccgcctcccaggttcaagcgattctccagcctcagcctctcgagtagctgggactacaggtgagcaccaccacatttggctaatttttttgtatttttagtagagacagagtttcaccatgttggccaggctggtctcgaactcctgacctcaggtgatctgcctgcctcagcctctcaaagtgctgggattacaggcatgagcaaccgtgcccggcccccaatgtgtagttttttaatccctcatcctcctcctgccctccccatttctgagtttccaatgtgcattatatctctctgcatgcctttgcacactcatagcttagcttccactgtatgttataagtgagaacatacagcatttggttttccattcttaagttacttcccttggaataatggcctccagttttatacaagttgcttcaaaggcattattgcattcttttttatggctgaattgtattccttggtgtatgtatatcacattttctttaaccactcatcagttgatgaacacttaggttggtttcatatctttataattgtgaaatgtgctgtgatacacatatgcatgcaggtgtctttttgatataacttctttccttttccatagatacccagtagtgagattgctggatcaaatggtagatccactttgaattctttgagaaatctccatattgctttctattgaggttgtactgatttatattcccatcagcagtgaataagtgttcccttttcaccacatccatgctaacatcaattgttttttgactttttaataatgactattctggttagggtaatgtggtatctcattgtggctttaatttgcagttccctgatgattaatgatgttgaacatttttttcatatgtttgttagccatctgtgtatcttcttttgagaaatgtctattcatgccatttgcctactttttaatgggattatttgtttttgtccttgttgatttgagttccttgtagattctggatactagtcctttgttggatgcagagtttgcaaatatattctcccattctgtgggttgcctgtttactctgatgattatttcttttgctgtgcagaggctttttagtttagttagctcccatttatttatttttgtttttgttgcatttgcttttggggtctttgtcatgaattctttgcctgagccaatgtccagatgagttttttctgggttatcttccagaatttttatggtttcatattttagatttaagtctttgatccttcttaagtttctttttgtataaggtgagaggtgcaggtttagttttattcttccacatgtggctatccagtttacccagcatcatttactaaacgttgtgttctccccctgatttatgttgttgtatgctttgtcaaagatcagtgttattgtaagaaattgccacagccacccccaccttcagcaacaacagttcttgttactggcggtgaatccctgtgtgtctgcagcagcctcaattcttgcctcctcagaagaaagaattcgacttaggaggcagaaggcagaaggagagaccaaggtaaattttagagcaggagtgaaattgattaaaaagctttagagtaggaaggaaagacgggaagtatacttggaagagggccaagtgggcgacttgaaagacgagtgcacggtttgacttttcgacttggggaagtatacgttggcatacttccggggtcttgtgtcccttctcccctgattcttcccttggtgggcagtttgcatgcacagtggcctgccagctcttgggaggggagcatgcagagtgtgtttaccggagttgtactcatgctcacttggggccatcttcccttatcagctgaatgttcctaggaggtcatataccagttaaactccgccattttgcctcttaaatgcacctgtgtgagcccactcacccgactcctgagatcttattaagaagatgctgatcaccagtttcaggttttttctatctacagggagactgcttttccctggtgctggctgcaaccaattattattttagcgagacagttaacaactgcctgaacatcacctgagggtcacctgacatttcta

SEQ ID NO: 33291 - DNA, 2300 bp, Homo sapien
tctctcctgcttcttgctcctcttggtccctctctcctgttccctggaattacctcccaaataaactcaggcccttgtctcagactcaaatatttgacttcctactgtatgcctgtatgcctgacttgagccatctgtataagtttgttctcatgctgctataaagaaatacctgagactgggtaattcataaaggaaagagttttaattgtctcacagttcagtatggctggggtggcctcaggaaacttacaatcacggcagaaagcaaaggggaagcaaggcaccttcttcacaaggtggcaggaaggagaagcactgaacaaaaggggaggagccccttataaaaccatcagatcctgtgagaattcactatcacaagaacagcatgggggaaatggcccccaggattcaattatctccacttggtcactcctttgacatgtggggattatggggattacaattcaagatgagattaaggtggggacacaaagcctaaccatatctccatccaagaagaaaaagatgtaggtagccttgccctcaagagctcttggtctaggacatgacaaaatgtcaccgactgaactgaagttagcagattcacatctgtataactgtgtaaactttactaatttcttttactaagaaattatctcggtctcagttttagctgaattcccaagataattggtttcaagtactttcactttccaaagtatgatactgggtcaccaatgcaaagcttacaaaatcttgtgaccattagttgacctctcttgtgtatttggagacattgagagaagttgagagaggcagtagattataagggcttaaaaaaaaaaaacatatttggctgctgctttaatgaggccaaaaaagcaaaaaagtatgagtcatgcctttcatgacttcagcccatgggagaaaaataagagccccttttcctttgcttcacatgtaggagagatggtgctccatctccaagcaccagggatatgtcaccctctccaagtggctccaatgaggttgctaggtcccctggggcttagagacatggtgggcaggtgtctgacccttgactcatggctgacttgtgttctgcctggccatggagcaaaaagatgtgttagtgggacaaagaaggcacatgggtttctcaggaagctcatggggacccacgagagagacagatataaataaaaagagagagaaaaagcgtggtggcaccgggatgtcttaaatcctgcccagaaggatctctagaactctggagacctctacagagtggatcaccaggtgcctcagaatgagagaggcatcttaagccaccagcctgcatcacagaatggcagacaagagattcctacctagttgcagggatggggaagaaggcagggcactgctccttccatcatctgtaagatctctccatcaggcccccacctatctgttcaccttcacttcctaccagtttctggcttcatgaggccacaccaccccacttcctgctgccattcaaacacaagattgtctctgcctcagaggaccaagttggcttggaagggattgccagactcacagaactggcttctcattatcgctatgcttcatctcaaacaccaccttctcagcaaggctggccttcccaggcacgctggctaaagcatttcccaagccttggtcatcatggctttttttgtttgtttgtttttaacttttcttggctgtacacccaccaatcacgagtatacagcttaacacattttcaacaaacggaacgcaggtattgacccagcattcagatcaagggccaacgtaaacacactggcaaaggattgcaagagccctgtccacagcagctgagttctgccagattctgtaaattcatgcagccttacacctgcactggccaatactgtaactgctagccacacgtggccaccgagagcttgaaaggcagctagtgccatttgttgaaatgataacgttttggacttactgagtcaaataagaaacgacacacgtggctctcatcatgtttctattggacagcgctgccctggagcctcggcaagtcatttggcttcttcgcgtctttcatgtgtcttctccagactgtaagcttcctgtggacaaggcctgctccgttcaaggctcaatctccagctcctgacacaccatgcgctaggtgctcagtcactaatggtctcgcgaaggagtgatcagtgagtgaagcaggggctgctgcatgggaaaggtgagcgggctggaaatgggtagtccccgcggcgtct

SEQ ID NO: 33292 - DNA, 2300 bp, Homo sapien
agctacacgatgctctagggcttttgtaaaaaatgtgtcatggtgcccaaaatatatgaacgcctccaagactctcctaagctcctcgttagtgaaatgtgggacatgcctcacgacatatttgcccaattttataatcagaggaaatgcttgactttgatcaagaaccaccagggcagtgagcatttggctaatcaatttaggactcaggttggaaactattgatagggaaaagttgtttatcttatttaaaaatgtttggtgttcatccactttttcagtacatgcctgcaagattctataaagggccacaatatcctccggggtaaatgtttccaatttttcaccttgaagttgatttataatgagttctagtgtcacacaacctgaactgtgcagtgtaatcagactttccccaagaatacaaagattgcgaacttccatgccaccttttctgagacgattttggcattctgccaccaggttcagcaacaggctactttgaggatccacatgcaacagaatcagagcttgcaaagcagtcactaaactagtgtttgacagctgtgagggctccttttcaaactgaaagcataaagcttgaaagatgctattctccagtatttcttttggcagcccttgatcaccatcctttttttccacttcacaaattcgttgtaaagctcctgctgccatagtgtcaggcagggtttccatcgtgcttataaaacttagcacttcttctgatgaagtcaagttgctcagtctcctgtaaaacatctgactctcctcatttttaacattttgttcaagcctgtcgcagtcagatacttgagagaacactggtccaccgagtggatgaaggtcatttccatttttcgaatgaaactttttacaatgggcatgatggaatttgaccccgaaaggctcaggttgtcgtgaacacaaccaagggcacagacgctccttgactaccttgtgaacatgatttagaggtttattttttaaagcagccagagctctatgcatctgaaaatcagataaacgataaaggttcttcctcaaggtgattaatgccataccatcagattctcaatttgataactaaattaaaaaatttaaaaacacatggttaaatacattgagaacatgattgacccaacatcaatgtttatgaaactacaaacgagtatctggaaaaaaaaaaaaaaaaaaaaaaaggatggttaacatataaacaccagaggggcaaagtctctgcatcctagagttagaagagtggctgacattgaacaataacaatcgctattacttgctaaacactgttgtaggtattctattaacttacacagattcagtacttttactatcattttacacgaggaagaagttgaagcacaaagttactttgcccagtttatgcaggtggttaagtggcagagctagggttcaaactcaggcaatgtagctcttaagggtggcccttaaatgttggttgaaggaagaaattgcatttggatagaaatcaaagaacaggtaaagtgggcaaaattaggcgaggttagagcaaggcaagggtaaaaacgcgctggaaaggccctaagctgttggtttcccctcggtgtcgggagaaggttagtgttgaaggaaagggtctactttgtcaatggaaacaaggtaggaaaagaaaaagcaaaacatagatcaatgaagggagaaggtggggcggccagtccagatctaaagacggtgcggggggatttggcaacacgtgtgtgcaagacagacagacgggaggccccgcggcgcgttttcctaggaatgaaagggacccgcggggcgagcacccccaaactcggcgccccggggacctgcgctgagacacgggccgggcggcgcagcctgaggagaaagccggccaggtctttgacacccagccggaccaactgcgcggagaccccgcgttgacacctaccgcgctctgccgggcaatcactccgggtggtcgcggaagcgcctgggcgtcgtgggcctccgtagcaaacgcggggcgggagcacgactcagggcggcgcaatgtgattggcccaggtccccttcggagctttctattggtcctgggtaccgagcatgggcgctgcgtcagtgcgcgctggcgcaaggttggtggaagtcgcgttgtgcaggttcgtgcccggctggcgcggcgtgggtaagctgcctgtcggctacggttcccggattccggccgctcgccctgcactaatctcctgggagaggcggcccggggcgggggtggg

SEQ ID NO: 33293 - DNA, 2300 bp, Homo sapien
ggtggaaacgataatgaaaaccttactacagctaaaatttctatcacttcccatgaaacacacatcctgagggcttcccaggatcaatcaacccctcatccctgctactgccccacaatccggcaccaccttcccacgactctcagcggaggcccgggccccagcagccccggaagcggcgcggaggcggtgggcagagctcacggccgcgggcagaactcacggccgcgtcccgccgggtgggcgctcggaacgtcccgggttccccggagcgcgccgccccaacccggcatgttccccagttccccgcgtccccgagtgcggtttccctaggcctggaaagcgcctagaaccaaaggcagaacatgaggagagaccccacgccgcccaggggcctcccgcggcagaggccgacgccgagcccaaggacacgctcccggggacaccaaagccaaaggccaaaggccaagtccgagccccagcccgcgcccgcggcgacccccggaggccgaagggcgtgggaaccacgggcgcaagccggctgcccacccccgccccgggccgcctctcccaggagattagtgcagggcgagcggccggaatccgggaaccgtagccgacaggcagcttacccacgccgcgccagccgggcacgaacctgcacaacgcgacttccaccaaccttgcgccagcgcgcactgacgcagcgcccatgctcggtacccaggaccaatagaaagctccgaaggggacctgggccaatcacattgcgccgccctgagtcgtgctcccgccccgcgtttgctacggaggcccacgacgcccaggcgcttccgcgaccacccggagtgattgcccggcagagcgcggtaggtgtcaacgcggggtctccgcgcagttggtccggctgggtgtcaaagacctggccggctttctcctcaggctgcgccgcccggcccgtgtctcagcgcaggtccccggggcgccgagtttgggggtgctcgccccgcgggtccctttcattcctaggaaaacgcgccgcggggcctcccgtctgtctgtcttgcacacacgtgttgccaaatccccccgcaccgtctttagatctggactggccgccccaccttctcccttcattgatctatgttttgctttttcttttcctaccttgtttccattgacaaagtagaccctttccttcaacactaaccttctcccgacaccgaggggaaaccaacagcttagggcctttccagcgcgtttttacccttgccttgctctaacctcgcctaattttgcccactttacctgttctttgatttctatccaaatgcaatttcttccttcaaccaacatttaagggccacccttaagagctacattgcctgagtttgaaccctagctctgccacttaaccacctgcataaactgggcaaagtaactttgtgcttcaacttcttcctcgtgtaaaatgatagtaaaagtactgaatctgtgtaagttaatagaatacctacaacagtgtttagcaagtaatagcgattgttattgttcaatgtcagccactcttctaactctaggatgcagagactttgcccctctggtgtttatatgttaaccatcctttttttttttttttttttttttccagatactcgtttgtagtttcataaacattgatgttgggtcaatcatgttctcaatgtatttaaccatgtgtttttaaattttttaatttagttatcaaattgagaatctgatggtatggcattaatcaccttgaggaagaacctttatcgtttatctgattttcagatgcatagagctctggctgctttaaaaaataaacctctaaatcatgttcacaaggtagtcaaggagcgtctgtgcccttggttgtgttcacgacaacctgagcctttcggggtcaaattccatcatgcccattgtaaaaagtttcattcgaaaaatggaaatgaccttcatccactcggtggaccagtgttctctcaagtatctgactgcgacaggcttgaacaaaatgttaaaaatgaggagagtcagatgttttacaggagactgagcaacttgacttcatcagaagaagtgctaagttttataagcacgatggaaaccctgcctgacactatggcagcaggagctttacaacgaatttgtgaagtggaaaaaaaggatggtgatcaagggctgccaaaagaaatactggagaatagcatctttcaagctttatgctttcagtttgaaaaggagccctcacagctgtcaaacactagtttagt

SEQ ID NO: 33294 - DNA, 2300 bp, Homo sapien
attcaactacacacttctatattaaaaaaatgctggtgatatcttactataccattgaacaaacacatttctgttaaaaaacaaagactatgtggtggtattagtgtccttttgtttcataaatatcacttcccaaccaaaattcttcaaagcacaaaacggtaaaatccactgtaacggctctaaccttatcggattcactaatacagtgaagatctgcagaaaatccatgtaccacagcttgctcacatatttcttctgcgatggcctttgcctgtccctgctgtgtagcatatagtaacagaaacctcctcatcacttcaaggcatgtaacagtgaaactgaaaaatgggggaaaaaagatcctctttttaatgaagcagtaacaacctaaagatattaattctccctcaatctttaagaaacaatgcaacaatacccacacataatatgaaatggccttttctaaatttgttttcagcactaatctcaaatgagcctaaataagaattcatcaaattaaggagagtgtacgaatgaaactctaattccatggctcagaaatcagatgatcggctcgaaactacttgggcttgaatctgtgtttcctaagtgcaaccctgtagacaagctccccaaatgatccgtaccacagctcctttatcctaaaaatgagagtattaccacctacctgaaaaacgatgtggcacaagccaagaacctgaacaaaacttgagccacagtatcattcacaacagtcttaaatagcttttggtttcctctttttaaaaaaagataaaagtaaaaactatattaaaatgataggattcttggttcttatttgatcctaacgctaaacaaactaatcatagtactaaaggtaactgaagcacatactctccttcattatttaatgcaaatcaaaaatatgtgagtgtatgggcatatatacaaacgggtgcatataacgaaaaaatatttccaatccacttaaacattttactaacacgtttttccgcaagagataagcagtagtaaaacaaacgacactcacagatttttttccatactcatctaacggctaaaattggtgggctgtcaatttgcagagacagatttaaactgaaacccaaaccaaaagcttggctttcggtgaatgaaccgcccagaacggcacctggcatgaaactggtactcgataagttatctgaatgagtgaataaacaatatgaaaacactacacattgacagctcacagaaaacggtggaaacgataatgaaaaccttactacagctaaaatttctatcacttcccatgaaacacacatcctgagggcttcccaggatcaatcaacccctcatccctgctactgccccacaatccggcaccaccttcccacgactctcagcggaggcccgggccccagcagccccggaagcggcgcggaggcggtgggcagagctcacggccgcgggcagaactcacggccgcgtcccgccgggtgggcgctcggaacgtcccgggttccccggagcgcgccgccccaacccggcatgttccccagttccccgcgtccccgagtgcggtttccctaggcctggaaagcgcctagaaccaaaggcagaacatgaggagagaccccacgccgcccaggggcctcccgcggcagaggccgacgccgagcccaaggacacgctcccggggacaccaaagccaaaggccaaaggccaagtccgagccccagcccgcgcccgcggcgacccccggaggccgaagggcgtgggaaccacgggcgcaagccggctgcccacccccgccccgggccgcctctcccaggagattagtgcagggcgagcggccggaatccgggaaccgtagccgacaggcagcttacccacgccgcgccagccgggcacgaacctgcacaacgcgacttccaccaaccttgcgccagcgcgcactgacgcagcgcccatgctcggtacccaggaccaatagaaagctccgaaggggacctgggccaatcacattgcgccgccctgagtcgtgctcccgccccgcgtttgctacggaggcccacgacgcccaggcgcttccgcgaccacccggagtgattgcccggcagagcgcggtaggtgtcaacgcggggtctccgcgcagttggtccggctgggtgtcaaagacctggccggctttctcctcaggctgcgccgcccggcccgtgtctcagcgcaggtccccggggcgccgagtttgggggtgctcgccccgcgggtccctttcattcctaggaaaacgc

SEQ ID NO: 33295 - DNA, 2300 bp, Homo sapien
actatttgaccacttacattatggtttgggaaaaagtaacttaattaaactgttgcaatgtctcctgtgaatttaatcaatgcaaaatatggaatcaatgttcaattaaaatcttaatgtgtgtctcctattttgatgagtgtaggtaaatttttaccagcctaaattatcttcataaaatgcatgcacaattgctgggctagagattgtttttcaaaccgcgccagaaaaagtcagatctagcctcagctcaagtatctactctgcgtgcaatgcattgcatattccagttacggtaaactattcatcatttgtcaatgtcctatctggaatactgccggaaatgctcttccatcactcccatcacctattttccttctaaaattcagcccacaaatcactccaggtgtcattttctgattttctttaagtcctaaattcttgtataataccatcgagttttgcatgaatttcagtgtgagtgtgcatatcatattaaactgtgatcaaccatgcacctatcttttgctggattgtgctgcatcaacttggctaaagttataaactatatttcccagttccttgagaaactcaaatacttttattttttatttttttagagatgggttctcactcttttgcacaggctggaaggcagtatatatttgtagctcactgcagcctcaaactcctgggttcaagcaatcctcctgactcagcctctcaagctgggaccagaggcacacgccattgcagttggctaaaaatcaagtttacagttcacagaaagactctgagaaagatttggaaaatggaggcttttttttttttttttttgagacggagtctcgctttgtcacccaggctggagtgcagtggtgcgatctcagctcactgcaagctccgcctcccgggttcaggccattctcctgcctcagcctcctgagtagcttggactacaggcgcccaccaccacgcctggctatttttttgtatttttagtagagacgggatttcaccctgttagccaggatggtctcgatctcctgacctcgtgatccacccgcctcagcctcccaaagtgctgggattacaggcgttagccactgtgcctggccaatggaagccttttaaattgtttatttgtataatcaaacagagaggttttacgtctagtaaacaaattgatgtatcacttgaatcactgcaatagagtttatagccctattcacaggcccaagagccttttgaatgaaatggaagcctgatctctttagggaaggaacaatactacactgtcagaaattaagaatttaaatcttcctcttattcatttccaaagtacctgaaactctttaccaggtcagtgtgctttgtggaagagaaataaatgctcttcataggctctaaagagatacttattcttaggaacccaaagtgttgttatggttcattagtcaaagtaggagtttacagaattgattaatgtagttttagcacagttctatctcacatggggccagaaggtccccaaatctattctgtggtattttttctccaattccaaaatgcaaagttggaatccaaatactcagccctggaaatatttctatacgggtttcttgatttgttgactgaggactattacagaagaaatatgaagttgaactgtctctactaccaaagtaataaaagcaataaccacactcatggaagagatgtggagattagcgcctccatcaggaacttaaaggacgcaggggctgtgcaggagacttgaatcttggaaaatggcaatagaatataaacttaatcatatggcgactccagtggtaactgctgttcagttgtgtgtgtgtgttcatttcattgaaaaaaatgaacacaatccattaccaggtatgtggctataaatctggtgaatgcttttatggctatattttttaatgaagtgtactgaaacagtttgctttcagctggcagaatctgcaaaattgtctaacttccagactatatcaactctgcagtcctatgtaataatatatccatgagaatcttggtgacctctgcattccacgggacatgatgctggccttctacagtgctgatcagacctagtaagcacaaagtcgcaaatatcccagacaccctgaccacagacacacatgtataccaaggacaggaataaatacctaaaactgtaaggcactgccaccttcttagatgtcttggtgagaggtccactgttcagagggcacactgagatataaggcgaaggcctttttggatctgtagtgtgc

SEQ ID NO: 33296 - DNA, 2300 bp, Homo sapien
tctcatgctgaattttaatccccagtgttggaggcgggggctggtgggaggtgtttgggtcgtggaggcagatccctcaggcttggtgctgacttcctgatactaagttcctgcaagatctggttgctgtaaattgtggcacctccccaccacttttctctcttcctcctgctggccttccaccatgaataaaagctccctgaggcttcccctggaagtctaacagatgccagcagcatgcttgtacagcctgcagaactgtgagccaattaaacctcttttctttataaactacccagtctcaggtatttctttatagcaatacaagaatggactaatacagacacatcatttttttgtgtgtggtaaattcttccaatttctcaccttgcattcccagtgctgccctaactggacctggggagtttcatcatactttcttcaatacaaagattgtgaatacctatgaactcttttaagacaatttgtattctgccatcaggcttcctaagctaccttgtggatccacatgcaacagaatcagaactttcaaagcagtcaccaaacatgtaactgacaacttaaaaaaaaaaaattcaaaatgaaattaacaagcaccaagggtgttattattctcttatatttcttttagcagcattccatcactatctgcttcttccacttcagaaacctgcaaaactgctgtagaatatcaagcagttgttctagtgaagtcaattattttttagctcactgcaaaacatctgttgacccacgttttagtcttctgttcactctcttccaagtatgtacttgggaaaacaacaggacatcaaccaggcaagctcattaccattttccacagataaatctttacagtcggtgtgaaaaatctcaccctgaactatggtggctgtagtgaaaagaaccatggacagacacaagtatgacttgtgaacatgattcataaagcacccagagccccagtgtggcaacaccagatgaatgaaaaaggttctaccatgttatcaaaatcatgtcattctcactttccctcaacagtacctaaattttaaaaagaatataagcataatgatgaaatactacaaaagtatcaattgagatcacactgcactcaatgaaaattatccatgtttatgaaaataaagatctgtatccaaaaaaatagcaaagtgtccacaataaattataaacaccaggacatcagggacattgatctctatatcccaaagcctagaaaagtgcccagcacctaataacaatactaacttttgaacatttcaccacgtgccaggcacagttctgatatgctccatgtttcaacttaaggcttacaggccaggcttacaggccaccagtgaatctataaagtttcagtttatatatgagaactgaagcacgggattagataatattccgagacaacacaaattagtagcagatgggttaaactcaggccgcgcatgtctagaatatgcacacttacatgcttgttgaaaaaactgtgttgattagtatcaaactagctttagaaaatagaagttaaaaaaggcaatagactttggcaaattatttgagtaaaacgtcaaatgtcagatatgtcgaggcatgggtagccttctaaggggtcacgtctatggaaggaaaaagtttggcttaacaaataggaaagtgagaaaaagaatgaaacagtaaaataacaggatctcgtgatggggaaaaggcggcctgcccagacctaaacgcctcgcggcctcgcaggcgacgcggggatgactcagcaggacagaagggagggaagctccagacgccacggccctcttcgagatgaaagtacctcccatcctaagggactggcgttccaggaacagctgcgctggctgagccggctcagtgaggcggagcggccaagccttcagtccactcccactccccgatgaaaaacccaagaccgggtagcgcagcccctccgcgcacgcgtaacacgaggagacaccgcccacacgccagacgcgctgtgattggccccagctaccctcggaccgagattcctattggtcccaggtgtcgagcatgcgcactttggtcgtgggcgcgtgtgtggaatgggaggaggtcgcgctgtccatgggcgtccttggcctgcgccacccaggtgagcgctccggaggctgcgatccccgggtcccgaccgcccgcctagcactggcctgatggggaagcgtcccgggactggaagggcagccggcttgcgcgcgtggttcccacgcccctcgggc

SEQ ID NO: 33297 - DNA, 2300 bp, Homo sapien
cccgcagagtgaagcctgaactctttaataggcatctaaggacttggacccggatcctgttaacctgttaattcatctttgcctctaactccctcccttcatctttcaaggcacagcgcaggacttaactcattgtgaaagtactaagccttgatgtatctttaggaaaaacacacgtatacacacacacgcatgcaaagagaggaagcatagcttagtggttaacctacatagactgcaacttgcttaaataatccagtatttatctatgttttaataaaattgttttaataaaaatatatgaaattcatctatcttttctctggaatgcttttgcctgttcaaagattatacaatgctcccgtatgttacagaggaagccgtcccttcatttataaaagacagttaacacatagcacaaaaactctagagtaggatggatccgcaactactgtactggaaatatgctaaattagggttctgattagagttaatggaattaacttgggtgagagaaaatactcaccattaatctaggggtaacagaggagttaaactccaattcagaaacagagcagttcaaaatcagaatctagagtcagcctacatgggcttgatctgggaatgtgccctttattagacgtgtaaccttgggctgctgcttgactgaataggtcttcgattcctcatggaatgaatataataagatctgatgaatgcaattagacagtgcctgaaacagtagtcttaagtaggtatttttgttgtcccactttttgagaaacaaaaccaaagtcaattcaattaaaactgcaggtttcttgatttcatcctaatactttgcaaattaatcacagaacccaagtgaaattgcctagactctcaaagagttcgaaaaacatttctaatacactcaaaattttcctagttgacgttcacagattatcaagagtaaagcaccttcatacagttttgatcctcacactgtctaaatctgaggagctgtcaggaaagacatgtaaggagagatctaagctaaaactcaaaccacacatgaggcttttcaactgtgaccaacttgtagttaaaattcagtttatgcttttctgtccacctaagagcaaattaaacctttaagaaagcaaaggataaaatcattgttagctcaagcattaaaaaagaaaataactgaatatatcttcttcaactctccacccctagggatgagaactgcacctggcaaacaagaggacattcaacacgtagtagctgttaaaatgagtaactccccaaaagcactattagaaggcgatatagttattatgaccaagttctgcggaaacatggtgttgaaaaccttactgaagctaacaatgtgcgtcaccttccaggagccacacacacatcctgagggcttcccagatcaacccctcatccccgcgacagagccacaatccagcaccaccttcccaggactctcagctgaggccccagcccccgcaggcccagggacgacgcggcgggcagggcacatgcctgcgtcgggccaggtggaagctcggaacgaccacaggcccccggggcgcgcccctccccgtcacgcgccccgtttcccacgtccacgcatgcggtttccccaggcctggaaagcgtctagagccaaagagcccaggggcttgcccgcgcagaggccgacgtggggcccagggacgcgctcccggggtcctccccgccgagcccgcagccagcacccggagcgatcccccgagcccgaggggcgtgggaaccacgcgcgcaagccggctgcccttccagtcccgggacgcttccccatcaggccagtgctaggcgggcggtcgggacccggggatcgcagcctccggagcgctcacctgggtggcgcaggccaaggacgcccatggacagcgcgacctcctcccattccacacacgcgcccacgaccaaagtgcgcatgctcgacacctgggaccaataggaatctcggtccgagggtagctggggccaatcacagcgcgtctggcgtgtgggcggtgtctcctcgtgttacgcgtgcgcggaggggctgcgctacccggtcttgggtttttcatcggggagtgggagtggactgaaggcttggccgctccgcctcactgagccggctcagccagcgcagctgttcctggaacgccagtcccttaggatgggaggtactttcatctcgaagagggccgtggcgtctggagcttccctcccttctgtcctgctgagtcatccccgcgtcgcctgcgaggccgcga

SEQ ID NO: 33298 - DNA, 2300 bp, Homo sapien
tccaaaaggctaacaagtaagggcaaatttaaaattgggtcctgtatccaataaaaatgtctgtattctgtgtataacgcttttcgggattatgagatttcaagaaagtttacgtgacaattgcaaagatcatattgtgttgcagataaatttaggatctttatgacccaggtgattgacatgtatatgtacacattatacatatgtatacatattttccaaaatacatatttcccaaaactaagaatttaaataaagggtatttgctgaaaggatgggggttgtgtgggtgaaaaaagtattctcattagttacaattcaaaatggttttgttaattctcaaacacacattctcccatttggtcaattatgaagtgctgttctgtttattgctgtataccatctgaaaactaaaaggattaaaacaacaatttgtgattgcctttcacagttctggaagtttatagttcagttggacatttccctcttgggttcctccatcagttacaggtagactggggccgaggctggaaacatctcaaggcctcttcacccatgtacctgacatccagactgagaggtctggaaaagctggggtagatcaggaaggcaccttctccatgtggccaatttgggattcctcaaaccatggtgctctccaggtagttaggcttcttatttggcacctggatttttacagagggggtgatctaaaaaaatcacagcaaatgtttcacagggtcacagaagcttcctataacttagtcacagaagtcacacagcatcaccaccaccacattctcttggttacagagggctggcccaacttagcgtggagaggactaccaggaggcatggttcattggtgccacctgggagcgtagctactgagaggttatattcacgtactagagggcagtggagacaagaaaatgtgtcactaaaggctgtctggggactaaagaaagtcctcattattttgaagagggatgtttgttacacaagggatccctgctatggtatgtcatcgagtggacaccacacaggaagctagtttaactaaagagggaattcattttttacatttaactactaacattttgggagaaagcaagaaacaagatgagcactgagcgttgttattattatttgagatggagtttcattcttgttgcccaggctagtgtgcagtggtgcgatcccaactcactgcaacctctgcctcccaggtttaagcaattctcctgtctcatcatcctgagtagctgggattacaggtgcctgtcactacgcccagctaatttgttctatttttagtagagatggggttttaccacgttggccaggctggtcttgaactcctgacctcaggtgatccacccacctcggcctcccaaagtgtgaagattacaggtgtgagccactttgcccagcctgcattgttattttttgttcacagagagagtaaataactaaaatgcttcttcaagtcgcaggttacatttaatagcagaaaaagaatttcaggaactgttacttattgccaggaaataaggggccaggtcaatgctcagagcctaccatacccttgaagattcctagcaattaagtgaactattaatttctggattcggaaaccagaaacaaaactttgccttctttacagataagggggacactgtatcatctgctgtccggtgtcaaatgtcacaatgaatggtctgttctcccctgtgaatttgttctgtggtcataactgtatacaggaatcactttggaatcctcaaaacccccgagccttgtgttaaaccccacgagtatttagagttttacaactacgaagctgaatgtcgagagaaaaagacaaagattccaaaaaaatggtctcaaagtacctccttgtttaagttggctgccaggcaaatcagctcatctccagcagaacagaagccgccttttcagggaagcgtggcagctgccggcgaacacaaagcagctctgtgatggttgaagccagcaaagaaaagcgccccctccgagtggaatcacaggaaggaaacctccgtgggcagcaggagcaagtgcaatccctggagacgagtcgaaggggcccgaggccccgagaagggcaggatgcgatgctgggtgtgtgacctcagccatggaagggccacctgccaccggggggctgggccgtcgggcctttggttgtggagggaaaagagtggccacttgctggagctgggaacgtgcagtgatgagcactaggacaagaggaccgtgacaaacagacatagaag

SEQ ID NO: 33299 - DNA, 2300 bp, Homo sapien
catgtcatgtggtttgggatgaaccaggggtctggccccatcgggtcacaggtgatggcaaatagaaaagaagcaaatggaggaaatagtcggataagtaggtgacgtgaaaggcaggacctggtcaccccagcaagtgctatggacagttcccggaaacggttgcccacttcacaggtccatgggtctgacccttggactctgccaggatcaactgcccagagtgccagagttttagccaaaggtgtacttacttccttatttatctgcaaaaggatggaaactgtgggagtcaaagcctattttgctgagtgttcccactggagtctctggtagaattagcaggtcatgctgtcaaaatcatggacaaaggctgggtgcagtggctcatgcctataatcccagcactttgggaggccaaggtgggcggatcacctgagctcaggagtttgagaccagcctgggcaacatggggaaactccatctctacaaaatatacaaaatattagccagccatcgtggtgcgtgcctgtggtcccagtttcttgggaggctgaggcgggagtatcatttgagccaggaggttgaggttgcagtgagctgagatcacatcactgcactccatcctgggtgacagagagagaccctgtctcaaaaaaaaaaaaaaagaacaaagtcttagcggggggtctctatgtccccaagtggctctctaaggggatccattagcgtataattgaatatcaaagggaattttaccttaaacatatatcaagtctatactcagctaatcgttttgtctaaacacagccttgttagcatttgaatttacaaatattcatttgcttatttgcagtgttccttttgcttttagaataaatcataaatatttccccaatactgtcaagatacttcttcaactttgtccctgaaccatcagctttctttagggtccgggtatcctttacacttcaatggggttttcttgtgtgtgtcattgggggtaactccattgacctcagcatttctatctcaagagatggctctggaacacagaaccagaggcaacaggtactaatggttgataaaattaacagcgactgcataaccattttccacatggcagggctgtgcttaagccccacacctccaataatcaatttctatgacggtactaataaccttaactatatgcaaattcttcaccacttatgatatggtacaaactggagtttacagatggccttggccttgcctagcccatttgttcatcctaacttcttcatcacttcctgatgcacttggggaagcatgttgacacaacgttaccaatatttgattacctatggttatctgcaattacctacgcttatcttatcagaccctagatgccatttgagccccttacttctttgggcagtgggtgaaatgggagaacatagagaaatgttcactttgacctaagaaacgcataaaagggaatgccatgcacaatgtaagataaaatgtttggggacaggggatcatcgtgaaatttatttctgctattctgccctattgaggtcattaattataatggatttaaagatttttttttaaactctacaaacactaagccaaggaattcaggttatctgctatgttaacctaataaagcaaaggaaaataagttgctttaatccttgcttgttaacctaataaagcaaaggaaaatatgttgctttaatccttgcttcttttctcttttggtaatagaaaaggtaaataagatgtaatgttgaactgctggtgatgatttctaaaacgactctttaaatactcctttcctatggacttatattaaagatgcattgtacacattgttttagcagatagatcaaagatatactcagtggtcatctgttgcattatcagaaatttgatacatgttacagaagcatgaggaagggaatcctatccacttttgaaaatagagttcacattgcaagcgacatagggcattatcaaaaccaattcagagcctggcacaaaatgtatacttcctagtgaaagctgtctcaaaacacagcctttttgatggatcatattagctcatatctgccatagaaaggcaatcaagcttactccctgcaatcggagtcaatatcaattcttgctcaagcaaacatgttttacagtgttggcgcaatggcaggaactagtcaagggcactttcagatctggaaagaggaaagaggaggtagaaaatcactcttttgtgtttcttaaactgtcaatcaagcaagaaaatttattccacc

SEQ ID NO: 33300 - DNA, 2300 bp, Homo sapien
atatgtagtaggaattacattcagggctataaaataagtttgtattaagggccaaaggcattattcacaccatttataagatatagttcttcactctcaaaggtgtctgcacaaaattgttcaatgtcttctctgatttaattcagattttgaaagctcttaagggcaatctttggaatttagagagaataaagaaagaacatatgaaaataataaatttacatggttgttaaagatgcctgctataagaaaaattaacttagcaaggaaagaaagagtgggaagattatagtgaactttgcatgtgtttatcattactatacttatttaagacttccccttccttctgagccaaatttgagcaccccaggtttcttcagcaacattttttaaaggagctaatgaaatactgtgcttctcccatgaacatcctgcctcatcgcctgcctacttccatatgccccatgttttctggccacttgaaatgcctttttattttatttttctttgatttagtcatgccattccatgaattgaaaatagtttttgctacaactgagcaactgacccttggcagctctgagtctcttgacagaaccgtgtaactgatgtttaggggaggcaagaaatatagttggataatattccatctgtggtatgttttgtaattctcaaagcctccagtttcctttacctccataactatgtggagcttcggttgatatcaccaagaatttcacactccaagtgagagaaggatatctcccaaaggatgtgtaattctattatgctgcaatgctctttctgtgacttcaagccaagtgaaaacatttgctagttctggaggtacttttcagccagtctcaccatgtgaccttctagaacttctctcactcaggcaatttgcttttgacccattcctaccccaccatgtaattatgacccccccttacctactgcaggaggtgggggtagcagccattcactgttttaagtgtagatccagtatgtggccacatctgcctccctgctctgtttgttcttttcttctgtagaacattaaatgattagtgtgcatggttcaggcaggaaccatcttcagatggagtaaaacagaaaagattatatcagcgctttgcagtgatttcctgtgtgctatatttggttatgaacagattagaaagacttatgccttttatagtctgagaccaaactcctctggccacataaccacacaaagtaatatccgaagaacctaggatggttataagatctcatgaacaattctgcttttttgaaatgtactttagagtcctggaatctttaattaatggattttcctgaccctattcaaagaaataaactcaaaagtaaaaagtaagacgcattacaaatattatgctgaggtgaggcagtcgctgagaaatcctgaacactccctaggagccaggtgtggtgctgaatggtttcagccagtctgttgtttctcatttgtgcatttgcagatagacacttttgcacataaaaaaatgaaacttgtagttgaagactaaagagtttctgctttcaactcagctcctaaccatagaaatcatcttacatttgatattcatctagacatgagagcatactacagagtttgggaagtgtgtgggctgggtttcaaaaccatgggggcaagtacattaactgtgttcactcgggttttcatatcctctttttttgggatataattaatggttaaatagtagtttaaattatatttttaaatgcaggtgtaaaattgaaaggacggacttaaaactacctatcttcccttaagatttaaaatgttcatatttatcagcatgaaaacattggaatcgcattcaaactaagtgtctctgccctcgtagggtagtatttctagttactctggaattgaggtgaaaacatacagaagatagttcttttgtaagatttccagcaaaacagtaggccgagttgatggttgaaatctcttaccctcatataatggcatttaaaaaatagcgtccccaaagcaagaaagggacagttccaggggacagaaataaaaaagagaggtcaagtctggaatcctcagtaggaacccaagttgaaatgcctctgggggctggggcttataaacatgctcagggatgggagaagcaggtgaggcttgagcctgatgagcagggaggccagaaactgaatccggaagctacagtgagctgttctacctgcaaaaggaaaacgcaaaagaaccgcagattcaccccccaagacgagaagaggaagat

SEQ ID NO: 33301 - DNA, 2300 bp, Homo sapien
tgacacttagtaggcatccaacataaaattattattattattattattattattattttgagacagagttttgctcttgttgcccaggctggagtgcaatggcatgatctcggctcactgcaacctccacctaccgggttcaagtgattcgcctgtctcagcctcccgagtagctgggattacaggcgcacaccaccacgcccggctaatttttgtatttttagtagagacaggttttcatcatattggtcaggctggtctcgaacccctgacctcaggtgatccacccaccttggcctcccaaagtgctgggattacaggcatgagccaccatgcccggccccaacataaaattatttaatgagtggatataggttctacagcctcagagcccctgcaataccacagtattagactatccatatgtacccaaagtttatcattgtaatactctaaactctgtaagaagcctcagaatttcatcttaaagttgagtttctgagttagaccactggcaaatcagctgctctcactagatagtttttctccaaaccactcattcattaattcaagaaacatgtattgagaacctaccatatgccaccccctcttctaggaaatggggagacattactgaacaagacaaggtgcctccaatcatgaacgctattggagaagagagaaaacaaaaagtatataaactagaaagaatattatttcaagtaataggagggagaaaggaactaaacgcagaggaaaaagcaacagattttacatggggatagaatgtctagggaaggactctctggtgaggcaacctccaaggggccacgacggtggaaaaattaattccagggaatctggaaagaacattaaaagaaatagccttaagattgaaagccatgccattttaactcccgtggcatctggcacaacgcccagcccagaagtctcacctattcactcattcaatcttctgttcatttacgacctcattcattccttctacaaagggtcagtgaggattcacagcacaccaagcactgtgttagacagtaataatacaacaaacgtttattgctttattgggagaattagtgtgtatttgaacacattaaaacctccagtatttgacagattttgacatacaaatggcaacttcatgtaattcatagatgctatttatttctagattggtaagcacaaactattgggaagtaaataacgcattttggaaacttgatttttcaagttctttgtaagaactcttttacatagcattgtaaaagatattttacattgtacttttagttgcaaaggagttttataaacgggttatagcaaactttttaaggaactatataagttcctttaaggaactatttgtcaaccttattccatttacagctaatagttgaaacaaatgaaattgcattttcttaaaacatattatatttctaatccttctcccaagttaatgcaaatttagaaaattttgcatgtattggtatatatcacaattcccttcatttacctcccaattagaatttcagcctaaggctacctttgtaatttctcaatagagaaatgttttaaaatataatttcagataattcaaggaactgagttaaacaagtttggagcatatttttggtgacaactattggacatacgaattgtcaccaactgaaccatggtccattcggcctgccatgcccattccagaagatacccgagaagtcattgttgtcttaggccattcaaattttcgtttgcatctgtggccgtgagtatcacacactgtgtttcctgatatctagtgtaccagaaattttctgaattttccagtagtcattaatggctctttaattcatatactcattcaaaccctatggaattcatttacaatgaatcattataatatattctttaactcttggagtgatgaattttataggtatatttacaacagtgctacatagtccttctacagcttgtcaaatgcacatcacattcaagagattttgtgatgtcataatgtgatgttcctcttatctctgttactcattttgatatggaattggaatatatcctgttcccagttcacactcccttaagttaaagagatacattctttttacaacagagccttatgttttcatctggctaattcagaaggtaattccaacggtgaaaactatctcgagtggtaattatttgggcagtatcatttcatgctactcagaatccaaggaaaagtctctgatatcctggagacagcagtcttgattaaagagcct

SEQ ID NO: 33302 - DNA, 2300 bp, Homo sapien
tcagatgctcctgatgttagagagagctgcctatctgaatcgtgacacagttttacttaacttggtgattagttttaagagtttcaagtgattttatttttggtcataaagtcattgaaattgagcctttgcttttgatacaggaagatgtggaggaggagcagaaaacctttactaaatgtccagccaagagtataaaggcattgcattatgtagacaagtgatcatgaaccctagagttaactaatatcaaaaactcatcccaaggaagaggtttgagctacaaagcagatggtgtgcaagatagaacaaatgagtttataacatatcccagtcaaggaatccatttttatagtagtatatgtacaactatttgagtacagcagccgtacatcctgcaataaatcctccataattcttgattctaaaattataccaattttgtatttaaaaatgtttctgcaattgttgctatagttacccagacaaattgcttggggtataattataccaaggtgacaagtttttatgtgttaaataatgtttaaaatgtaaattatggtgtctaacaaattgagttacaactaagtacaaagtgtctaaagtgaagcattgtacatttctgctcacctgcatctacttgcaaatttataccaagaaagttaactgttttcttgaatcataaaatgagcgtctataagtactttcagttgtcttgagtacagttgacaacatagataatttcacatatgttctcagcaaccttttaaaattgagatgcagaagtttggttgaaaattaggtttttatcactctgctaccctgcagaaatgatagggggcaatctcctgtttccaattcctgtatagattgggagcaacttggggataaattcagcaggtgagatgtggctgctgggaagcactttggagaaacagatatgggtacgcttggtaaatatatagcatatttttcagatgaattttttaagaattggttatccagatatacaaaatcaatttctgatagggagaaaagaagaaaaagcaaaattaaagtaagctagaatatacataaacttttcaatataaatgaacctgctcaaaacttgcttcgattcaaaattgaagcaaaatagaacaaaacaaatgaaaacttgacccaagagaaggtattggataataggtaatttatttcaacatactagtattgacagtctttgccatctaaaaggttgtatagctaaggaaaccaggctgtccatttcacagagtattttgaagccaggcaacttcaaagacaagtcatatttcaccttgtgcatgaaatttaaagtaggagtgacacaacagtggatcaagaaaacagaaaaatttcccaaaggaattgctgttgtcatcttctttcttcttttttggtccaagattaatggttgtttgacaagagcaaagacaagcacactttatttccctttcctacattttaaaatgtagtgacatagtattgctgcatttggaaaaaagaaaatcattctgtttttaaactctttttttccttattggtttcctagaattggtttcctgattaacacttggggaaaaaaaactattttaaaagagaataatttttttagaggatgaaattcttttattattgaaaggtcatgagcccactaatcttttatcttcccatctttcactcattatttgtcactgtatttctgtagaattggctaaactagggttcatgtagaataatgaggaagtatacactggaaaaatgttattttatgttacatttttatgtacaattgagagtaaattacactactgcaataggtaattcaattacagatatgtatgataaataaccagtagagtgattctatcagaagccaactctgtgggtgaaataatactatatttgttgagacgtgaaattaagtaagttataggcgagtgacaatcaggataacacaaggacaaatcgttcacagaaaatcgagcctctttcaatcagttcaaatccacccaatgtttggcaaggatgtatgatgtactcatggaaagaaaaacagagtcaaggaaagcaactaagaaaaaatttgctaagcagtttcctgtgatctgtctgcaaaatcataaaaccgaaacttctattctcctgaatcacagcagagatggcattcctcacaaagtgacttcaaataaaattccacacaaagagcttttctttctgtaaaaacaaaacaaaacaaaaccggagatgtgacacgtcttgcagagggcccccaaagctgt

SEQ ID NO: 33303 - DNA, 2300 bp, Homo sapien
ggtttagaaagctatcttcttcccactgcttagctctatatgccaagagtttttttgctttttttttttcttttcaagtattaacggcaatgttcagaggcaagaagaggattagctgaatacattgggttctaatttctgtctccctcaccctggccacgtaggctccacaggtccaggcaaaggctgcagatccaagcataaggcagcttcctccctacatctttccccctagaagcagccaggcaagaccttggcctgcctcttcctcccagggaggctcctaggcctctgtgccacgtaggcaagataatcggaatgtctggaatggaactagtgctctaagtgccaagcaagggaagggagaacggttaagcttttccttcaggtccccaggagcctgcagctgccacacagcaggccgggagcccccgccacaacccagggaggaatgcttgccaagaaggcctgcccagctactgacacttcctcccagaggtcttaaaggaaatcccagtaaggcctgagtacccaagacagccagatcacccgtgccagagactgggcatttggggatgggctgggctttcatagaaaccttcggaattgctttcacttaattcttttattttaaaaaaaagttctagaaaataaagacacatcgatagcaatttgtatttccattgtcctcttaggtctgcatggctactgtgcgagctatgacaccctgcagcctgcaatagcttctttgttttatggatgagctcaatggaacccttatggacgcaccggaccatgcccaggaccagcgaggcccatccataccccaccactggctggaagggcgctggtgtgaacgtgggtccttgcgggggtccctacctcactgcggtcaggagggggcaattcacacatttcctcatgcaggggaccttcaagcctccctctgaggcgcagactgagtaaaaagggcccagagatactgtcccgcacccccatccagtgggaaagggccactcaaggccagtcaggactcccaacccaagttttatgccttatactcctataactttaccatttgctcttttcgcgaggctgaccccctccctctccccccccaccgcctcctccagaaactgaagaactgcaacaaagtgtccaattatacacgtcttcaaaggtactttacttgcttcccaattatcaacttttcacctgagtacttagtaaggcccaaggatcctgcaaaagtgcaacaaggaataattgacacagaattggacgaatgactttgaccatacgggacttctctcttaacgctcagcgtggctacctggggacgccttctctggcctccctgattcgtcagatttgttcatttccttgacttaatcccgctgaaatcgacccgaactagccgggagtctcacccccaaagtgctcctccaagaacccgcaacgactgactctctcgtcttctttaaggagtttctccctcagaacggatgaggatgtcacacagaaagaacaaaatcacaaagttcgagttccggaggaccagacggcccctgccccccatcccccgggccagatttagccgagggaaccgcacgtacctgaagccgaggccggcagagagggagcgccacgtctcaggtctcggccggcgcccccctccggggtgcagccacgtctgaaccgggacagcgggcgggggagccgcagagggacccagtgagacgggggagggagcccccaaaagtcagcgctcggccgcactcgcactggggaggctggaatggaactcctggggtgcagcggggctcccaggagcgaaggtgggggtcctgtaccgggaaggggcggggcccggggaggggctcggggaggtcaggcgcgggtggggcgctcgagtttcaccccggcggggaggaggaggaggaggaggcggcgcggcggcgggggcggggcaggggcggggcggggcgggggtgggcccaggctgtcccccgctccccgcccagcgctctccgccccgcgctctccgcgcccgctcgccccgcgccgatctacttgccgggaaggcggcgccggtggcggctgctctccctgagcccgctcccgagcgctgctttcccgccgcgggtgggcttcgcagcctcaggccagccgcggcccttggcccgctgcagccccggccctccaccttccccgtgcaggggcggcccggccagtgtcgctcatcccgggacgctcccttctcccacccaggactgccccgcggagctggcttggacacc

SEQ ID NO: 33304 - DNA, 2300 bp, Homo sapien
caaaattgattgctgtcttattttaagaaattgccacagccacccaaccttcatcaaccaccagcctgatcagtcagcagccatcaacattgaagcaagaccctacaccaacaaaaagattatgactcattgaaagctcagatgatcattagcattttttggtaataaagtattttcaattaaagtatgtatatctttttttaagacatagtgctattgcacacttaatagaccacagtttagtatcaacataacttttatatgtactggaaaaccaacaaattagtgtgactggccttattgcaatattcttgtattttggtggtctagaatttaatgcacagtattatggaagtatgcttgtatttcatagctgcatgcccttacatttctgtttttctaagctgcagaatgtttcttctaagttgcaaagtttcttcttctttctactggagggaaaacaaggctcatcctcctggcatgcttgcatttggatccattctgatggcatctgctcatgaacacctcccttggtgcttccttgaagatgatcctgtctctttccttcatctcactgtagttgtgtcaggaagaacagagtgagtccaagatggcatagatggtcctattcagagaagagccataaaagaacctacagatttactctcacgactaattttttaaaatatgacttcccttccagttttctaaaaataagattaatcttaagtattctttatgacacatttagacaaagtaacacacgttcattaagacatatgcttcattatcaggtctgccaggtaccttttgattaagtgctaagttggagaagctttaattcccccagtgtttattgaattggtccccactttgtgctctggtgatgaattgtctaaagaactaacttggctgggagtggtggctcatgcctataatcctaatacctcaagaggctgaggcaggagaattgcttgaggtcgggaggttaaggctagcctgggctatgtagcaagactccatatctatgaaaaatttttaaaaagcagtcaggcatggtggtgcatatctatagtcctagctactcagaaggctgaggcaggaggattacctgagtccaggaatttgaagctgcagtgagctgtgattataccactgcactgcaacttaggtgacaaagcaagactctgtctctaaagagagagagaggacttagttttatatcacattatatatgtggctcattctgcctttagtcttgggataactggaaggtacaaactatactttatctacctttgtcccgtcatagtggttctgccactcttgaacatttggcaatgtctcgaaacattttggctgttacagcctggggagggtatctggtgggtagaggacaggcatgtggtagacattctgcatttcctagattgcacaggacagcccgtgcctaacaaagagttatgtagcccaaaatgtcaataatgtaaagactgagaaaacccacttcagcattacaggcagcacggtatacatattaagaaataccaacttaatttttcatagtgcattacagactgaaagcaacaaatttaatcatgtattattttatctttacttttctactagaacaactagctcatgtcataaaactctcataattttggaaaaataagagagaaaagattttaacccctgaattactctgcagatgctgaccagggtgaacagtgctgagtgcttgtcttcatttcattacaccttacttttctttaggcctttgacctggtgtacacatgtatgtgcaagcctaattactttgattttatacttagagatacttttattatgtatattttattctataactattttacagatagttttgaattgctcaaccattgcatattggagaactactcaggagtcctatgttgctggttgtaccatatcatcataacataagtgaaaatttcaaaaatgtatatttttaaagagtacacgataacattaagtagaatcacacctgtaggcaaaatcaattattcatagtagagatgaagaattgagtatctttggctaattactatggaggagctgttctcccagctgtctgaaggtgtctgattccattatttgcctgtgatgactttgaaagctaggtaaacctgtaaaatgcaaaagccatcaataagaagcaaattgatgctagagtatctcctccttatttgactgtctcagaactaaatagagaaagcagtgacataaacaaatgtacaccaccttcctgccccatgcct

SEQ ID NO: 33305 - DNA, 2300 bp, Homo sapien
aggatcataggactaccatgtagcaggctacagcaattcctcatgatatggagactacagcagtttttttctcttaatctgtttggccagcttccacaagtttcctcccccctggggctcagtatcttggaagaataatatctggtaaaatatatcttcctgcatgccactgcaagaatcctaatacatactgttaagatgcagtacaattcactgctcatcctgtggaaaactgaccaggttcagtaaattctataagctcctgaatacatttcacatgcttttattttatttcttttttaatactcttcctttcttaatgtagatgaaagtttctgacatatctttagttttttctctctgaagaacttttaacatttcttttgaggcatgtctactggtagcaaattccctcaatgtttgtttgtctgagaaagtgttgatttctctttcattttttgaagaataatttcgcagagtacaaagttctaggttcatttctttttctcccaacatgttaaatatttcattttacccttttcttacctatatggcttctgaagagaaattggatgtaacttttcatatttgcttctctatacataaggtttttcctgcacctctggcttctttcaagatatttctgtgtcttgattttctgccatttacatatgacatgcttaggtgcaggaattttttggtatttttcctgtctggtgttccctgagcttacaagatttgtggtttgatgtctaacattaatttgggggaaattctaagccattattgtttcaaatacttttttcttttgtgttctctatttcttctccttttgttattaccattacatgtacacctttcatagttgttccacagttcttggatattatgttctgtttcttttgctgtcttttttctctttgcttttcagtttttgaagtttctgttttaatgtagtcaagctcagtgatttttctcctcagctgtattcggtctactaatgagccatcaaaggcatttttcctttctgttacagtgtttttgttctctagtgttcttttttattctttcttggaatttctagatatctgcttacattatttatctgttcttacatgctatctacttttgctattagggctttaagcatgttaattatagtctttttaaattcatggtctaatagtttcaacatccctgccatatctgggtctgttttcaatgcttactctgtctcttcagactgtattttttgccgtttagtgtgccttgtcatgtttggtgaaatgtggatgtgatgtactgggcaaaaggaagtcttgtaaataggcctttagtgtgtggtgggtggtaagatgtaggacagtgtttcatagtcctatgggtaggtctcaagccttagatgagacaggatggatgtcgggggctggatttgggtgtcctttctcctatatgtaaggctagagctagcttgattgggggtattttccttccatcaggtcaattaggctctgatacatccccagaagatcaggctttggtaaaatactttatcttgcagtcagagcttgttaaaaagagcaacagggatattttctgggggaaagtggtggctaggaggcaggactaacttgcagttaccactcagatggacagagcaggatgtggagacccacataatgaacttttgctccaggaactactgcaagaatgtaccagaaaagccaaaagaatccacagaccctttgaaggaggtggattgccattgcaggttctgtgggacagctgaggaactgtgagtctgcttgctttatcagctgggaggcttgtagcctggggcaggttctcaggcctgctcacttgctgcctggaagtaaactcagtgctgtttgtggagcatggtgagagtgagactggtctctctagctctgggctgcacaggaactgagtgaggcctgtggttcctggctttcctccacttccctggcaacttgtgtgacacaacagaggcagccataatccccttgggaacacaactctgttggcctaggaaccatactcccatctgtcatggcagctgcagcaagcctcacccaaggagagtctggctggaggccaaacaacacaaaaccagcacacttaacaaaaatataaccaatgacccttgcagagtccacttaactcccctccaccagagcaggtgctggtatccacagctgagagacctgaagatggatcacatcacaggactccttgcagacattctccagtaccagcccagagcctggtaggtctgttgg

SEQ ID NO: 33306 - DNA, 2300 bp, Homo sapien
gaacagacagactgcctcctcaagtcagtccctgacccccaagtagcctaactgggaggcaccccccagtaggagcagactgacacctcacatggccggctacccctctgagatgaaacatccagaggaatgatcaggcagcaacatttgctgtacaccaatattccctactctgcagcctctgctgctgatacccaggcaagcagcgtctggagtggacctccagcaaactcgaacagtcctgcagctgagggtcctgactgttagaaggaaaactaacaaacagaaaggacatccacaccaaaaccccatctgtacgtcaccatcatcaaaaaccaaaggtagataaaaccacaaagatggggaaaaaacagatcagaaaaactgaaaattctaaaaatcaaagcacctctcctcctccaaaggaatgcagctcctcaccagcaatggaacaaagctggatggagaatgactttgacgagttgggagaagaaggcttcagatgatcaaacttctctgagctaaaggaggaatttcgaagccatggcaaacaagttaaaaaccttgaaaaaagattagatgaatggctaactagaataaccaatgcagagaagtccttaaaggacctgatggagccgaaaaccacggcacaagaactatgtgatgaatgcacaagcttcagtagccgatttgatcaactggaagaaagggtatcagtgacggaagatcaaatgaatgaaatgaagcaagaagttaagtttagagaaaaaagaataaaaagaaatgaacaaagcctccaagaaatatgggactatgtgaaaagaccaaatctaggtctaattggtatactgaaagtgacgaggagaatggagccaagttggaaaacactctgcaggatgttatccaggagaaattccccaacctagcaaggcaggccaacattcaaattcaggaaatacagagaatgccacaaagatactcctcgagaagagaaactccaagacacataattgtcagaatcaccaaagttgaaatgaaggaaaaaatgttaagggcagccagagagaaaggttgggttaaccacaaagggaagcccatcagactaacagcttatctctctgaagaaactctaaggccagaagagagtgggggccaatattcaacattcttaaaggaaagaattctcaacccagaatttcatatccagccaaactaagcttcataagtgaaggagaagtaaaatactttacagacaagcaaatgctgagagattttgtcagcaccaggcctgccttacaagagctcctgaaggaagcactaaacatggaaaggaacaactggtacaagccacagcaaaaacgccaaattgtaaagaccatcgatgctaggaagaaactacatcaactaatgagcaaaataaccagctaacatcataatgacaggatcaaattcacacataacaatattaactttaaatgtaaataggctaaatgctccaattaaaagacacagactggcaaactggataaagagtcaagacccatcagtgtgctgtattcaggagacccatctcatgtgcaaagacacgtataggctcaaaataaaggaatggaggaagacctaccaagcaaatggaaaacaaaataaggcaggggttgcaatcctagtctctgataaaacagattttaaaccaacaaaaatcaaaagagacaaagaaggccattacataatggtaaagggatcaattcaacaagaacaactaactatcctaaatatatatgcacccaatacaggagcacccagattcataaagcaagtccttagacacctacaaagtgacttagactcccacattataataatgggagacattaataccccattatcaacattagacagatcaacaagacagaaagttaacaaggatatccaggaatggaactcacctctgtacaaagcagacctaatagacatctacagaactctccaccccaaatcaacagaatatacattcttctcagcaccacgccacatttttccaaaattgaccacatagttggaagtaaagcactcctcagcaaatgtaaaagaacagaaattgccaggcgcggtggctcacgcctgtaatcccagcactttgggaggccgaggcgggcggatcacgaggtcaggagatcgagaccatcccggctaaaacggtgaaaccccgtctctactaaaactacaaaaaatagccgggcgtagtggcgggcgcctgtagtcctagctacttgggaggctgaggcaggagaatggcgtga

SEQ ID NO: 33307 - DNA, 2300 bp, Homo sapien
agggtgacccactgctgtgtgccagctttctgtgtgtcttgggttcaaatttgtactgcactagaatagattgccgtagttcatgggtgtggtgggaagaaaaatgtcctctccaggaatgtccacattctaattcctgcacctgtacagatgtaatcagtggtcttgagatgggagattattttggattatttatgtgggcccagtgttatcatgagggttcctataaattaagagggagccaggcatgtgagagaaggtgatgtcaggacagaagcagagattggagtgatgtggggtcaagagcctaggaatgtgggcagcctctggaagcaggaagagacaagaaaacctgcccgagggcccccagaaggaacgcaggcctgccaattcatttcagactgacctccagaactgtatgataataaatggtgattttcttttctttttttttttttttgacatggagtttcactcttgttgcccaggctggaatgcaatggtgtgatctcggctcactgcaagctctgcctcccgggttcaagcgattctcctgcctcagcctccctagtagctggggactacaagcatgcaccaccacgcccggctaattttgtgtttttagtagagatggggtttctccatgttggtcaggctggtctcaaactctcaacctctggtgatctgcccgccgtggcctcccaaagtgctgggattacaggtgtgagccactgcgcctggccataaatggtgttattttaagccactaattttgtgacaatttcttacagcagttataggaaacctataactgcattcgaccctgttctaagtgctttacctccatacactcatttcatcctcacaatatccctgtgacccccactttgcagatgagaaaacaggctcagcaaggaccagggattcagggtcccatcattagtgaggtggcagagctgggatcctaactttggctggctctggaggagtcctgcttttacctcctgtactgtgctccttgttaatcaattttaaaatcaattttgtcaatattaatttcaaaatcttgagatcccatttaaatgcattttaaaggacaaatctcaaaaggatatttaaggtaccattcatttctttgtaatcagtgattggggtctgcgttattttatgtttatgatagtactaaaatgatgatcttattttttattcttttttttttttttgagacagagtctcgctctgtcaccccggctggagtgcagtggtgcgatctcggctcactgtcagctccacctcccgggttcatgccattctcctgcctcagcctcctgagtagctgggactacaggcgcccgccaccacgcccggctaattttttttttttttgtatttttagtagagatggggtttcaccatgttagccaggatggtctcgatgtcctgacctcgtgatcggcccgccttggcctcccaaagtgctgggattacaggcgtgaaccaccacgcccggccttattttttgttctttttggatccgctgtaaaagtctctttattaccatacttatttaagatatttggtaaaacctgatttttgtctcttctattactttaaaattgtattggtgaaactggattgtagatgccagaccagatttgatgtggaatcctttaattctacttgaaattgggtaataattagacatctttatgcttatttgtttatgaggctttgttagttcagaacataaaaatatgtagtgcatgattaaaacttgcactaatggatattaaattaataaattactcgataagtttgaatacattgttttgtaaggatgactcctagacacacaaaaaatcagtactttggaaagaaaagattttagtcttctcatagtattgaataatgttcttcaaaataccttaataggatttagaactaattgtgggatcctacagttgacatttagcttgtattcagctaaattatcctttaaaaagcatgagtttgtttgccaatgagaattgtagaaaaaaatgctctcttggatttcagatttggtgctacatgtgtctcttctgcttgctttcaatctaggtatacccctagaaacacttaaagaagaaagtcagtcaagacatgttctacctgcaagttttgaagtcaacagtttgcagaaaagcaactgggggttcttacttactgggcttgtgggtggcaccctggtggctgtgtacgctgtagccacgccgtttgtaacgccagcccttcgaaaagtctgtttgccgtttgtacct

SEQ ID NO: 33308 - DNA, 2300 bp, Homo sapien
gtaactagccacgtgtttaaagcgggcttatatcagaatgtcacaactcataaggactgttcattgtgcacttgtatgtgcatacctgtttaataactacagcatatgttatgtccctttagcatatattcttatgtccttaagaagcctttcttatactagtctaatgtcatttgtgtccttttgacatacatgagctattgatattaggaaaaatcctctctcactccccagtgttttgacagggaatcaactacacagaggatgccataggacattctatttttcacaacaatcgaaggagccaaatgaattgcagaagtcaccatttttaatgaggaaacactgaattggcaaagctaacgtgaaataagacctgactccaaaatctaaaatgtccttgaagaacacttcaaggtctagcgcgtaagtatgccaagcatgaagagttaacagatcaccaaccatcccatgacagtcagtcctccctgtttttagagacagaatctcgctctgtcgcccaggatggagtgcagtggcgcgattatagcgcactgtaaactgaactcctgggctccacccatcctcctgcctcagccccagagtagatgggaacacagtcgccaagtctgttcttgagtttcaggacagggtcaaatgttatagtgcatgtattcatttcagcacttattgagtgcctaataaagtctgggaataatacaactttattagttaagtccctgcccatggcagtaggggagaagcaaggatggaaaccctcaacaaataaatctaaacctatcaaatattaagtcatgatcttggagggcggggaggaaggcagcataagagatttagaggacagctgcggttgccaagatctttctgaggcagcataatacagggcttaagagtgagacctgccgggcaccgcggtggctcaggcccaacacttggggagacctagacgggtacatcacttgaggtcagccgttcgagaccagcctggccactacggcgttaacaccgtctctactaaaaatacaaaaattagcgagcgtggtggttctgtgcctgtagtcccagctgcctgggaggctgaggcacgagaatcactggaacccgggaggcggaggctgcagtgagccgagaccgcgccactgcactccagcccgggctacagtcttgtctcaaaaaaaaaaaaaaaaaaaaagagtgtgggacccattgcatcaggctgtgtaactgtttcttactagctgtataccagtggcaagttactgaaccatttgtgcaaaatgttaatttatttaccaacactgtgttcagcttgccaggcaccgttctccttgaatctcacagcagccctgtgagtaggcactactgttaccaccgtcactttgcagacagggaacccgagggacaaagaagttaagggatttcctcaaagccacagctaggaagagcggcagaactgcgattccaatccatcagtgtgcctccactatccctattccttaagatcgtgccaaaggctgagtcacttgcactaagtagcctagaacagtctctggggaaacgcgcccgccgacaaggatcgccagaaccggcgcgggcaccgcgcggcgaccaggagctctggtcaccgaaggccaggctggaggccagagcagccgcccgcacccggtcaccgcctcgacagtggagacctcagctgaccgcgagcccccggcccgcccgcaccccttctcatgcccccaggaacccgccaagccgctccagcctcacctcctcctccctccatcgcgagatttccaacagcgtttttaaaaaaaaaaaaaaaaaaaaaaaaaaaaaaaaaaaaaccggaaatgggtcctaccatcttctcggagccggagtgcgaagaaataaagaaatagtgctttaagtcaatgaattcctccttgggacccactatcgagaaactatcagtggtaacgttttaaaaaatgacaaattcaatctgctcttgacttgtgtgtcctaagatttccactaagtgtcttcaaacctccccctccccggcttcctggataatagaagttcccgaaggccgccgattccagaagatactgtctggcgtgaaattagtctcagtagaaacataagtcccgcgcgtcttgtgctgcgcgtgcgcaagcttttgggccctcccgagaaagggaagtgcattctcgcttccgtagcggtctccgccggttggggggaagtaattccggttgttgcaccatggcgtccatggggaccctcgccttcga

SEQ ID NO: 33309 - DNA, 2300 bp, Homo sapien
aacaatttctcaactgctctgggcccaagtccccagttttgtaaaataaccctgtctcagagtgtgcgacttctgggcacaaatgcatgcagtttgaacaaaatggctgatgcaaaacaacctagttttagttatgttgttacaccaggtgtgtgtattggatgttattttctctgcaggtccctgttaagtggaaaataaaatggaatacataatacaattagcttgaaactttttctttctagaaaggaaacaaatactgagtgcctaccgtggatcaaccactgtgcagcccctctaagtcactccatttaatatcactgtcaagtcttcagcttgacggaggcctatcacctccccctggaaaaggaggttccgcgaggttgtgtaactagcactaagtcaaacaaagagtccataggggaactgtattgtttctaactttgcgtaagtaaacctccaagacactaagtgaacagggacacctgagagacctagtggaatggtctattatgaattcactttataacaaaccctgaaggccctctcggagtgtcccttcctctgcattttctgtcaacgtctggtgctcagatgtttcttacctgcacccctgccctggtttctttaacccctctggtcttccttattcccttcggtctatctcaagctttgctgcctgaagtgcagctctactgaaattctgctcaaaaccccctcaatggctccccttcttccccaaagataacgtcgtattttccatgttgggcattcaatagcttccaccttcgggaactattgtaagttaaagaagtcagtgctccattaaaaccggatggctcttccattctacaacgtgccatgcgcattcttgcccaagcctttacttctaccgtttcctctccctagaatgctacctctcaccccgatctaaagctgtcctccagcaccacgcttatgtgcaccctctccgtagctgtccttctcactgcacaccaccttgtattacggttatgtgcgtccgtttttcactcttcgctatttttcctcaagggtgggcaaaaaagcactcagaaatgaaataccctgttaagtgaccacacctttacgagtgacaaagaaaacggaagggccgttgcgggtggaccagcgaaaggttaagcagcagcgccttaaccgacaggtgacagagcatctccccggcgccctcccactggagcgcagtcccacgcggccgtcaggctggaggagccgggcggggaggcggtcccgctttgctcccgcgggcgaccggactgagcggccccacccagctccgaagggcgctggcggcccagcctggctggcccccacattccgagcccaggattaggcgccggcgtctcccgagctcagtaagcgggctgagcggccggagaccgcagggagacggagattctcgacctttccggggagcacatggcagagccgctcctcaactcgcgcaggcgcagagccacggcctcggccacctccccttagcccaccgcgagcaggtccctgtgccattaccttgagggcctcaagtcccataagacgggacttgcggtcctgatccttgatgatgaggaaagggcgcccatattcatcgaaggcgagggtccccatggacgccatggtgcaacaaccggaattacttccccccaaccggcggagaccgctacggaagcgagaatgcacttccctttctcgggagggcccaaaagcttgcgcacgcgcagcacaagacgcgcgggacttatgtttctactgagactaatttcacgccagacagtatcttctggaatcggcggccttcgggaacttctattatccaggaagccggggagggggaggtttgaagacacttagtggaaatcttaggacacacaagtcaagagcagattgaatttgtcattttttaaaacgttaccactgatagtttctcgatagtgggtcccaaggaggaattcattgacttaaagcactatttctttatttcttcgcactccggctccgagaagatggtaggacccatttccggtttttttttttttttttttttttttttttttttttttaaaaacgctgttggaaatctcgcgatggagggaggaggaggtgaggctggagcggcttggcgggttcctgggggcatgagaaggggtgcgggcgggccgggggctcgcggtcagctgaggtctccactgtcgaggcggtgaccgggtgcgggcggctgctctggcctccagcctggccttcggtgaccagagctcctggtc

SEQ ID NO: 33310 - DNA, 2300 bp, Homo sapien
taaatgttataatacttaaacctgtctgttgccccttaaatgtagaagcttctagacaatagaaactaagtcataagtgatttttgtagtcatcagatgtgtgcttttaaccattgaaattatatgtaacagtgtttgctttttctgtttgtttcattagtctcatataatggcagcaaaggctgtagcaaatacaatgagaacatcacttggaccaaatggtaagagtccaccattccgtgttttttagcaaaagatttaaattataaaactgtcaatataaacctctctacagaaaggtggagtattgaggggaggcatcttacttccttaacacagccaaaattttttagtgtatttcaggtttcttaaacatggttataatcgtgtgcaatattaggtcggacctttttttttttttttttagcatgtaacatcatttcattagcattttccaaatcatagttgtcttttgagattaacattatacttaatgatgctccataatgttttgccaattatgttagccaatctaaaaatgccttcatgcagctactattttgtgtatgttgcattatttgtatataataaattgcacagataagagctgggtcaggaggtcttgttttatagtttgtgatattggttgccagttttttgcgcaaagcctactaaacgttgttttttagggcttgataagatgatggtggataaggatggagatgtgactgtaactaatgatggggccaccatcttaagcatgatggatgttgatcatcagattgccaagctgatggtggaactgtccaagtctcaggatgatgaaattggagatggaaccacaggagtggttggtaagaaaagacaaaacatcctttctcatttaagagacgtcatttaagaccacagggctaacatgcctgctgagattgttgtctctgaatcagagcatgaggagacagacaaatccaagttgaaaacatgctacaaaacaaatgtcggactttcaaaactgacagtgttacaaaagaacagaaagagggctggggattgttaggcatggagaaatgtgtaatgattgattggacactgattttgcttgtcttttaagctataaaggatgtttgggaaacgtggaagaatttgattttggatcatgtactgcaatgctgagtttcctgagtgatctgtgaccattatattgcagatgtgtaggagaatgcccttcttctcagctgtatacctaaatacttaggagtgacatgtcatggtttctgtaactaattctcaaatagttgaacagaaacagtatgtacatgtagagaaaatgtggcaaaatgttaataagtaaactggtattcgttttagtattgtaccttttttttctgaagatttgaaatctttaaaaagttggggagattgaagacaaaatatcagtaaggttaccttttctgcagatgaaatttgaattcattcaacaaatatttattggatactattgtatgccaagcactgttctcggtgcgcttggagagctgtagatttaaacaaaattcatctttgcgaccctaaaatgaggagaaaggaggatgggggtggggggaataaataataaacacgttttagtctcatcaccaggctgaatttcactgagtagaccctggcccaggaaacataatagctttttacctcttagaaaaatgttctttttacattatattctttagttacgttcttcacatcactgagggttgaatgttcatctgtaaggggacacatgtcctattcgaccttcgctagaactaaaacgaggctttcttttaaaaatagagggcttctgcctctaagatgacttgcagcttaattctagaagctgcttctttccatgatagcatctaacttgtgctgattatactaaaagtgaagttttgttgtttgcctgaactgattgtctgctggcttatttgcagtcctggctggtgccttgttagaagaagcggagcaattgctagaccgaggcattcacccaatcagaatagccgatggctatgagcaggctgctcgtgttgctattgaacacctggacaagatcagcgatagcgtccttgttgacataaaggacaccgaacccctgattcagacagcaaaaaccacgctgggctccaaagtgtacgtttcagtagatgatatgattacccatttgtagaggaggcagtttgtttgccatttcttaaaggcaacacaaaatgaccactggtggatttgtatcgatttgattatttgttttgattacttggttt

SEQ ID NO: 33311 - DNA, 2300 bp, Homo sapien
gaggctgaggtgggaggatcacctgagcccagggaagtagaggctgcagtgagctgtgatcattccactgctctccagtctgggtgacagagtgagaccctgtctcaaaaaaagtaaataaatttttttctttggcgctgaccctgaatttgttctgggtaataacactttggtaactttttaaattattctgatgtttaaaaaatccctaaccactattttagagaaattccaagcccataaaataattcaactgcagatgtttcagactgggttttgaaagatcctgtctgaaagaaaattagtgtatctctagaaggaaaacactgttttagtccgtttgggctgctataacaaaaacaccaggctgggcgaggtggctcatgcctgtaatcccagcactttgggaggccgaggccagtgaatcacctgaagtcaggtgtttgagaccatccttaccaacatggtgaaaccccatctccactaaaaatacaaaaagtagctgggcatggtggtacatgtctgtagtctcagctactcaggaggctgaggcaggagaattgcttgaacccgagaggcggaggttgcagagagccgagatgggaccactgcactccagcctgggcgacacagcgagactctgtctcaaaaacagcaacagcaacaacaacaacaaaaacatcatagatagacttgggtagcttaaacaacatttatttcttatagttctggaagttggaagtctgggatgggccagcaggattgggttcttggtgagtatcctcttcctggcatacagatgaggaagcaagctcccttgcctctttttgtaacggcacaaatcccattcttgggggctccaccctcatgacctaagcatctcccaaaggccccgcctccaaataccaccatgggcggggtggttaggatttcaacgtacaaattttggaggggacacaaacattcagtccataacaacacctttgcagtggggatggcaggaagtgcggccaccacggtgcaatggctttttaatgtgcccatttgtccaggctgagctatattcctagaattcccttttcctgtatgtttccagtttgagtgagccacaggggtgtgcttctgcagccaagttgaagctgttgtcataaccttgggcagatgaccagagaaaatacgaaggaggcaagtatgaaacgtgtattaatttcttttttaaaaaaaggcttaatttggggctggggccgggtgcggcggctcacgcctgtaatctcggcagtttgggaggccgaagcaggtggaacacttgaggtcaggagttcgagaccagcctggccaacacggtaaaactccgtctctattgaaaacacaaaaattagctgggcgtggtggcgcgtgcctataatcccagctactggggaagctgaggcaggagaatcacttgaatccgggaggtggaggttgcagtgaggttgaggttgagatcgtgccactgcactccagcctcggcaacagggttagactccatctcaaaaaaaaaaaaaaaaaaaaaaaaaattgtggctgggcatggtggctcacacctgtaatcccagcactttgggaggctgaaggggaggatcacttgaagccaggagttcgaggctccagtgatctatgattgtgtcactgcactccagcctgggtgacagaataagaccctatctctaaaataaaataaaataaaataaaataaaataaaataaaataaacaaaaaatagcttaatttgtatttacaacagaagttacttgtcttggaagccaggcacgcacgtaaatctcacagaaggctggctgtcttccttctcctggcctccctgcctcctccctcaaggctgcctgattctcttctcccttcctctctgcggttccctccctcccaccccctctccctgcacctttctttatcttggagcctctcccatctctccctccctcttcctccctaccccaccctccgaccaccccacttcttcccctcccctcacacttccctccctcccttctctcgtctcctccccactgcgcctccctccctcctggccttccttcccttccccgactttgcagatttctcttcccccaggcctccctcctccacctctccgccccctccgggcttggctctcccaggaggctacgactggagccactggtcccgcaggatccccgcgtcctcggtcgccgcgtccacgtccctctcgcgtccccgcccggcgccacgccgcctcctctgggttcggcctccgcgcggtgcagc

SEQ ID NO: 33312 - DNA, 2300 bp, Homo sapien
ctggtctaacagcatgaagccaatgtgcagagagagttgcagagctgagccataggggcagaggcattctcgttctagtagtcccagcagtccctccccttcttggagtctgtccatatcaacagtacattcctcccttctgcctaacagttgagttcctgtcaatggcaaccaagagaggtgtgactgattcatgtattcaaagggctgttgtgagaacttgtgcctgactcacagtggggactcaacaaatgttggtttattactcttatatttaacgcctaaagtctgaatgcgaaaaggttagggcaattccagaaggaattactatgcagaagggaaaactggttgacaggttaactttcctttgaacatcacaagggaaggcacctaaatacaaaaggaaggcttcctccacgccccccatacacacacattcccttcatcctaacctggctctgcagctccgagggtcacatacctgcccttggcactactagtacttcctccagcaagtctcagtctttctttcagaatccttcgcccttatgccatgtaacatctgatcggcccggtctttgcccctagtatcagcaggccaatacgtgctctgctacaggtcttacagggagggtgagctcttggagttggatcagaaggagaggggctggggaaagatcgtcttcaaattgtttctttggcggtagtatatataaacatatttaggcagggcatagtggcacatgtctgtaaccccagcactttgggaggccgaagcgtgaggatcgcttaaagacaggagttgaaaatcatactggtcaatatagtgagattgcagtgagccattatcgcgccactgcattcctgcctgggtgacagtgcgagaccccttctcaaaaaaaaaaaaaaaaaaagaaagaaaaaaatcataagcaaacaacaacaaaaaaacaaatataaagaatggcggtctgcttaattctccgtgccagcccttgaaatcagtgggtattattatgtagagtttgagttctttcctcccttgagtaacatgagtgacatcagtaacattagtcaagcgctgctctttttgaaagactgtatttcattatttttattctaaaccttactctgtttgatgaagattgggggaagagccctcccaattccaccgctcacacataacagcggttgctagcattctttatttgtgctaggtcatctgcatattgtttaaacatttttcgaggctggaaagactgctcccactcaggcaattctgacgtggcggcccttctaatttatattctctaaataattcttcatttagagaaaacagtcagggattacagtgagggagggtgacgtgctgacggggacagagcttggcttttgatcattctccccttagctctgcccaggcaagcgtccctaactcagggtatcggaaccgatctcccttagaggattatgtttcaaccaccagcctcagcggtttactcaaatgtccttccagccaaatgcagaagtctccctgggagtaattttggtgaagtcagcttttgcctttttcatcacaggcaggctttagtagttcctcaaaacgtgcaccacaactgcccggctgccaaacagaaatgctgatgcctgggcccactctagccatttggcctcggcatcacggtgcgggagcgtggggcgcagactcgcattgtcacaggaacctcccggccttccgaagagccccgcgccggggcctttgtctcgcacgtcggctggggcgggagctaggttctcgcagcctcctcccaccgctctgcgccttctttgtccctccagaagccgccatcaaagctcagctcctgattaggtttcggccccgctggccggcgcagtctcggcgactaccccaggcggcctggcgcacgcgaggattcgccgcgccccagatgcaggtgcctcccctccttagccgccgaccgacagtgcacgccgcggccgccggaagtgacagcgcctgtcgttggggagctcccgccccttccgcctcggcgccccgcccaggcctcgcccctaggtgttcccgcccctccccctcccgtgtcgctcgctttctgtcagcctctctccctctccctctcccctctccttcctctcgcttcctctctcgcacctgagcgtacgcacctgcccgggcccggctccctcctcctctcccctccctctttccccgcccggccgcgggagcctcgtggctgcgtcaccgccgcccccccagacaagatggacaccgcggagga

SEQ ID NO: 33313 - DNA, 2300 bp, Homo sapien
gtgctaggattacaggcgtgagccaccgcgcccagcaagctttttttaaaaaaataataaaaaatagagagagggtctcactatattgcccaggttgttcttgaactcctggcctcaagcaattctcctgtcacagcttcccaaagtgttgggattacaggcttgagccacattgcttggccaaacaaagttttaaattaccgtttttttcatgaggctaacttttaaggtcaatatttcataagcctttataaaatatttttgcagcctttaaggttttaactatgattcctgtgcctattaatatttaatatgttttatctcaaataagtagaggactgtgctggcaagttattaaatatttgaagcataatttttcattctgggatcccctatattgccttcccttacaaaggatttttgtgttttagttgtgtgtgtgtgtgtgtgtgtgtgtgtgtgtgtgtgtttaagcatcttgagcttctcgatataaatgctgtaacttagtgttttactttgtttttatttgatgagtataaatgattaaagttattacattttcacttttggagctgtatattcatcataaaaaagtcaattctgttattttgtagtcattaattttctgtagtacgtaaaagctgtacagcttgtcaagattcataggaaactaagactaactagttgagtatcttcatgaaattcagttgataggaaatatgtgggcttttactttgaggccaatagaagcttgttttgtacattttaattttcatttgatagttacattctctatttcttttatcttttgcaaaaaatctctattattcctggttttaatgacttgctcttgtataccagatatcctatcgaagtcaatgatctgtgggcatgtgccattaaaagttgctatttgtggccaggtgctgtggctcacccctgtaattccagcactttgaaaggctgaggcaggcggaccacctgaggtcaggagtttgaggctagcctggccaacatggtggaaaccctgtctctactgaaaatacaaaaatcagccaggtgtggtggcagacgcctgtaatcccagctacttgggagcctgaggcaggagaatcacttgaacctgggaggcggagtttgcagtgagctgagattatgccaccgcactccagcctgggcaacagagtgagactctgactcaaaaaaaaaaaaaaaaggtgctatttgtcagttgtttatttctcaatgtttataggtgtgaacagttttgtgatagtgttcttataaattttagatcattgcttttaaaccctgatatatcataatttcttgttttggccttactggagaaagaattgtttgtttttcctttatgttctttccgagctacctgtggtagaggtttttgataataggcagtggttttttattggaaccattttaaaagggaatcctttttaaatgtggcagaacttttctttttctgaatgtgttgagccacatttctcagagtagtgggaagatctgaatttatcatttgaaattttaagtattatgctaacatcgggaaagtggctaacaaatgtcagtgggatgtttgctcccacatgaaatgatctgctgcggactgttgtgctttttgagtgctatttaatgcttatatttgggggagtgttgatggcttgttgtcagcttcatcttttgctcctgtttgctttattacatcttttatagtttgggaaaccagatgattatattggttgaatgttaaaatgtgtgtaaatgggccttgtatgaggttcatggctattagcaagggatgtgaacatctattgaatttttttttcctgcccagaggcctttgttgatttccacgtttcacatgtgatttgcctcataaatgacttcttgggtaaatgtgatattataactatttggtttattttttttaaataggaaaaaaattaagcacaaggcaaatattggaagtttagttaatgtctattttatatttatgaattaagctattttcgaatcttcatgaaactgtaagtactttttttccgcttatagtttattctccagatatgccttcacggcttccaattcaagacatatttgctggactggttacaagtattggcactgcaatacgatattggtttcattatacacttgtggcctttgcatggttgggagttgttcctcttacagcatgtgagtattcatgcctctgattggagttatttaaacattgcataactacttaatattataaagcaatattgcatcatatt

SEQ ID NO: 33314 - DNA, 2300 bp, Homo sapien
ctgagataggagaatcacttgaacccaggaggcagaggttgcagggagctgagatcatgccactgcactccagcctgggtgacacagcaagattccgtctcaagaaaaaaaaaaaaagatccaagacagggtctaccagtcagctgttggtcactcacttcccctcctccctcccaccacagttttcctgtcaagctttgcactatctctagttctacttggcagcctgatatttttgtgtctctttgtgtcacgtactctgttagacactgagcatataactgtgaccaaaacattaggctgctgcattcctggagtttctggtttagtgaaaaagtaggaaatacacgtcatgatgagtgttgtgcgggttgctctgaggatgctgttggggagagacctattaatttacctttttttttgagacaaggttttgcctttgagccaaggtcacctgggagggagtacagtggcaggaacacagctcactgcagccttgaccttttgggctcaagtgatcctcccacctcagctccccaagtagctgggaccacagatgtgtgccatcatgcccagctaatttagtttttgtttttgttttcttggtagagatgggttctccctgttgtcctggctggtcttgaactcctgggctcaagtgatcctcctgcctcagcctcccaaagtgctgagattataggcatgagccattgtgcccagcctagacctattttgaataaggttttccaggtagctcagagtacctggtatttgagctgagacctctgaaggatgagaaaaagcgacttgtgtaatggtaacagggggcctttgcagggggaggtcagaggctctgagaatacagcctgctgctacccttgagtctggccgttatttctctctcttgatctaatacagtagctcctaactattctttctccttccgttcttgctccacatagttcatattactctgctgcctttaaatcttttagtagttttcccattactaaagaataaaatccagactccacattcctcttgtatgatctgatttctgtctttctactacccatatcattagtcagaatgtccttagttccctggcttccttacttttctcaaatctgccagattctttcctggcttagagctattgaattcctctctttcagataaccttatttattccttttctagcatttatctcaatctaggattaccttactttatatgtattatttatttatatgtatgtttttattcttatttgttccctgacaagcaaatactcagtatggaaatgtggcttagcttctcaacaacagcttacaaagtactaaattttactatttttagtgcattctattttttttattatttattatttttacttcaagtaatctttaaattgcaattatattttcagatgacatgaattggaatgctttagaatgggaccgagctgctgaagagcttacatgggaaagagtaagacctttttctgtcaagtatcctggtgttttaatcctaaaatatattttaaactttggtgtatttagatgtatacactaatgttatcgttacagttgatgaaaagttactagaattttcattcctagtgaaagttaagtgatatattgtttatggtcaaaatattgtgatgttggtggctttttttggtcttacaaaatcttgctccatttaggaaatgttttacctgaaattgtggacttttgaaaaacaaaataacaatttaaatttaagtagtattttcatgcttcagttgacaaaataatacagttttattatgaagtaatcttaattagctgtatatcttgagtaacaaatccaagacggaattgttttagactttataaatcatgtaattttgaataaaaggagacccaaaatataaaactctcattcagaaacagaattttttttattttctgaaaatgataggaagtattggaaagtataggaagtgggtgaggactgtgtttaaagatattgaaaggaaaatgaggcttttcataaattagaatagaaagttctgttgcatcttaaattaatgcttatcgtttttgtttattttagatgctaggacttgatggatcactagtttttctggtaagtaaaactaattttttttttttttttttgagacggaatctcactctgtcacccaggctggactgcagtggcgtgatcttggctcactgcaacctccgtctcctgggttcatgccattctcctgcctcagctttccaggtagctgggactacaggtgcccgcca

SEQ ID NO: 33315 - DNA, 2300 bp, Homo sapien
tcatcccaagaataaagtagttgtctcaacaacttgaccttcccctttacatgtccttttttgtggacttctctctttggagatttttcccagtgatctctcagcgttgtttttaagttaaatgtatttgacttgtgttctcagcattcagagagcagcggtgtaagattctgctgttctccctggatcttctgacattactgctgtctgagatttgtatatgtgtaaatacaagttccttgataccctaaaaccttggattaaacagaatgtgcattgtacatctttaaacaaaatgtatattaatttattaaatctagttgtcactttattttggacctgctgtgatctcgacaggaaacgtgccacagagcagtagtgcgcaggcaagacttttcagtgacgccttgtggaacgcagttcatgatgtcctagcagctctcactaagggaactgtacattctttctttcttggctattcagaccttaccaagaacgttaaaggaaacaagtagaaatcagcagtggagtgtctgtggtaagaaaacatgaactttatgcttcactgttagttgtttgtggaagttattttgtataacaccaaagctgttgtacatttcctactgcctgatttttttcatgtgtctgtgtttgtaatattgtatagtatcttgtgctaggtgaggaaattatttttaattttgataatttaatattcctagtgtgatcagcattgggagttgggtttcagtggggcatgtctatacttagagaaaaaaagtccaaatgaagattttcatgagtcagcccccccgcccgcccccaccccacacccacatcctctcttttccacacacaactatctgtttattttttgtagcagtggccgaaagtcctgcaaggtcataaatctttcagagtgacatcaccaactgtactgcatcttactggatttaggacttctgagatgcttgtgaagtatagatgtggttgtggtcttagattgacagcattagagaagactggttagaacatctggtctcgctggttagtgcctcgttggctgaggactaggtgtgcatttctcctagcttttcatcaggaaatcccaaagtttccaaagctttttgtttacagaataaaacttcaaataaaaccaattcattatttgtccagaaggaagcttggctgagctggccttttaacataggaatgtatttcgttggaaacattctgaaaaatctcagagaactgaacccttacaaactttgttttccctcataaccaaagcttcaggttagaagtttagaaaaatagaatggttgggtacatgatctaaatgtttaatgctaaaggtatatcgtaagggtagtgtttgtttttgaacgataatttagaagttctcatagaaagcgtataacataggtcttcagaaactataaaagaattttcatatagtattaaaatccatagactaaaatctgagaattttttaacatatgcaagtcagccaaacataagctaccaaaataaagagcaatgtgttctggctgttttatacttcaacaattttttccctaagtggtaagcaattactttaaaacatatttttaaaaacatcggtatcgggagctgcggtggctccggccggttgtcctggcacacaaggaggcgaggctatgcgttcgaggccaacctaggcaaaattggaaaaaaaaaaaaaaatcagtatcagaaataatgcttgacataggattcagtgttatactctttggcactttagagcagccttttctctcatttgaaataaggtctttgttagccctacctttactcagaaatttagtcctactataaaaaattaggattttaaaatataatgctgcctgtcatagtgtatttctaaattgctctctttgggagaaaaacattattattgaattgagcatataactatataactatataactatatatatatatatatatatatatatatatatatatatatatatatatatatatatatttttttttttttttttttttttttttttttgcccccgagacagagtcttactctgttgcccaggctggagtgcagtggcacgatcctggttcactgcaccctctgcctcccaggttcaagcgattctcctgcctcagcctcccaagtagctggtactacaggtgcgtgccaccacacctggcttattttagttattttagtagagatagggtttcaccatgttggccaggctggtctcggaactcctgactgcaggtgatccgtcctcctt

SEQ ID NO: 33316 - DNA, 2300 bp, Homo sapien
cctccttgggctcccaaagtgctgggattataggtgtgagcccccacgcctggccaacttgattatattaattttgggttttttgttttgttttgttttgttttttaatttttcaaagaatttgtggatcttggtataaagtcattggaacatatctgttttaacagcaagagatcctaggcagatacttcaaaaggttaaaaattcttaatcctacagaattttaaatgaatcttatcaatgttttgtaaacaaacaatatgaatggccaaaaaattgccctccattttactggcaggtaatttatattgtcttacttaagaattctcccctagtttttcaattgtactttatcgtgttgttttcaatgagataagtattttcatagggaaagcattttccagcataatatttgcttgggtagcatccgggttttagtatttaaccaagagccttttaaatattgaaaacccatagttcagaaaatgttagtattgctgcccttcttcacataaatttttttttaaattatactattattttgcttaattttatattgggttaaaacaaccttcaagaaggttaactaggaaagaagacctttttgttttatttttactatttatatatagaagacaaatcagcatttggtgatagttttacatgaccagttatcaaacggtcatagtatgaagtgtgcagttgttcattattagtaaattatgtttgatttttaaactatttagtactaatagttgagatgaaaactgaagaaaaatgccaatgtgacgtttgtgtatagctagccttaaaaaacttcccatgtttttaggtgacttttttccccctcttagtactctggagaaacaatgaagatgggccatctcaattccagatgtaaacaaaaagtaatttttatttcaacatttaatgtaactgctattattgtggattcttgtcttgtgtattttctttcccttattcaagtaatatagaataactttccttaaaatgatttgatccaagatacgtcatttctgtattggcaaaatgccactattaaagtgtaattcttgaatttaggttgaattgatgactttttaaaacaaaacaaacactggacagttctacattgtattgcgtttgcgaatgtgcgtgaacacacgcacacgtgcaggagaatgtagtgccataagaacactggcgctttttaaaactttccaagctagctacttattttcattttcagggttgagtactctaagctctctacttactgtgagaagttttctacattgtaaaattaaaagattatatttaaaatacttctttaggatgttattcagccatcaaaaaaaaacccaactaaaatgtcttaccagtaaagtattattaaaagcctcatttgtggagattcgctgacttccttggttaagctgtcttgtatttacttaatttgtcccctcaaccaggtgttttcttttcagcctgttactgtcctgtgccatttttaaaaatagccatcatgagtaagggcttctttaaaataatccctgacaatatctttggcattaatacgacataaagacaagacagtatatgtatgttttcattcctgttttgtacgagtgcctcattttgtagtcatgaaagtaacatagtaccttaaataaaaatgtaatgactaatctaaggtctaggaataactattgtagaagctaagtagaacacttagtttggggtgtcaattttctatcaacgcaaacaccttagggtacccagaccaattttatgtatatatattctgaaatgctccctttttaatgtggtcatttgttgccttctaagttgagaggacaaaactgaataaagtgaatgttaattgtagtctagtttttttgtttgtttttgtgttattgcaagattgctttaagattgcagaaatatgcattattagccagcatagataatccagatgttataataggaaggaaaaacaactccagttaaatgtgactgtggcgactcccttttatgtatacatttaaatgcatagttgcagaggacacatccctccccttctgtctccctaacttgaactgtagaccgtcctcactgggaagagtaaggccccacattttgtgcaatagcaagctactgcccacttctgcatgtctgctacgagatcagaaagtcagtttcactaaggttgtcttttagctgaatacttagagtaaaaccaatcaaatccattgtacatacctgaccatatgtcccagataaaaaggaaagacttgcgt

SEQ ID NO: 33317 - DNA, 2300 bp, Homo sapien
ccccttttctcccttctctgaccccatcacctctgtgttcaccctgctcctgccgtcctccctgcctccaaaacaggtcaggccttcgtgcctttgcacttactatttgcaatacccaaatgttcttcaggctctttagcctcttcatttctttcctgaagtgtcattctcactgaggcttatctaaagctgcagctactggggcattcctgtctcatctccctgctgtattttgtactcccggctctcttttgtacttttaaacatactatatggtttacctttgttgtttatatttgcatgttgtttcccacttgaatgtaagctccaaagattttatttttttaaactgaattattactgtattcccagaacaattccctggcaaatatttggtactcaatagtaatgctaagttagtaaataaatgatgaatttagaatcaaaataatgtgtctatggccaaaataaaacctgaaatccctgtcctatttcccagaggtaactgctgttaatagtttagttgtgtgcttccagacataccttcacagaatcatttatcacaataaaggtgtcatactatgcagattgtttgacaagatgctttttttcactttacacgggcatcttttcataccattgtgtggccaggccatgatttgttttccaaaagacatttacccaatttatatggtgaagatttttgtccatattactttttatagtatttctgtagggtaagttcccagaagtaatattgcacgatcatcgaaaaattttagtgttacattactgccccataaaggtactaattaacatccctctcaacaacatagaagattcctttttttttttttctttttttgggtggaggggggcggggacagagtcttactctgtcgcccaggctggagtgcagtggtgccatttctgctcacggcaacctccacctcccgggctcaagctattctcctgcctcagcctcccaagtagctgggaatacaggcacgcgccactacgcccagccaatttttgtagagaagggggtttcaccatgttagccaggctagtctcgaactcctgaccttgtgatcagtgctggggttacaggcgtgacccaccgcgcccggacggatttcttgttttcatactgtcatcaactttaaatacaagtattttcagtttttgccaatgctgttaatttagaaatgtgtatgtatatattgtctggtgggtgtttggatggaaacgatcaaaatcgggcaacttccccagtttccttgaagggagtgcttgccatcggcccctctgggaagtagctctccgtagttctccatcttcctgttttgaggaacgcaggaggaggtggatctggagtctcatccattcggtggctgttaacggcaactgcagcagccagccaggtcaccccctaaagcaaagttaaccccttgcatggtgccttggtcagcacccaccaaattcgaggtttctcctatccttcgactcgaggctcttttgacagatgtgatttatttcctcctagagccagtcacattggctcaagcaacctatcgtaagaaaacaaatacaatagtgttttagctggaaactgcccactgtctaagcggctttttaaattaagaactcaggttcactacgggatggcttaggccagggaacagcatgtgcgaagttcgaagcccgagaagtttggaggagcggccccaggcgcaggcgggtcccgcagcggggcccgtgccgcccaggcgatcagccccttcacttaacccgcttccctcctagcaggcccgagtcccctagcctcagcctcacgcagccagagcaaggggaagagggagtccttcgtgagttcgccgctcacattcggcggtgggaaaccgatccgaagatgcttttgtaggcgaaacgctcagctcgcgcggctctgaaccaccggggagcagcggctgctgctagtcggactacgccagcacctccttgtccagcccgggagcagccccgcctcgctcagggccgcgtgcgcgtgcgcggctccaggggcggggcctgctcgcgtcccgggtgcctggataccgagcgcgtccgtagtggcggctggcgctagggaactgcagggtctagggtgttgtcggagtggcagttggtccgaatttctcccgaagcccgcggaggagcgggtaagagccccgcgaatccggccccaacctcgggaacgggatgggaggcggccctggccgcaagccccgcgctgctagcgggtccaccgcgtcgtagcc

SEQ ID NO: 33318 - DNA, 2300 bp, Homo sapien
ggggagcagaaaacctttgtgatcttaacactaagatctgaaatcatgacagaaaagattgaccagctgactacatcaaaaatatacatttctgtatcactcacaaaaaagaataaagttaaaagaaatagtagaagcgtatttgccacatatgacaaagagcttatgtgcacaattcataagggctcctataaattataaaaatgtaaataactcaacatatgtatgaacaaatgactagacaaagtacacaagaaattcaaatggcaataaaacacgtagagagttgttctgcttcactgataatgaaataaatgaaaattaggataaaatatataatttctcccaaatcatactgtcaaacatgaatcaaattgaaagcctctgacactgacagcagcagctcccacatgtcccagccaaagagacttagggatgtcagctgtgatgtcaagggtgactcagcagatctgagttgaccaaaccctgcatacagccttgatcagctccgaagagatgacccctgagtccttggagtgtccctcctgataagggtggctttgtgtatctgaggccttgggccacatccttagtttatgccaacagtgtgatttatgatgaaagcctgttcacacgtgcccgaggctctgggccatgctctattaatttcacctctgttgggctgaggtccaagtagccgaggtcagtcacatgggcactgcatgcctatgtgactgaccccaatgaaaaccctgaacaccagtgcataggtaagctttcatggtggctaacacctcaagtgtgccgtgaaacatcgttgctggggaaaataaacgctatccgttcagccccgcagggcaaggacaccagaagcttgtgcgagtttctcctggactccgctctatgttcctttttcctttgctaatttaaatctgtattttcaaagtgtaagcacaaatctaatagcctttcttagtgctgtgagtcctactagcgagttgccaaacccaaaggtagtctaaggacccccttcacaagggtctctttgcacaaagctggaagctgagtttgcaaagcactgtatatagcacctagagaacctgcattactcaagtgaaagaatggagggggccaggctgagagggggtctcggtggcgcccaggggttgcagctctcctgggtactcatgttggtctgtctgcacctgggtggaatatgggatggatagcccatgccctgggcctggcagcaagcctgcagccctcaggcctggcacctgcagctgtgagctctagtcccagtccagtgtgagccagaggcagagccaaagggacgtgttcttggtcactgggggctggaactgatgacagatgtgctcttcccacacatcctaacgaaaacagctgcgacaatacttcacgcatggtgctggacacgtaaggcaacacacacagcttggaagtgctgtgtgactgtgaaagtgattttcctcctgctgtgtactgaatggtgtccccccaaattcatacgctggagccctaacccccaatgtgactgtatttggagacagtacctttaaggagggaatgggggttaaatgaggctattagggtaggccataatccactaggactggggtccttatatgaagaggaagagaccgcaggcacgctgttgcacagaggaaaggccgagggtggatgcagcaggaaggcggccacctgcagccagggagagaggccttcggagaaaccagcctgcacaccttggacatccagtctccaggacagtgagaaaatcacctgtgtgctataagcctcccagtatgtggcactttcttaggtcagccttagcaaacgaatagaactcagagatggacacagacggctcccaggtgttcacctggcactgtagccctcatctttgctcctgctgtcgtttccgaggagcctgtggagccggccgtgcagtcgtgcaggcagtagtgctttgcaggctacaacatctctcctgtgggccttctgggtgcacacggaggtggagcctcctggagcacagtcatgagcagagctctcctggctccacctctgcctcccatcaggggtgaataaggcggaagctgaggggacagtcacagccaggacaggaatgtcacccccagctggcagacagcactctgagcagccaggcctgggatcctctgacctgcccacttcaggaggccagtgtggtcactgccaccccacggtctggggaccctggactccaaacttgtaagtgctagagtgggcagctggag

SEQ ID NO: 33319 - DNA, 2300 bp, Homo sapien
gacagagtcttgctctatcacccaggctagagtgcagtggcgccatctttgctcactgaaaactccacctcttgggttcaagcgattctcctgcctcagcttcctgagtagttgggattataggcacatgccaccatgcctggctaatttttgtatttttagtagagatggggtttcaccatgttggccaggcatgtctcgaactcctgacctcaagtgacccacccacctcagcctcccatagtgctgggattacaggtgtgagccaccgcgcccggccgccttttttcttcagcatttcccttgagtaccagttactgcaaagacctcaggagtcgggagtttgagaccccaggctgctctcaaactcccgacctcaagtgatctgccctccttggcctcccaaagtgctgggattacaggtgtgagtcaccacactcagctgtaattagttaagttaggtcagggtcatagttgtgcaggatggacccttaatccaatatgactatccaagatacccagagatagtcacacagggaagaacgccacaaggaaacagaagcagagattcgagcgatttcgagaaacagaagattcgagagatgcagctgcaagccaaggaatgctaatgcttgctggcaaccactagaagctaggaagaagccaagagaaatcttttctggaggcttcagagagcacagccctgccagcgtcttgattttggacttccggcctccagaactgtgaaagaataaatttctgtcatgttaagccacccagtttggggtactttttaaaggacagttttaggaaactaacacagcctaaggaaacgaacgttgctgttccaaaagctgatagattattgagaaccaagctctcttccccgttgcatccccttcccaaaagccccctcagtgggttccagaagcacccccaaccctgccagtcacccagacacagccctcaccggggtgggcgtgagcagagaatgaccacgccctctccctacgctcagtgatgcctgccccacacactttgtattttcccttattttgaaagttatccataaaagaatgtgtatgttttataatcagaaggaaaaagtttaaatgagcaaacagattctcttttggcaaaacatacacaggtttcctatttctgctcctcgtatagccgtagccatagagtggacaaacattattattttctaaccaatttattttgtcttgaattatttatgtattataaaatgagctgttcaggaagtaaaatatagactctttctttctttctttctttctttctttctttctctttctctctttctctctgtctgtctctctctttttctcctttctgtcttgcttcctttcttttcctttggcatctggggttgtgtcctgactcctcttaactcgggcggggctgagctgtgcaatctgctcagcgcacctctccacagctacgctaacccaggtgacctgcttacaccggcttttcctctttaatccctgagttgaggatggaaaacactggctgttctgatttcattaggcgggcagatggtatttgctaatcacgtagacagtctcttgaagacgcctgttaaaatgaatgctgctcaacatgtttggttctgatttactacatcccatagatggaaacataaagacagagaggaccgtgagaaaaactgcaatgctgatgaagtatcactcggcccttttcgtttcattcactggctaatcatgagatgtagggagtgtccagccttttccatgtgtcgggtatgcagacaggatggaatgtggtctatgtattagtgaggctcccatcatggaggaagggtgcagggcatacctgggcctccagatacacctgggacaaagccaggctccctctccagtgctcatctccgcctctgtctgaattcaactcctcctactctagcctggctcttccacaagcaaggaccctccaggggaagaatgtgctgcttcctctcaagcccagaaatcccagggaagggctctaattggccccaatagggtcaggtgcccagctctgaccaatcagtggtggccacgtggggagagtctgttagatcatggcagctctctttagagccatgtggttatggtgggaagaaggaacatctcccagaagaaggttgactattaccctcagcagacaaaagagtcaatgtccgccacatccctgctccagcgatctggggtgagggtcaattaaggaatgtgaggagtgctatgaccaccagatgcacaagggcctctgtt

SEQ ID NO: 33320 - DNA, 2300 bp, Homo sapien
cccattctgagctcccacagagggctccacctccccaagaatgtctcattgtcattggaacagccagggtcaggcagcttctgctcggactgacgtggcgtctgacccttggtgggttgccagacattcctgcctgtttccaccatgggaagctgtcactgggaatggtatggagccctcacttctaccccaagcctgggtgtctgctgcctccatgtcaaaaatggacatttctggtcctgcccagctgctacctcaccacaacccatgctcagagttgtcagggatgcgtggaacagcaatgatgggacagcaaatgactggcaatttccccaggtcccacgctgttctggagtggacgtgttgcggccctgcccccgatgtgttccagcctcatccaggtgcacaggatactctggggccagcacagggattgtccagtgatgctcctggtgtccacaaaacagctctagagatacctgcattttgaaaagcctgctgagccaacaagcttggggcaggacacggatttctttggcaaatctgcaggcgagctgaccacttgcctggtgagtggaagctgccattacctggccagtgtttgcaactcgagggaaaatgacagctgcatggggggaagcctgacctcccggggagctttattgtggcctcagtggaaagattggattttgaaacctgccagacccaactgaaagaagggtcattcctgattgagttggagactctccccagtccctctctctggactcattctagctgtggcctgcctgtggacagcccttccctttggcccatgcggcgggtccaggcagctcctgcagctgtgctcatggctgctggcccagaacttctcatttttgccatgtggaagcagatttgctagtagaggaattttccaagtcaagggaagtgttgccaaacctcttgcctcgacctgtggggggccttctgctcttgttttctcattctctttggagtgggcacagaggggacaagtcggcccccagtgaggctcagggagtgcaggagaccagggagggaagcccagatgatggggaaacagagccaccttgagggggtgtcatggggtcagtgtcagggtgatctgacgggtcagttcatacttaagcaacattattctgttcgtttcttttgggtaaggaattcctcatgggaggtgtggtcatctggtcgtagaggtggacagaaacaccccctcgtcttcctgagccatttggaagccctttcctctagccctaggtactggtgacacaggcccctcggtctcaggatgtggacagggctgggaggtgcaggcttcttgtcccatccccactcagtatcatcgggtatctggtagtcaggggtctcacagtggcctctccaaaagcctggtgtccttggagaacatttttcattttgtctgttttcgttgctttgaacagctgcattcactcaccgagggctcgccctccctggatctgccatgtggttcagggaggaggggaccgatgagcaccgaccccttctcttcacctgtcagtggccaccacagtgccccctctggctttgccaccacgttctcctgcccccgtcaccttgtctcttctaactcattagcctttccttcctttgtctgttttcttctcccagctggtttaagttcttgatcatccctggcaccacctaccctaaggtcttccaagaacagaaaagccagggcctgtgtggggcaatgtgttgtccctgtcgggttatggtgggacctcctagaccccagagtgaatgaatggcaggcctgccagtgactgtgctgatggcttagaattcctacacggctgtgcctctcccaccccgtcctctttgctcggaagggagacctggtttgctctcctccatgacagcccagcccctgctgtgcacaggggtggggctcgggatccctccctgcaccctgatgtttattaactgtagatagtgaatttcaagttgacaggtaccttctcagggatttatatataaatatagttagaggaaaagttgaagtctattttactactttttagtgtttgagtaaattatgctttaactggacagaagaaatatttctcagacaatgtcgatgctgctgatgacaactgagatgcctggagctcacccttgatggagacttccttggtgattggagatgggggactctggtggcagaaatggctttggggtaggtgtgaagttgcttcagtccctctgagttgcctcttctggatggaacgtgtgta

SEQ ID NO: 33321 - DNA, 2300 bp, Homo sapien
atgccaacagcacccctcagatgccaacagcacccctcaaatgcgctttcctagatgttacagaggaccatgtgtgaaccttttctggcaggaagctctggtgttcttgtttagtctggcattgccagagagtaggcagctctgaagggtagatagtttttaaaaaaaaaaaaaaaaggcggcccactacactaaaggataatcatcaaggatagccaagagcacagttcataaatcaaaatcactgccttaaaaatgttgagaatgctttcattaagtgcttaaattggataacagacttgtgcctcaatgctcaatcagaaataataaaattctcttacagtgactatcttaatgttcttttgtgtcttctctttgttgctgtctggcccatatctcctgtacattccccgcaatccccttgttttccttcgtgcactaaccttcgcctctctgcctgtcttcttgcttccagggctgggtcttcttgatctctttattcccggggtggcacaaaatactcaataagcactccagagtttccccagggcctcttctcacccctcactgcccccatagcaaaccgggcccacaccttcctcaactctgagctctctgtactgtgcgcagggatgcaggtggtcctcttggccggttcaggcagcagactggtggaaacactaatgaagtttgttgagtgtcacaatgtgctgacacacttctaagcgcttggcacgtttaactcatgaaatcaccagtcatcttaacattgagataccgaggacagtgccgtttaaaaacctgacccagagccgggtgtcgtggctcacgcctataatcccagcactttgggagacccaggtggggagagcacctgagctcaggagttcaagactagcctggccaacatggtgaaaccccgtctctaccaaaaatacaaaattagtcgggtgtgctggtgggtgcctgtaatctcagctactctgtaggctgaggcaggaaaatcgcttgaacctgggaggcagaggttgtggtgagccaggatcacaccactggactccagcctgggcaagaagagcgaatatttcgtctaaaaaaaaaaaacctgacccaattgtttggagtgtctgttgccaactcccctgagctagtgacctagtgggagcggccggaaaggctgttgccttttggaacttcagcagcccgacagacgactccatcactggccaggtgcctcctcccaaggtgggagacgaatgaggcagtttgtaaaggcttctgaagagtgttagagaaaggtgctgtgcaaatacaggtattgttatttacaagtgatggatggcactgcatcatgtcctggcaaatgtgctgtcgtctgcagtcctctgtagaagtaatccagccttaatgatttgagaccttaccactgctcttgactacaaaatatttgcagagaaatggggtgagtgcttgtttgatgagttattgcaaatgcagattagcagagttagaattagcgagattctttctgtttcatctaacagcagtcatagcattccacagcagaaaagaggacctaattataagcctcgctattactcatttctgccagtctttgtgagtctgtggcagtgagatgtgtaaaatctctttgttaaatacattttgctggccctgttcccctccatttcccagtggagccaaaaccatgtgtcagtagagttctcataaatctgctacatgatagctttgaatgttactaatcttacatgtggttttctttgaaaagcagactctacatcccctctcaaagtgaattaaatggaaatataagcacgattatatttatttcaagccatgttactttttttagtaacttcagagtaacttagttctctcttacactaattgatacgtcagacatgagttaaggatgcctttcaaaagtctagtgtaattctccctgaattatctccctgcagaaagactttcagattatccattgctagaaacagaagactaatttgtcttctattaaccctgtggtcacagatttgctaagcatagtcccagtgtcaaccagtcaggaccagaaattgaatggtccaggtaagaggtctgcccttgttcccaacatgccaaggaaaacaagaccctttagttactatcttttttcagaagccttctgtcaaggtggcccatggcatttcacctcttccctagcctttttttgttgttcttgtctagacagggtctctctcaggcttgagtgcagtggcgtgatcttggctcactgcaac

SEQ ID NO: 33322 - DNA, 2300 bp, Homo sapien
tggtgatgattaattagaggctgccagcgtttcataccgactcaagaaccaaggagcggaaataatttttatcattaatcactcaatatgactttcaccgccagtttcttccacatccagattttttttttcccccaaagttgctttttctgattttgagcaaatcctaaacttctgagccaaggaagttaaagccaggaaagagcggtctttcttagaacatagggatctaagcagccttcatgcttctgccacctcctcctctctctgggcacagttcctgtttgcactttggattctgtccagacgggtctgtttccgtttctactctcctttccagtggcagtcggcccatatggagggacactggtgagaagatcaaaggccttgggtctcagaagccaagtcacttcaatgtatggatgcgtgaggttcttttaggtcttaatagcacgccttagtgtcataaactcagtcttgtaggaacagaagtctttgagaaacatggcttcttttggtggcacatttgcgccattttcttgacaataaagattcctggccaggcgcggtggctcatgcctgtaaccccagcagtttgggaggccaaggagggtggatcacttgaggtcaggagttcaagactagcctggataacatggtgaaaccccatctctactaaaagtagaaaaattagctgggcatggtggcgggcgcctgtaatcccagctattcaggaggccgaggcaggagaatggcttgaacccgggaggcagaagttgtagtgagccaagattgagccaaagcactccagccttggcgacaaagcgagcgagactccatctcaaaaaaaaaaaaaaaaaaaaaaaagattcccattatccttctctgctgtcctccgctatagggcgggaattctctgcaccagcacaatgaataggagccgttctttaaatatgttgcagtccagagtaggcaatatttttcagtggtgacggaggctctctacaacaaaactaactggcactgggaaagaaaaatgtctaactgatgccagagaacttaagaggcatggggttttagaaaatcattccactgtgatggaaaatggttttgggggaatttgtgttgcattggttttaagaaaaaaagtacttcaaagggagttttttttttgatgggatttcttttaaggataactgacttccattccaccacagcgggtccctgtccactgtggggaggagcgccttgatttccaccccgggcagggctgcctccaggaactgcagcagccacctgctctggccctccactccccaggacatgggttacattaaagcgtatctgttggaatgatacagaaccaaagtacagtaattaaattgcatacagagacacacccataaagaagttttttgttttgttttttgaaacagagtctcactctgtcacctgggagtgcagtggcacgatcttggctcactgcaacctccgccttctaggttcaagagattctcctgcctcagcctcccgagtagctgggtttacaggtgcctgccaccacacctggctgatttttgtatttttagtagagaccggattttgccatgttggccaggctggtcttgaactcctgacttcaggtgatccacccacctcagccttccaaagtgcccatatggagatttttaaggtcagaggtataaactgtacatactcactccctgggagaaattccttgctggactctggttttctttgaattgcagagtaaacagctaggctttgtgaattacagagtaagtagtttatttacccctgaggagggaagaggcagcttatttgtgctagtgtagcagtgagcttgggttctaagtttgaagacatcacttcacgcttcactggggctcagtttttctcctttatgaaattcgaggtttgggcctcggggcaagtcacagggtggggctgtgtttgctgcagtgagtctcacgtcccgcttcagcatcagggtaccagcactgttcatcccccaggtaaactcctctagtaacttcagggcaacccctttagacttacggggtgagctcttgcgggtggctgtcaccatctgtcatctgtctccaagaccatagttagaggaggggcccaatagcagcacccctcaaatgccagcagcatccctcaaatgccaacagcacccctcaaatgccaacagcacccctcaaatgccaacagcacccctcagatgccaacagcacccctcaaatgcgctttcctagatgttacagaggaccatg

SEQ ID NO: 33323 - DNA, 2300 bp, Homo sapien
atcatgactgcagcctggccaacaattatcctattaccggtgttgaaatgtgtgtatggagtggggaatgcaagaccaatgtatgctatgtgcatctccatgtgtgccctgatgcacagagttgcgcagcactgagttagacaacaaatagagaagccaaggtggcggtggtgagtttggagttcagtggaggggcagaaagagagaaattaagttgcagatgtggcacccataagcgtctgcaggtggtggtggtggtgagtctggagttcaggggaggagcagaaatagagaaatgaggttgcagatttggcacctgtaagcatctgcatgatagtcgtccacaggctgcatgtgactatctatgggaagtctagatagagaagaaggccaatgctgagccttgcgatactcaaatgtttataaatctagaagagggcgaactgccaagctgacagagtgagcagccagggtggccagagaactggagggtaaggcagtgatgtggcacctccggagcaaaggaggagggggacggccagctgcatcaagtgctgctaagagctcaaatagaatgaaagtagaaaatgaccattggatctggcagcacataggttataagtgacttccacaaaaggacctcccatggttgagggcagtgcagcagaacttgatgaaaaccagacaaactggactggagggagtgacaagagatgaggagctcagcctccctgaacagttttgttgtcaaagggaaaagtacagccaagcgaggggtggtgtttccttcgctaaagagattaggcctgtctgaatgcgaatccagcaaggcattgcggaagttaacagcagttgcaaaacactggggcaggcgggaagaacacgatccaaggcacgagagccaggggtcagccacggcaacaggaagatgatggtgaaaaccaaaagtttctgagagtggtctcaatttaggaagtttattttgccaaggttaaggacgtgcattgacacaacctcaggaggttctgatgacatgtgcccagggtggccaggaaacatcttggttttatacatttgagggagacatgagacatcaatcaatacgtaagatgtaggttggctctttaggaggtaaaatgtgaagtggaggcgtccgggtcataggtacatttaaaggttttctgattggcaactggttgagagttatcatctaaagacctggactcagtagaagggaatgtccgggttgcatgaaggagttgtggagaccaaggtgttatcatgcagatgaagccgggaatacactgcaaatgtttcttatcagagtcctctattagtcttagggtctccgtgcggatgtttgtgaggccatgtttgacttccgcttcccatcaaggcctgaactagtttttcaagataacttagaaggccacaggcggaggggagggtccatccgttggctgcagggcttagaattttatttttggttcataacgaggagggcagggacagaagccaccgtctctgctccccagcgctggccctcactcggaaagcaggctctcccctcgcatcgtcttttaacaaattcctgctctctcggcccccgtcgctgccatctgggctctcctttccgcgcttcattaggcgctgccgcggcaggggctgagggcctcaggggacggtcgcctccctgccgggacgccccggccctggcccgcactgtggggcgcagtcacccagccgtcgccgcgtagccaggagcccggctgagcgcgttcgctgcaggagccatcctcagctgggccctacttaactttccgcaactccagtccccgcagccagtcggggaccccgcctccctctccttccttctccctctcacttcttcaccccttctctcccctccctcctccgcccccgcccccgcccccgcccccgcccccggccacagcatccgacgtggcgcggccggctgcgcacgcaccgtatgcttggctcgcggcccagcagggcgggcgggccgcggtgacgtcagtgcgcatgccgtcggtgggctcggctgcgccacgtcggcgcgcggcggccgcgcccccttaacggcagtggcactcacccggctcgcgcggccccggcgccccacgcgcgcgcgtcgttctcccgcccgctcgctccccggcgctcacacctgagctcactcgcgcacgcccgcccggcccgagaaccgcgccgccgcctcggccccgcggaagccccgccgcgtcatgtcttcgcctcccgaagggaaactagagactaaa

SEQ ID NO: 33324 - DNA, 2300 bp, Homo sapien
tgaccccacaagccaccaaagggcactatttatccaaagaacaggctggaagagaaatgagtcagttctgcaaccacctctattcctcatgaaacaactcaaaagcatacatcctatcaatgccaggtcgatgctgtcatctgggaagagaagacatgaaaaatgggacagagaaggaacagacaaaggttaaaagtgtcctcaaagattttaacctcttctctttatctttcctttatcacagttggtagaggttgtcaagtaaaccttgaaacatgttggtgcttcctttacagcaagtgaataaaatatgaaatagaatacctcttgaaatggcttcgtttttattggaaagataaagcattctatttaatgtgcactgagcattttataaatttacatacagtcagacagattatatatacacacacagatatatatacacattatatatatacacacagatatacatacacactatatatatacacacacacacatactcagaaagacatacagtataataatatacttgtgaagaaacctactcaagtgattgctgataatgaacaaactattgaatccttcttggctatgtgatcacagtagaaaacaatcatagaattaaaaatgtaaagcctgtttttctctcaaatttaatttcttttgttttataattctaaaccacgtctgcaaggctcagatagcacagtccttcttataaaagtagccctctagaattatattctttatgcaaattaattcgaaatctactaaatacctgtaaattaaaattaggagtgtggagacactggatggctaagatgaattcaggtaaacctatgcttttggaaagtgattaataaaggattcattttaatctgttttattaaccagtcaggaattgctctattaggtgatggcttacacggcatatgccaagtgcaccttttgaacaagaaccctagggaacaggtttaggggctctttgcacacatgcgtgcacctgtgcacatgtgcttgcacacaccctcaaactcagacaggaaggatggacattccaaagactcatgagtgcagaagggatccacgtccctcacactaggtcaaaagaaaggctgctgccagctctgccctgtccccaagcccaaaacctctggaatcccaagcatcccttccctccccacttctgttctcccagacctcaccttcactctgctgatctgcaaatctcctcccacctcccaatcaccactcttcccacctgaggcatttaaatacatttaaatacgcagatacgcacacgtgattgtgctactttcctgctccacaccctactatggctcccaccatccttgagagtctaagacactcccatgaccttggaggccctgctgggctcgcccactcctgcctcacaggcttctgcctggccctggcctgcctctgctcctgtcctcctgtcccctggcctgcctggcccagtggcctcccactcaaatgcggggcctcaggctctttacaacttcctcggggaatcccgtcccaactcctacccacgcaatgcccagtggaggatgacaccgtcatgctgtgggccatgaggtgaccatctctcgcttcactctggtaggctctgaggccagggccccaactctgttggtcatctttgtcagctggctcctacagttctccctgacaccagatggactccacataaacgtgttttgaaagaatgaaggtgctaacgaatgaagaaagggcttggacatggacagtgtttccacagttctaccagtgactctcagaagagcaagagtcattcctagattagccacacaacacacacacacacacccccaacacacacacccaacacacacacacattcacacacacaccaacacacacactcacacacccaacacacacacacacacccccaacacacacacccaacacacacacaccaacacacacactcacacacccaacacacacacacccaacacacacacactcaaacacacacccaacacacatacacccaacacacacacacccaacacacatacacccaacacacacacattcacacacacccaacacacacatacactcacacacccaacacacacacccacaacacacactgacacacactcacacacacccaacatacacacaccccccaacacacacactcacatacactcaaacacacacccaacacacacacccaacacacacacacccaacacacacacccaacacacacacccaacacacacactcaaaac

SEQ ID NO: 33325 - DNA, 2300 bp, Homo sapien
tgttcgttacccatcctccacatataagaccctcatagccttgagactaacttgaggaaccattccacaaatattcctggagtctctgctaggaatcaggccctgttctagttgctggggacacaacattgaacaaactcatggagcttacattttactttcactcttaacattaaaataattgctttatggattgcatgtgtgtgtgagaatatttaaaatatatataccgtacataaatacatatgcatacacatacacacactctgcatagagaaagtctctcaccaaactgtttacctcctatgccaggctgctcctaatagagaattttgatgttgctcaattaactccttcagatctgcatatgaacttgacatcccagataaaatttggaatgcctgtgtatgtgcagtgaaagtgcccagtctattatttgccaattgccattccagaacgggtagagaggcataattgaaacttttaatggctagcatctgttcaatcttctcttcctcccttccctcgatctctctggagtcctcctccccacccacctctcatccctcatttcaaatccctccttcccagcttctctccaactctgtgtacaatcctactcccttttcacaccagcaggctctcaaaatcctctctgctccccggggaaagcctggaagatctgagacctcctgcccagaagtggttgacaatgtagtgttttcattcgaatgcaaatttgtctctggacaagattcaaggaaagtgctttcccctccaactgtctctccagctcctccccagcccttgttgtcttttgtgttcttgtaaataaatgagaggcgaatggctttcagtttgaagacacagctgcagggggctcttaaagggagctagagagagaaagatgctgaaagattgggagcccagtattaaaatctagaaaagggaggcttttttagcattctcatttccaattgctctaattcctctagatttttttttaatgctgaaaagacgaagcgaattcattctgacttagtatttttccctccgtttaacttttcattgtccaaaaagaagaatccacgcgacaatagcaacagaataaactgtaagaagtatgtttattcttgatgttctccagataagtatgtaactcggccaatctcagaggtagaaagtgtatctaatgaaatgacctggggcaagggtggggagtgggggacagaaaaagatttactgcccgaatttctcattaaaacaaacagattgtgattgcgaccagggagatcatgattgccctgtcggggtggggctttaaaaatctttatgtgactaatgcgatgcttctgctatttccgaaataacatctacatgtaagcaaacacaggtctcatttgtcaaacgtgacttccctccagtagtcagctggcctgtgccagtgtcaggacaagaaatccgccccaggagagttcggggcgcaggttcgcgtactgccccgagcgcagctgggatcgcagagccgccgggcgcccgcggcatccccggtgtgcctctgctctcggggccgggctgggccgggtgggccgtgtgcttctccctcgctaagtgcgcgtgttctctcctctcccgggcacagggcacgaccagccgcgccggccacctggcggggcccgagcccgcgccgccgccgccgccgccgccgcgggagccgttcgcgcccagcctgggcagcgccttccacctgcccgacgcgccgcccgccgccgccgccgccgcgctctactactccagctccacgctgcccgcgccgccgcgcgggggctccccgctggccgcgccccagggcggttcgcccaccaagctgcagcgcggcggctcggcccccgagggcgccacctacgccgcgccgcgcggctcctcgcccaagcagtcgcccagccgcctggccaagtcctacagcaccagctcgcccatcaacatcgtcgtgtcctcggccggcctgtccccgatccgcgtgacctcgccccccaccgtgcagtccaccatctcctcctcgcccatccaccagctgagctccaccatcggcacgtacgccaccctgtcgcccaccaagcgcctggtccacgcgtccgagcagtacagcaagcactcgcaggagctgtatgccacggccaccctccagaggccgggcagcctggcaggtaaaggctcgctgccacctggcgcgactcacctgggcgcgtggcggggacgcggaagcagcagcccggcttgagcagaagcgaagccgggcg

SEQ ID NO: 33326 - DNA, 2300 bp, Homo sapien
tcagtgtaattgaactgcctttctgagaactaagataaaaattacaattaaacgtgtgatgaaaaaaatggtcttgcatgtcttccctcacaggactcaggatattttaatatcaaactggctttaagacacttggagttagcttggagaactgttttttgcaggtgagacaaagcctgtgtgtgcatgtccacacctggggtaggaggaataaaagcgaacatttgtactgttgtcaatagtctgcttaatctgctcctcctagcaattatttgttacctatttaacctctgtaccgcttttctccttcactcttacttccatttatatttcaacttactcccaagtataataaagaatagacttgaatattcaaatcatttaagtttgttggataatctctttcaacacaaaatagaagcacaatgttactgagaatcgtaagcaccaaatcccttttattacaatttcctgcattctgtcatgcttatttgtgtttcagaaacaagctctgcgggggtggggggggtggggggggtggaggagatcacaacctcagacagtctgcggtgttcagggtcatgcccgtggcataattaggaggaacattcgacctggcccctgggcaggctgtgccctgcttggcttggcttgtgaatgcagcagacgtgagccccgtcctgactgctgctgaatcagagggacaggggcgaaggcccagaggccttccttggcacatgttttgggtttcgtttttcaacaagactttgaatacggtgattccacttgctgtatttcacagcaggctacgcatggggaagtcccgatggggtcaaggagcagtcaagccaggaggtgatatggaaaactgatttgaacgtgaagaaggcaatgcgagatgcactggaagactgtggggaaggatcaggggagtggttcactttgaaataaggaagaaaaggaggaagagaaggtggcagagatgcagcagaagataccaagagaggaggacaaggtggcacaagaaggggaggagagagaacttaatctgctcaagttccagactgggcaagggtctttcttgcaggaagtttacagacattccagtttcaaatctgaagtgattttgcctaaggagaaaccctcactacccgccaaaaacatgccatctgaacagggaaggtgatggcaagattgggcaggtgctgtggagaagacctctgctggacttcgtgcctccttagctctggaatcacaggatctgcaagagcatctacctgcgctcaccagcacgttccgccagcctccctcccccaacccacctggccactctaggacccctcgcaccctggtcctttgttgcaggctgacatctgccccaccagagtcaactgtcagcgccttgcacgtgaattagggaagcggagtaacctggggttccatcccttcccgggtcccttccagctttcgcctagctccggagcatccacccatctcaggtccagggcgtgcgttcccaaggatgctcggccctctcccaacccgcggcctcctcccctctctcccgcggctgccgctgctgccgcgaaaaccaggagaagtggaacgcgcgcggcgaagcgccgctctcgcggcggcactgggcatgctccgcacccggggccggtttcggcggcggggcggacgctccctcactagccgggcgcccgggccggccgccgaggtttaggtggaggctgaggctgccgcgcgccgcgggaggagcctcgccctcggcggctgaggcggcggcggcacaggtggcgcgggccgcgcgcggggcgcagctcgggagcgctcggcgccgggcgccgcggcggccccaggctcgcgcccgcggcgacagccggctgagcggagctgcgggcgcggcggctgctctctcagcccggccggctggcggcggcgcccggagccccgaggagcccgcaggagcccgtggagcccgcggagccgggcagggggcgctgcgctcgccgagctcggaggggccgccgggccgggcgctgcgcactcgcgtcgggagccgcctctcgcccgcggcgctcgcccctgccgcccgccagcatcccttgtcccgcggccgcgctcagacaacaaaagcggaagatgctgcagttgggcaaggtcaggaccttgccctgaagccgggcggcgccgcgcacgcctcttcccggactgaggagctgtcgccggcggagggtgcatgtttgcgaggaagccgccgggcgccgcgcctttgggtgagttgcggggctggg

SEQ ID NO: 33327 - DNA, 2300 bp, Homo sapien
aaggacaaccaccaccacaaacatgtaatacctgtaagctatgccttttttttttttactttgctaattggaaatcagatatagtttatgcaacgaaccaagtattcaaacacaatatgagagaaaatctaaaatgttcttaattgttgaagttgtccatattttacaaattcaacatggttatagtttctgaaaagtacctagggctctaagtaataagcattgcctagtattcagagtaatatacatgcactagactcaagagtctagcatagctcctgtacatagcatttcttcccttaaaagaaagagttaccaagctgtatgaaaatcatgtgatcctttaacttctctctgcatttaagtaattaagatcgatttgagagtgagcatggtgacactctcattgtggctattcattggatattgctagagcaaagcctgtaaggcatctttaaggacaaggagctccacataggcagatgacctatttttataggacattcttttacgttctaaagtcaagagaaatattttaagaaattgacattttgtttctctcttgagcacttatgttcaatgaaataaactactgtttgtttctattgcttaccatcttcctatgagttcttgcgtgaaaaacagctgatatttgcctagtttgaaattttaatcgtgaatataattgttttcctactctgctaattctaactaaattgtgatgagtcaaaatcattttaaagagagaatatgggggttgcattatttttcgtagaaaataaatccacagaggacatgtaaatcccatgaattccagcttgttatgaattgcttacaaagtggaaagactgtagagtaactaatagttagcaatgattacaaatttcagatggtttatgctaatttccattatttatataaatacctctatctgggcacatgtacaattggaatccttgttagccataattatttgctgcaattcataggtgggtgttcacatcaagtgttttttttcctgcttcagtgaacttcctcagagcttatttatgtgattaaaaataatctggttctgagttctcttgaaatggtttattgtttttctctccaatgtaagtgcaatgtacaaccatcagccgtccctaagaaactaaaattgtttgatttttttatgtgctaagagaggacactcctcagcccttgggtggtcgacgggactgggcgccgtggagcagggggtggcgctcgccggggcggctccggcagcacagaagcccatggagggggtgggacgctcaggcatggcgggctgcaggtcccgaaccctgccccgcgggaaggcagctaaggcctggcgagaaatcgagtgcagcgccggtgggctggcactgctgggggacccagtacaccctccgcagccactggcccgggtgctaagcccctcattgcccggggccagcagggccagccggccgctccgagtgcggggcccaccaagcccacgcccacccggaactccagctggcccgcaagcgccgggcgcagccccggttcccgctcgcgcctctccctccacacctccctgcaagctgagggagccggctctggccttggccagcccagaaaggggctcccatagtgcagcggtgggctgaagggctcctcaagtgccgccaaagtgggagcccaggcagaggaggcgccgagcgagggctgtgaggactgccagcacgctgtcaccactcaccgtgagcccgcactcctcagcccttgggtggtcgatgggactgggcatcgtggagcagggggcggcgctcgtcggggaggctcgggccgcacaggagcccacggcgggggcggggggaagctcaggcatggcgggctgcaggtcccaagccctgccccgcggggaggcagctaaggccccgcgagaactcgagcacagcagctgctggaccaggtgctaagcccttcactgcccagggcaggcggggccagcaggccgctctgagtgccgggcccgccgagtccacgcccacccggaactcacgctggcccggaagcgccgcgcgcagccctggttcccgcctgcgcctctccctccacaccgccttgcaagctgagggagccggctccggcctctgccagcccaggaaggggctcccacagtgcagcggcgggctgaaggactcctcaagtgccaccaaagtgggagcccaggcagaggaggcgccgagagcgagcgagggctgcctgccagcacgctgtcacgtctcagcaatagactgctcttgaggtaa

SEQ ID NO: 33328 - DNA, 2300 bp, Homo sapien
taaagaccttttatcctacaaagccaagaattatgtggctcagacatacaaactcccccaagtaggtcactaggagcaatgagatgcacgtccaatcctattgccactttgggttctcagacaatatattctgccttttggaaacacagctccatagaactgtaactaatttagtgtgtgtactgtattatggaggctctcaccccgttatcacagggtaactgcatcttcaaaaaatttacttccgatgccagtttcagaatagtccagtatataatagaatgtctagatatatcctctgcctcacctcctttgctacaaatttcattccttggtccaatgtaatattaagcaggatcatatgtcagaagatcaaattctctatgagctctcagagagtggtgctggctcaggctctgtgagcaggagctcacatatacctaaaatatatgatggttccattcaatgtcaactgttgtctcttccagggcagaacagctacattgtaatcaacttgccacaatgtccagttggtcttctcaaagagtaacatcctataaggagctcagcattgatctctaattctggccaactggcattcagcaaatgaccagccttggtgggtgaaagctcacgtcattgggctcatgtgctgctcccttctctgccacagtggctcatctgttcacaagccaactgtgccacctctggagtggatgatagtaatgctgcctgacatatggccaagtcctcctatctatgtttatacctatcctgtgattaatgctctccagtgggcattaaacatgggatcctaagaccttcaccctatgcccactcccataaatcaatgcacatggcttcataaggtgtccctgtccttgacatgccaatcttgatccttcaaggtccattaacagccagacaagccattcaccactgctcttgagtctatatatactctaagcttgggctacttcttttttcatgcaacgtgaatgataaagtgtgcctcacaaagttctcccctttaattttcctttattgccacttttcagaactacatcagaccgaggctcctgggcagcagcagtccattttcattttgtacaaaattacagcaccaacctatccataaacaatattgggctattttcctgcctagttagatgctcttaagacacccttcctgcagctccagatgtgggctaagcaggtgagctcagggagaagcacctgtgcaacagtggcagctaatatgggaaatggggatccttgcacacatacctcacttgtgccttttgacatagcttgtacatgattcaggatgcattgctttgacattactcttattaatatttattgctacacatgtacagtcttagaacttgatgagtttgatagaacccagtttattatgggcacctctagacaaatgttcactcagtgtcacatgacaagttgttttagttctaccaggactcagtagcaaacaaaaagcttggaagggtgcatacttctctgatgagaaatgcaaggtcctgccttcagaaatctatggatctatacgctagtcctcctattagtcttgatataaactccacatgatacttttcccatcagggacatatctgtcagatcgtatggtcccatggaaagcctgctggtactgcaacctggaactgctgcagagcccattttcttttatagtctctattcagggatggtagcttcacgtgtcattgtgtacattggtcaaaccaatatttttaagttgtggaaaatgctccctccagattccaaagatgcctagtagtcattttgcttttcttcttctatgaattttacttcatagtggatgtttcaacatatcccagacaacagaagctcttggaaacatcagtaatgcggtgggtcctttaattgtcacagagtttacctcactacctctgaagtgagtgtgtcttcctaggacttcaagcacacttgtcatttatctggatcatagatttgttttgctctaaaacccatttgcattgctatctgttggttatggccccatgaaaatcacgtcaaccgaggaggaggagccaagatggccgaataggaacagctccggtctacagctcccagcgtgagcaacgcagaagacgggtgatttctgcatttccatctgaggtaccgggttcatctcactagggagtgccagacagtgggcgcaggccagtgtgtgtgcgcaccgtgcgcgagccgaagcagggcgaggcatcgcctcacctgggaagcgcaaggggtcaggg

SEQ ID NO: 33329 - DNA, 2300 bp, Homo sapien
ttaatgataatgccttcactctctctgtcattgtccttaagagttcatgcctttaaaaattttcttcattgtagttttaatggaatttggggagggatctgagttaaatggatgttttcaatcagccatctttacttggaagtccttttatgtttaactttgattatattcatgattgcgaccatatagtattggtacaattgcatactagtgtatactggaacaaatgcatggactaaaaataaaatagcttatcgcaattaaacatttttgttttcttagatttgacctggattaatttaaaatggttagtgttttcctattaaattttaattacttaatttctaaagaatgtaataatttagaatttgggtgaaatacaaaactacctaatttccgtttactgctattgacagggaggatgggcacttctgcagaactgccatctgggacttgatttcatggatgagctgatggacataatcatagaaactgagcttgtacatgatgcgttccgcctctggatgaccaccgaggctcataagcagtttcccattacactccttcagatgtccattaaatttgccaacgatcctccacaaggactccgggcaggactgaaaagaacatatagtggtgagtccagaaatacttgcgagtctacaggagtttccttacttaaattgttttcctaaaaaaattataaaaggattagctaggatacagttatagcaaatagtactactgtttaacctgatggggaggtgatggtcctcttttgtgaatatgtcccggcagtgtgaaagaatcagagctcatgattcccaccttctagtttcctattttcccagtactgccctatttaagcccatgctgttctccagctagacataattaatatcaaaaatgaacaattttgtcatttatggtctttatgctccatacttaaagtagtacagtagtctcttccaagaggagagtctgaattaaagtcatgcctgcctgcctttcattagggccatatgtcagaaggtagctaagttaaaaatccagtggcagcaaactcaggcccaaatgcccccatcatgactggggctgaggtcgctctcttggccattgcttcctctgcttcatagctttatgtatggggcttgtggtcatgaaaagaacatggaactttcagtcagaaatcctgattctggcccttgctgttgacaattactttgttcttttgggtgtgagtcattcaatctgagtttcaattttctcatatataaaatagggacaagagaatctctctaggagaattgaaataaattgtaactaaaatcatgtatttgataaccataataaatataattattgtatttcaatctggaaaacctgcaaagagacttttggggagttgctaacaaggcccaaattcctgccaatctataagataatgtggggataaaagagaggtggaaggataatggcagtaaaaaataaataaataaatctaattatatatacaatatagtatatgcatatgtatcaatcattattatttggagcatgtactcaggtgcaaagggcttctatatatactatcttaattaatataaaattagttaaaagtatatgccccaagtatatgctcaaaacaacagtaataataatagagtagtagttatagtaatagtggcagaatttatttaactgtcgttacccttccagcttgattttacccccacatgatcttgttagattggcaggaagttgacccatgttagcaagctcctcccctccccaaagtctctttgaagatttttcagagagaaatggcctctggacacccaaaagttaaattattattgtcacatgagtgtcataaaaacaatccaaagtaagtgaattttaatatcagggatttacaaaaatgattacttataaaagtagtagaaaataaagacatttgagagatgatacatttttcacccaactgaccacaacaggtgtcagccaagacctgctggacgtgagctctgggtcccagtggaagcccatgctgtacgcagtggctttcctgcactccactgtccaggagaggcgcaagttcggtgccctggggtggaatatcccctacgaatttaaccaagcggactttaatgccactgtgcagttcatccaaaaccacttggatgacatggatgtcaaaaaggtactgccgcgcatgctgcctcatgcctctagtggctgtgggcttgggccatcaagctcacgggacctcctagctttggcgtaaattatataagaga

SEQ ID NO: 33330 - DNA, 2300 bp, Homo sapien
aagagatgtctctgcacaagcaccaggcaacaaagagtgttgataggcttaaagtgtttttatagttttatatatacaacagaaaataaaattgttgatgttataggcctggggccaaaaatgctgacacagatctacctagctggggctacaaaaatggtttgcattcctaagaaatgtctaagttttagaaataaacagttaacttttaaaagggtaacttacatacatatttcacacactgtcatctttattctctctagtgtctgaacacttcctcacttcctatgatattgactgcagtttggaaatcaagaaggaggtggtccaatgcatgggctccttccaggatggggtggctgagaagtgtgttgattattttcagagattccgacgttctacccacgtgacgcccaaatcatacctctcctttattcagggctataagttcatatatggagaaaagcatgtggaggtgcggaccctggccaacaggtaagtgtgatgttcttatacaaagctatattaaagccgtggctctcaaccagggacagatttgccctggtggctattttgcaatgaccggagacattttgtgtatcatagctgtggcggcagggcagggaaggggtactgctggcatgtagtgggtagaggcttagggatgttgctaaacttcctgaagttcttttcctccacaacaaagaattatccagccccaaatgtccgtggtgctgaggttgggaaaccctcctctagagcctattgactgttccttgcccagtaggataaattattgccaggtttttatgtggcctactgcgttctataatattgattgacatcaggatagaaataatagacctggacgggagttgcgaatgcagacatcccctcttccctcttcttgcccttctcttcccatcccttctgagtgactgagagggaaaagccaggttgatgcatatgttcactgcctaaggagtatccctgcttccctgaagtttcttccaaatgtcactgctctgccctatgcttttctgatcagatcatcttcctgagcgtggctagaatcagccagagtaaggaatccctgggtgggcagttacacgaaatgactcggagggttcccatctctatggtcacgttatttcaggttcaggcaggcagctagttccttcctacagctgttctgatggctttaaattggtttcttaagcccacatcattcttcttttgacttcatatgtctcttttgaaaaacaggcattattttccttcctgcatgactgagctttaagcatttgaagtctattgtcatttagcctaatgtcattaagtatgtttccttcgtgatacagattctagccttactgtcgttcctaatttcatgtcgtgtgttctagcaggttcgctgttcttgcacgtggtctgtaaagaacatacatgttatcagtctagagtcaagactggatctgtatcctttttgctaagccctcttgggtttgctacttgcatacatgcaatcttcagatataaccattaccactcattattggaccagtacttgagaattgcatccaagtcctacacattttaacattgcttgcttggattttcaatcccagaatgaatactggattggaaaagctcaaagaagcttcagagtctgttgcagccttgagtaaagaactggaagcgaaagaaaaggagctacaagtggccaacgataaagccgacatggtgggtgggcatttacacatgtgccacattccttttgaattctcagttcacaagtgttaatgatctatgcatattcactggctataactagtgaagtatacattaacttccattggaataaaatactcttaattttatgtataaaaaactgggtaagtgcaggaggcggagcttgcagtgagccaagatcgcgctactgcactccagcctgggcgacagagcgagactccatctcaaaaaaaaaaaaaaaaaacaacaaaactgggtaagtgaacaaaatcaacaaatcaaggcaaaaatgtgcattttcagctggatgtttaatactgtttggtgaagtattgcttgctttatattgaattaggtcttaaaagaagtgacaatgaaagcacaggctgctgaaaaggtcaaggctgaggtacagaaggtgaaggacagggcccaggccattgtggacagcatctctaaagacaaagccattgctgaagaaaaactggaagcagcaaaaccagctttagaagaggcagaagctgcattgcaggtgcatctatgtgata

SEQ ID NO: 33331 - DNA, 2300 bp, Homo sapien
agtagtttatattcagcatttttatatttctcttttcccaatcatccttttctcaagtctatatttatttctgtccaaccaatgaaattattctaacaaaattactctattatttatttttgcgttacaaaccataccaaaacttaagggcctaaagcagaaacaatcatctgttatctctctttattctgtgagtgactgggctctgctgggtggttcttctgcaggtgccattggctggcttgctgtcatctgtaggggaaacttaggttggaacatccaagacagcttactcaaatggctgaaagttggtgctggggtcagctagaaggtcagatggtaccgctgaccagaaggttttgttctcctccatgtggtctccctacatggctgagttctgaggcaacattctaagtgcaaaggcagaaggtgaagatctcttaagaactagcttaggaagtcccatctcatttaccctcagattttttttttggtgaaaactggccatagggctagccaaattcaaggggaggggaaatacagtctatttcttgacaggttagtggcacagtcacactgcaaaagagctgtgagaagctgcaaccatcctgtaaacacaatccctaaagatatcctaattaacccaaccaatcctgtgtagcattgttgctattggtcactctccatgatttattgctactacggtttcttggtctcctttctatctctttgcacattcatccttagttttttttttttttttttttgaggtggagtctcactctgtcatccaggctggagtgcaatggtgcaatctcggctcactgcaacctctgctttttgggttcaagtgattctcctgcctcatcctcccaagtagctgggattacaggcacatgccaccatgcctggctaatttttgtattttagtagagacagggttttggcacgttggccaggctggtcttgaactcctgacctcaggtgatccacccgccttggcctccaaagtgctgggattacaggcatgagccactgtgcccaacctcatccttagctttctttatttgcacttctttttctccttgctcctgggatactggtggtccccaattttcttcacttttttagtgtgttttcatttcaatatgtttgttagaaaatcatatctgcactcatggtttaaactttgatttattcattcatttgacaaatatttattgaatgcacataccacctgctggttgaaagagctgttgatgtgtacttttgcaggttctgtactgcacaactccaacaggtaccacattgttttcacactgatttgacattgtagcttttatattgaccgtcttctctatgtctatgtctatatgtgcctatgtctatatctatatatatgtctgtatcatatcagtggttctgaacaggagaagttattttgtcccacaggggccatttggcaatgtctggagacgttttttattctcaggagttggtggtggaggctactgggacctagaagttagagaccaaaggcgctgctaaaacctcacattgcacaggactgctcctcacaacaagaatggtctgtctcataaagtcatcgtgctaaattgagaacctgcatgttatctgtatctgcaatgcagtttccccttgaacatttccagtggcctgtctgcctcgtccacctgtgtattgagtcacctcaaaatcttacacatccaaaagctgaacttatgattgtgttgcttcaacttgttcctcttgatgaacccagtgtctgggaatgccaccatcacccacctgactgcctctgggcatgcatcacaccagcctactttccacactgctgccagaatgatggatttttcagtgctgcacagacagctaaacacctatctctcttgatatgaaactcatcagtgattctccgtggattttacataacagttaaactttgtaatgtggttcagaaaatatttattatctgacttttttctcatttcctattatgttttcctagtcctttttagttcacacatcctggctaccttgtggttttcagaatgtgcttttgtgtgcctctcagcctttgtgtatgcagaaaggcgactgtcctaggagtatgaccaaccctccttcaatgctaggcttcagccacctcctcctgaaagctgtcctgtcatccccacccctaccccttatcaactccaggctagagtgggagacccttctttttgctccttctctgtagacccataaatgcccctgcatttggagacccataaatctga

SEQ ID NO: 33332 - DNA, 2300 bp, Homo sapien
gcctttctgagtttcctaccgaacaatgtttgatcatttccctccaaatgccagaaattgactttcattctggcaggggctggcgggggtaggtggcctgttgtaaattcagccttggcttgctttgtttgtgttgttcaacaacttccagtgagcctgagcgctcaagaagataccttaagacgccatctaccttgcccgaggggttgaaattcagccacacagactggaaggcttcccggtttgctgtgaagcctcaagggagtcatggttatgcctgccaaacacaaaatgcatgccatcagccatctgtggaaatcttcccaggaagtaactctccccaagcgatgcgttgtaaatgggctgctgctgcaatgaggatggtgcctaaaataccattagggaagcaccgattcaaatgtaactaatgaaagataatcggcgatgtaatgaattgtaacatgtttgtcctgaggtcatgtgttgacagaggattcttgggatggataggagatgccatgtgaggaggatccgatcctactgctattttctggtgtcttcagcaccacacagagaagggactcagagtctagatactgtcttcaacactttttattagaaacggacaacagccgcttaccaacaaccagaggttgacttcaacaaatatcctgcagggcctggcctggtggctcatgcgtataatcccagcactttgggaggccgaggtgggcaattgcttgaggccaggagtttgagaccagcctgggcaatgtggccaaacctgtttctacaaaaaatacaaaaattagccgcgtgttgtgacacttgcctgtagtcccagttactaggaaggctgaggtgggaggatcacctgagcctgggaggttgaggctgtggtgagtggtggtcacgcaactgcactccagcctgtgtgacagagtgagacctgcaggtctcaaaaaagaaaaaaaaaatcctgcaaacaaacttaaacttcctgtgttctagttatttacttaccaaataatattgaggtctaaatgttgtctgttaacctgacatatggaggccgtccgtgccctagcattggatatggaccaagtgaatctccatgttctgaaaccatgtcagcaccctgccttccaagtcaggctccacagaggttgactagcaggatgttaccaggatgagttcccaatttcctgattatccttggatgaccttttaggatttgagttgctggactgtgaattccaaggactaaattctagattcaacaagaccaaccttaagtgtcctgccttttattcaactcgatgggagaaaccatacatgagagatctctcaaagcatttggcagtgttttcccattacatcttcacagttaagatgatcaagatgtttagccacataggataaattaccttggctgaagtgtatgtgcaactgtgtgagcacaagtaatttatggacatggtttgctatttgcatatgaaacagacttcttgttctttgtggtggagaaaatggctcctatgggtcacaattagcctatctggcaattagtcacaattagtcacaatgctggcagtgcatcgtgcttgcaaagttgtttacacaaagtaagactgagtttctcgacatggacaatatattcagagctgtggcttcttggatttctaatctgatatggtttaaagtttctcattgttcaaagaaactatttagatatcactgttgactcaatgcttattattgggcagtgaatagaattaattgaacaacagaaggagttgtgttgctaccgagcagttaaaatgctttgattgcttgataaacatgattaagaggcatggttcaactgtatagtgtataaacaatattaccctaacaacaccaggcttcgagagagaggagaggcccagggcagacactctaggagaaaaacttgagtggtataagtggagttttaatttttattctgtgaatgtagtgaataatacatgcaaattagaaacgtgaaagtaaaatggaagtaaaactttccatttggaagcctgttggatgttgagcaggtctgccaggagttagaagaccattccggaagagctgactccagcctgtccatgcacggctacaatgtttaggattgggaggagacagctctggaagcatagcgtcactcgagttttaacggtaaggtgctgttgtctgtacctttgcatgtgtgttttggattatcatctgtcacacctgggtggaaaaaacaaacttgaaaaaggttcaaagtcacacac

SEQ ID NO: 33333 - DNA, 2300 bp, Homo sapien
aaaaatacaaaaattagccgggtgctgtggcgtgcgcctgtaatcccagctacttcggagactgaagcaggagaatcacttgaatacgggaggtgaaggtggcagtaagccaagagggtgccactgcactccagcctgggtgacagagcaagactctgtctcaatttaaaaaaaaaaataaaaggccaggcacagtggctcacgcctgtaatcccagcactttgggaggtggaggagggcggatcaactgacgtcaggagttcgagaccagcctggccaacatggtgaaaacccatctctactaaaaatacaaaaaaattagctgggtgtggtggcaggtgcctgtaatctcagctacttgggaggctgaggcaggagaattgcttgaacctggaggcagaggttgcagtgagccaagacttggccattgcactccagcccgggcaacaagagctaaactccgtctaaaaaaaaaaaaaagttaatcaggttttagcaggcctgacaaggagacgaaatcctccccgcctcatggagatctggggctggtcttcctagagttcatagtctagtgcaggggctcccaacccaggtctgtggtctgttaaggaaccagacctcatcgtaggaggtgagaggcagataagccaatgaagcttcatctgtatttacaggtgctccccatcgctcacattactgcctgagctccacctcctgtcagatcagccagggcataagagtcttataggaacaccaatgctattgtgaaccgcccatgggagagatctaggttgcacactcctaggagaatcttaatgcctgatgattggtcactgtctcccatcacccccagatgggaccatctagttgcaggaaaacaagatcaggactcccactgattctacattacggtgagttgtataattatttcattatatattacaatacaataataatagaaataaagtgcacaataaatgtaatgtgcttgaatcatccggaaaccaccccctgccccacctgtggaaaaactgtctttcacgaaaccaatccctggtgccaaaaagtttggaaagcactggcctagcggatctgctgtgaccaatatagtagccaccagtcacactggccattgagcacttgaaatgtggctagtccaaattgagatgtgctgtacgtgtaaaatacacatcagatttcgaggactagtacgataaaagaatgtaaactgtctcatgaataatttttatattggtagcatattgaaataatattttggctgaaacatagtaatgacttcattaatgaatgaagaaactgaaacatactattaaaattaatttcacctgcttcttttactttttaaaatgtggctcctaaaaacataaactttcacatgtgtcaggcattatatttctattggacagtgctggcccagatgagaaagattttgcagatacgaaatatttctattcaaatttttttggaaagtgctttaaggcaaatttacttggaattcatacatgccaatgaggtattattctgatgggtgtacagtgtttagaaagttatctttattacctatagattaaaactcaaagttaaacgtttctatggaggtcttagctggagaaatagctgtgaaggtaccagacacggaagctatgagaagaatctaaaacttacagtctaagactaataatcaagactgtgcgaattaatgttgaaatcttctaaatttcattttgaattattttttcctcctaaagctagaaacactcaaaattccacattcaaacaaatgctaaacaatcaggggagagctaagagaaacctaatggaaaatagtcaagaaacggcatctggggcccagtggcaggccggaagctctgggcttccccagaaccggagccggccccgagcatgcaagtagctcgggagccggagccctggaagcgccgagccgagccgcgccgcgccgcgctgggggcggtggccaggcccaggcggagcattgcccgtcgccatggcaacggcaggagcagcaaacagccggctagccgggcggcctgagcggactccggagagcagacgagggcagggcgcggcggctgcggcggggtcctccctgcaccgggggagcgctacgagtcccagcggagcgccgcagcacagcgccatggacaaactggtactgtgcgcgctcgggccacgcggctcccacgcccagccagggccgccgcggcgcatgcgcggccgagcggcccggggttccctggctcgcggggttggcggcagag

SEQ ID NO: 33334 - DNA, 2300 bp, Homo sapien
cttactcttttgcccctcctttccattttgtattctttggaaggaagttactatgtgcaggccacggtttaggagagggctcctccatttcatggagggcacagtatccacataaattatttagaattgttcccaatgtatttacttaatcccattgatttacttaattttaaaaatactatattatatattacttaatcccacttatttgcttaatcatttattttcatcactatggactcatggataatttattttatacttttggttataatcacattctgctttattttcttgctcaaatcgtttcagctttggccactgggagcgctttcaattagctcctgtgtccctttgaggtacccccaccattgctgatgtcaattaaaaaaatttttttttcatggggggagcaaattacctaccttttggcacaaggtgctccaggcacaccttgaatatttcccgtcccagtcctagaatcagtcatttcctcaaggagctctggctccttttattggagaatggtactagaagcaagatcagagcgctaggtgtattcgttgctacagagtgttgtgtctaggcccactcagctgacaaagcaaagagatacaagtatgtgtacgaccctttatctacaaatctctgtacagacccattatatacattatgaatatataatatagatgtagaccccaaacatgagtccataacgatgtctccaactctaaccctgtaccacaaggatcactctagcctcttcctggctgtaacctccactccagcagtgaagatttgatggccaccatccaccatttacatttgtctatttccagtatactcgtgtggtggtttcatcacccagttgtttttcatctctcttgcttctgcctgtttcccccggcactggatcctttcactctcctcgtagccggggcataggcgttttgaactagaatattcgtccagcgctggtttgacacggatcttccgcaaaggaacatttcttttggcctccccagaccccgtcatcttccccattcattctggcggagtaaggactgagaaaccgtgaacccgaggttcagcagccgaaagtcccctgggagatggggatacaccgagaggaatcccattttacaggagagctttgtacccttaggagtaccgtggcctccgggactggagcagataacctgttttcgggccctctatgttcactcaacaactattaagaagccccctccccgagccagggccagcgctgagcccactagggaggcacccgccccggcccgcgtcaccccgccttgcgggctagacgacgaaacgcctcggcgctcaggggaccgcgcaccggtgcaggagccagcgccccggttgggggcgcaatgccgggcctgggaaggtccgccccggctggtcagagctttcctgcgccttccaaggcttggagctgccccggggaagcagaccgaaccaaaccgaacgttcctgcagcctccccgccagccctgcgggagcccatccgcccaacgcggccccgcccctcccccaggctccgcccaccgccgagcccaggctcggcccttgacgaagttcgccggaaattaccgaagcccctcttttttttccttcctctccgttccctgttctcccttttcctttcacccgggttccctcggccgtgatttccccctcccccctccttccttccccattgaaatcaagatggaggctcgcggcagccgccggcgcccgtgatcccggaggtctcgccggccacgggcccccgccctcgcgactgcgcgtccgggaggcgcgtgctgctgcccgcgctccggccggcgcccgggaggccgtggctccgcgcctccgcccctcggccagctcgcggctaccgggcggagtcctcgtctatgtgggcgcgctccttgggccgagccgccgccgccgccccccgccgccccggggctctgcgtccgcgcgccgggcgcgggcagctgggtgctcggcgccgccaggcccggcgcggagcgggcggcacgcggcgctaggggcgcggggcccgaggcgggcgcggccgcgggcgccgccgcagccatgagcggcagcagcggcggagccgccgcccccgccgcgtcctccggccccgccgcggcggccagcgcggctggctcgggctgcgggggcggtgccggcgagggggcagaggaggcggccaaggacctggccgacatcgcggccttcttccgatccggtgagtgcaactgcggccggcccgcccagcggcgctg

SEQ ID NO: 33335 - DNA, 2300 bp, Homo sapien
acgatgtctccaactctaaccctgtaccacaaggatcactctagcctcttcctggctgtaacctccactccagcagtgaagatttgatggccaccatccaccatttacatttgtctatttccagtatactcgtgtggtggtttcatcacccagttgtttttcatctctcttgcttctgcctgtttcccccggcactggatcctttcactctcctcgtagccggggcataggcgttttgaactagaatattcgtccagcgctggtttgacacggatcttccgcaaaggaacatttcttttggcctccccagaccccgtcatcttccccattcattctggcggagtaaggactgagaaaccgtgaacccgaggttcagcagccgaaagtcccctgggagatggggatacaccgagaggaatcccattttacaggagagctttgtacccttaggagtaccgtggcctccgggactggagcagataacctgttttcgggccctctatgttcactcaacaactattaagaagccccctccccgagccagggccagcgctgagcccactagggaggcacccgccccggcccgcgtcaccccgccttgcgggctagacgacgaaacgcctcggcgctcaggggaccgcgcaccggtgcaggagccagcgccccggttgggggcgcaatgccgggcctgggaaggtccgccccggctggtcagagctttcctgcgccttccaaggcttggagctgccccggggaagcagaccgaaccaaaccgaacgttcctgcagcctccccgccagccctgcgggagcccatccgcccaacgcggccccgcccctcccccaggctccgcccaccgccgagcccaggctcggcccttgacgaagttcgccggaaattaccgaagcccctcttttttttccttcctctccgttccctgttctcccttttcctttcacccgggttccctcggccgtgatttccccctcccccctccttccttccccattgaaatcaagatggaggctcgcggcagccgccggcgcccgtgatcccggaggtctcgccggccacgggcccccgccctcgcgactgcgcgtccgggaggcgcgtgctgctgcccgcgctccggccggcgcccgggaggccgtggctccgcgcctccgcccctcggccagctcgcggctaccgggcggagtcctcgtctatgtgggcgcgctccttgggccgagccgccgccgccgccccccgccgccccggggctctgcgtccgcgcgccgggcgcgggcagctgggtgctcggcgccgccaggcccggcgcggagcgggcggcacgcggcgctaggggcgcggggcccgaggcgggcgcggccgcgggcgccgccgcagccatgagcggcagcagcggcggagccgccgcccccgccgcgtcctccggccccgccgcggcggccagcgcggctggctcgggctgcgggggcggtgccggcgagggggcagaggaggcggccaaggacctggccgacatcgcggccttcttccgatccggtgagtgcaactgcggccggcccgcccagcggcgctgccccaagcgctcggccgacccgccgcggagctgccgagctccggccaccgcgcgctggtgcccgcccgtccgtccgtcggggcccgcaggctctcgcctgggaccactgcttccatgcgccggggctgcccgccccacatccgcgtgtcccgctgcccgcgcagccgggcgcgcggcagcttggcccgaatgccaccacctcgccctccctgcgcccgcccctcgttttagggcagaatcccccggtctgccgctcccggcagccgcggcttcgcgggttggggcgccggctctttgtctctttcgctggaggaccgaggaggcggcggcggagatggcgtgggcggaggctcttaccccggaggccgagcggactgagccggggccggtccgggacgggaaattggtctttgatctgtgcctgtctctggctgatttgtacctggaccctcctcgaccccattagcagccgggtttctttgcttggccctctagcctgtcatctccccggccttggtctacacttctgtgaaacggggcagtcacggcactcactgcccagggagtggggacggtggccgagctgaagctcggaggaccgggaggcgcggtgagccattgtctccggggacgacccgggagggtcagctgggaacgtggccccgggggggcggcgcggggctggggctcgcggggcactgtgtgggtggcgtgg

SEQ ID NO: 33336 - DNA, 2300 bp, Homo sapien
tatgtactaggggcttggcttactgtgccattcagccaggtggccgtgccctgcccctcccctccctgccatccattatatgcctccatccttctcagggcccttcccttccccgtgaatccccagcctgaggtcgtgcttaagtgccacctgctcaagagagaaggcttcctgcccgcgcccatgatgtaagtccccccagatgctttccaccatcctgtcctttgtctgtaattgcgcttgtcgcttgaacagaatcctaattgtgctgattacatgtttaattttggtctcccctgtaagacaggcatgctttttggaggcagggactgaatgtcattcacatctgtgctcctagggtctaatacatgatggtgcattgtaagtattcagtatataacttgttgaataaatggatcgggtttagcattttcccccattggacctggattgacctggaaattggtggactgaacctgcaagtagagattaaaggacctaacaactgtagagtggctggtgaaggtagatataagtgcagtaagggagggagtcattgatgttgttttggttcgtagtgcagaataaagctacttatggaaatatacgactcctactcttagtttctgctttgatgtggttactgctgttgtttagcgtaagcatataaacaaatcactggcttagtgggttaatttttcttctcttttgttaaacagctgagtttttgctgttttcaaagttagccaaaaattccattttcatgtttaaatgatttagaaaaatcatttttctttaaaaaataacagtacataaaaagaaaacattctcggctgggcgcggtggctcacgcctgtaacccagcactttgggaggctgagacaggcagttcacctgaggtcaggagtttgagaccagcctgaccaacatggagaaactccgtctctactaaaaacacaaaaattttagccgggcgttgtgccacgttcctgtaatcccagctactcgggaggctgaggcaggagaatcgcttgaacccgggaggcagaggttgcagtgagccgagatcgtgtcattgcactccagcctgggcaacaagagcgaaactccatctcaaaaaataaaaaataaataaaaaataaaacgttctcatctattttttagagtaatttaagaagattctgcttcttgttttaccttatatataaagtacgacatgagttaaaatcacaccttggttatagcagctttttaaaaaaaattaaaacacacttttaagtaggaattccaacactagttaattacagataaatacatagcatttttagtgaaatgctttgctaaggtcatatcctgtggttttaagagcatttggcagcatcgattgttaactttgaggattacgtgtagttattctgataacagaaactttcctggtgggtaggaggcaagctgtgttctaagatgatcctgtatctggatcaaaggagagattgtaaaaattacttcacttagtcagatttacttggaaatattaatgaatttgttctgctcatttgttaactctgaataaattgttcatctttttaaaactaagttgtctgtgagtcacaggcctacatttatataaaagcaaaaatacagaaatgattaaaaatctgggccccaagaaataggtggacctgaatggcagtcatgtttacttggctttgacagtttcaagaaaaaagttgaaaattgcgtgttctcactcataggtgggaattgaacaatgagaacacatggacacagaaaggggaacatcacacaccggggcctgttgtggggtggggggaggggggagggatagcattaggagatatacctaatgtaaatgacgaattaatgggcgcagcacaccaacatggcacatgtatacatatgtaacaaacctgcacgttgtgcacatgtaccctaaaacttaaggtataatttaaaaaaaaaaaagaaaaaaggtgaaaagttctgttatgaacttgtgaaaacagcatatagcatatagataacccagcattgctaggcagttctaaggacccgtaccaggcttgtccaacccatggaccaacacaaattcataaactttcttaaaacattttgaatatttttgtgattttttttttttttttttttttttttttttttttttgctcatcagctatcgttagtattggtgtattttatgtgtggcccaagacaattcctcttcttccagtgtggccccagggaagccaaaagattggacactcctgacctactatgag

SEQ ID NO: 33337 - DNA, 2300 bp, Homo sapien
gacttccttcctttccttttgcctcgcctcctctcccatcggtcatttactcacctccgcatttccgctggttccgcgtttctgtctagtggctcaggttgtcgcccttcagggcatgcctttaattgagataatttctctttacttactgtataaaatgccctgtcccatctgacacgctctgcagtctctcacctacatgactggaaggagggaggggacccagaaggcgtcttccttcctcactccctcatctgtgcgatgctacacctctgacagatgtgaacttgagggtttttttttgtttttgtttgtttgtttgagatggagtctgtcacctaggctagagtgcaatggcacaatctcagctcactgcatcctccacctcctgggttcaagcgattctcctgcctcagcctcctgagtagctgggattataagcatgtgccgtcatgcctagctaatttttgtatttttaatagagatggggtttcaccatgttggccaggctagtctcgaactcctgacctcatgatccacctgcctcagcctcccaaagtgttgggattacaggcatgagccaccgcgcctggcccaaacttgagatttgaagtgatcagtccctagggaaatttcccatacatctttagccaaaattattgtactcatttttaagcttaatcctcttttctttcatagagaacttatattacacataaagtaattaaattccctgacagctcttttttagtttttaaattaatggcccatgttggcagtccgtattttggaaagggacaaagtcaactttttaataacggttgtagtaactgaaaccttagaatgtcaattaacttgatttcctttaggtcataatttttagtgctttttgctaacaaaagaggaggttatttatttggcaataaagttgtcttctcttacataaaatgtgctctgtgcagaactctgcctctcgctgggtcctggcataagtacaccatctggatctatcacgggaccgtttaaagggaaaaacaaccttacgctttgcttttggtgttttaagaagaatatgaagcctaacgtgggcccataaatgccagactcccctctgcagcagttggtgagagagccgttggagcgcctgagacagttttctctgggtgccctggatatagcatcttgatttttatagtagttaattgtcttaaactcagaaagaaactagaagtctgtgctgttttcacgttctttttcctttgaggattttaaaattttattatgcaacaaatgtggaggtggggacaaaaccaaaattttaacttttttttaactgaggaagtaaaaaaaggcaacattcttcttagcaaagccataaaaaacagcacaaataaaattgtttatactgtcaagttagataaagcagacatgagaaaaattattaatataaagaattcaagatagtacatgttttcttaaggttcaacaaagaacacttcctcaaagaaattgtaagcagctcagagccacactacaggttgagatatgtggcgaatattccaggtgacttttcgtcagaccaaggcaagggcatccaggtctagtgtggagggcaccgaggaacaggggagcgcacacacaccacagaagctggaagtcagacccgacagttcccacgcagtggacattctcctctgaagccattgtgtggtgtgggacaagggagcgaacatatggaaactttcaaagagagagtaagaatgtttctccgctaaggaaaagatccaatttccaaggaagacaagaaagaacttctaagatacgctttcctaaaaactccttatagttcgcatgcaagaatttacattttcagttctctggctgcttcctgtgaggaagaatgaagatatgtttttaataagtgaggagcggcattacagcacagtgatgtaaccagttggctattaggccgcattacatttctttttttttatcaagtcacatcaggaggtgctgtttggtgtgtgagtctcagggcggacctccctccagatgtacacaaagcccaagtcagggaagccattcagaacggcctgcgtggggagggcaactgtcacttcacatttcactgagtaaggaaattgcagctctggctagtgcaggcggggagagacatctggtttccagggtgcctgaagaatttccttgagctccaattagagtcagtgtggtagaatgaaatccaccgcgtctgggtattcccacttgtgaaacccaactgcagcgcgcgcgcgcgcgct

SEQ ID NO: 33338 - DNA, 2300 bp, Homo sapien
ggcactcagtgaaaaatctcaagcctcatggcatttttagccaagtgttatgtgctgcctgggtgttaactccaagtttccatcctgcttgcaagctgataatcatttacatctgcagctaggggtgggcgcttgaggatagggaggcacagttcctcaggtgcgaagaggttcaatgtggtgttcttatgtggtgcattgagttccaatccatagcttggaattgagaatgctctaaattttcatcattgtctttaaaatagaatgaactgcccccagattgcacgcatggtctgtgatgtcagagtttacttgacacccactcagttgagtaactagtaatacctatcccagaggattaaaggagatcgctcatgggctgggagcttgggaccctttcacctgcttcttgcacaccccttagtcctggaagaggctgtggccagcacagagtttgtagactgcctctggctcctcaacgcttgctcacacatgcctggggctggggctggggggctgcatctgcttgtcgtatttttcaaaggctttaacacttcaagagtttgtgcatgtttccatacatgttattttggcctgatttctgtgtttttctacaatgaagatgtaagaaaactcaggcacccaagtcaagagatgggacagcctcccgctccaggggcctctagtagctccttagcttccctcagggctgtgttcagcctgcagagcagaggtggtctatgaaaccgcctccacggcagccccagggtttctttttcaccccaggactctggtttaggaaagacctttgcggaagccagttggtagctggaggagttctagtcaaatctgttgccttggtcttcctgtggacactggcccttagtccgggatgtgctgaggaatgcggccccttccacccgctgcactcagccggcatcccaataccttggcaagcaggggcctcttctagctctcctgatgggtggggttgctctgcgcccctgcacggggtctgccccatgacccatcccagggtgggccctgttcctccctcaccccgcggcgtgctccttggcgccctgacccagtctctcccgctgtcttgtcttacagccttgacatcgccaatcgagtaccagaggaaccacagcgggggcggcggcggcggcggcagcgggggcagcggcgggggtgggggcagcggcggcggcggggcccccagtggcggcagcggccacagtggcggccccagcagctgcggcggcgcccccagcacgagcaggagccggccctcccggatcccccagcctgtccgacaccacccccccgtgctggtctcctctgcagcctcgagccaggcagaggcagacaagatgtcaggtacgtccacccccgggccctccctgcctccccctggcgcggcccccgaggccggccccagcgcgcccagcaggcggccccccggcgcggacgccgaggggtccgagcgagaagcggagccgatccccaagatgaaggtgctggagagccccaggaaaggcgccgcgaacgcctcggggtcgagcccagacgcccccgccaaggacgcgcgcgctagcctgggcaccctgccgcttgggaagccccgggccggggccgcttcgccgctgaactcgccgctctccagcgcggtcccttctctcggcaaggagcccttcccccccagcagccccctgcagaaggggggctccttctggagctccatccccgcctcccccgccagccgacccggctccttcaccttcccgggggacagcgactccctccagcggcagacaccccgccacgcggcccctggcaaggatactgaccgcatgagcacgtgctcctcggccagcgagcagtccgtgcagtccacccagagcaacggggtaagcgcgtcggggggcccgcgccctcccgcccccctgcctctgtcccgccagctctaaacgccaccgcggctgttctcactaactcggctgcccagcgctctccgccgcccgttgcggcctctacctgggaccaggctaaccctcctgcgggccggcccacggcgctactaactactccttgctttgttcgtgtcttctaataagagcaagccgatcattaaccttctcaacgcagcgtcttttggtttcttccatttccaaccagcagaatatcttcttggaactttcttttttaacctctgccttcctcacgcacctattttttggagggttccttttccctgctctctacctcctgtttaaattgaaacctgtacactttaa

SEQ ID NO: 33339 - DNA, 2300 bp, Homo sapien
ttttgctgaagagccacaggcaaacagtgggcacccacagggacaagaacaggaagcagactcctccacggcagagacaaagaacaggagctgggcagcaccgccatgtttttaagtatgcaccacaggtctagattcatagccctggcacctggaattcccagtggctggcttgttggctttctcaggcttgacctcatggaggagggccagaggtctcttccctctggtccttttggccagctacagcagtccgccacctgctccagcgtgtactgatactggctcagtagaccagggctgagaggcggtagagcagggttatctgacaaattgcatctgcactgacccaggatctgcccagggcgtcggagagcccagcagaagctagcacctttggagccttgggaacccatgaacatcccgacagtaccctcagtggaagcctttgagcacaagttcacgggaacgaggcaccagatgccgtttctcacatcctaacttgatagaggggacttgggcaagatgcagcttcaggcgttggcaggggatctgcatttcttctccacccagaaccataggccacgcgctagatgagagtgggacaaacactgccgtttgtgtttcttctcaggagctaacaccactctgtgtgtggcctgggtagggccttaagaaatctctgtcttgctgttgcaatcctgcctcactgaccgagtcactcaccatatgttgagttcctgctgcatgtcagccctgtgactgaagagatcgggtcccacaggggcagcggtataagggtgggggtacgcatcccacaccagaatccgttcccaaagcttgagtcacagcacctggggcgagtggcactgggatgctttgtgatatgttcccatggcagcagagccttggggacacttgagtcatgcaagttcataagagggacacctagcaagttcgtattgctggagacagagtcgctctccgtatgagcagaatagtgatcgatttacgttcaggggttccatgttcttctttttgaagagacgaagtagaaatgattaggcatgtcagcaacttagcatgattctagagtatgcattcccaatgaacattctatctggaagatttagggacttctctgttatctaatctgtcagtgaaatgaagattaattttgcatcaattaattctaatacctttttttaactgataatgagattcacagtgatgtggctatgtttgcttaggagtaacctaacgtggcgtcagcaggaggactaagatgttcccgtgagggtgcaaggaagaccacagtggaacgagcttccaaaaccaaagagtcattattgcagtgaattttttaagagcgtccctaaattgctttctagagaaattacattttcagttattgaaatagatgcacacagttagccagagggtaaaggaaatgttgaaaatttctcggtgcttgcctggtgagccctgcacggggtcatggtgccatggggcacactgacaagggatttcatgtgatcaggtctcgtttcagttcctccctgcctttctctgtcttcatctgtccctctgcagagtgaaagcagcagcagtagcaacatctccaccatgttggtgacacacgattacacggcagtgaaggaggatgagatcaacgtctaccaaggagaggtcgttcaaattctggccagcaaccagcagaacatgtttctggtgttccgagccgccactgaccagtgccccgcagctgagggctggattccaggctttgtcctgggccacaccagtgcagtcatcgtggagaacccggacgggactctcaagtgagtgcttgacagtaacggcgtcctggcaggcagcagagggagggggcacagcacccgtgaggcacacgacctcagacggggtaagcatgtggaagggagatctgcgctggtatgttagaacaggctcagctctgagcacgtgggaagatgggtggccttccatctcacacactcagactcacagggtctttgaataatctgcatttagaaatagtctgttctagcacattgttgaggaatcccatttgacatttttgtgttagtcataactcaagaaagtgttgtttgtttgtttgtttgtttgtttaagaaacctaaggggaaaatatcccctatctttgtttctttgacatacattcttaggccgcatattagtcagggtccttcagaggagcaggaccagtagggagcgtgcggagatgttggcatagacacaggcacacctcaggttgtttt

SEQ ID NO: 33340 - DNA, 2300 bp, Homo sapien
atggtgcggatgatagcattttttttagcaaataaactgtttttaattaaggtatgtacattttttagacataatactattgcacacataatagactctagtatagtataaacttaacttttatatgcactaagaaaccaaaacttgatgtggctcactttgttgtggtagtctggaaccaagtccccaggacctctaaaaggtatgcctgtctagaagtggatttatgatgagaaattgcctcacatagttagggagactggcaagtccaaatctgcatgtggaccagcaggcttcagaccccggagagcacgtggtgcaggctgagcctgaagacagtctgctagagaacgccctcttgcttgggagaccagactttttgtgttcccttaaggccttcggctcattggatgagggccattcaccttagaaagggcacatgcctttactggacccatcaaaatgttcatcttattcagaaacaccctcacaggaatacccagaataatgtttgaacaaatatctaggcgtcctgtgacccagtcaagttacacataaaatcagttatcacaggcacctttatattttcatcctcaaactttaagagattgttggttttatctcctggttcttaaaaaaaaggaacattttctctaacagaggtcacagttcgtagaggatttcccatccccctgcacacacatacgttgaatattcagcttttctttaacgcttccaggcagcacttggtgaatgttggaaaggcataatacccacagtgtgttcatttcccctaggaagtcaacatcttggcacacagcactccgtttaaggaaaaaatctgagaaaaaagataaagacggcaaaagggaaggcaagttagagaacggttatcggaagtcacgggaaggactcagcaacaaggtatctgtgaaggtgtgttcgggggtcttcaggagtccgtgtcatcccagcatgagagaaaggatcagggagggcagagactctgcagacctgaagctgggcttgcttatgacctccctcccacccaccagccccgtgccctgcgtgtcctgtagggtcttgttaggggcactatgctggccagcacagggatgggtgcgtcctacaaggaaccaggtagacccctgcacacttccgcaggtgcacatgtggcttctaaagaatatggttaggtttgcaaatgaagcacagagactaggttctcagaagcagcgaaggtgcagagaagctatggctcaggcttccttcagtgttcctgccttaaagccaaggggaagtggctagatgtgggggtgcatatgggctctctggctgtgacagatccccttggggacaacttcagtcagctttagtcctataatcggattgcctgacacctgcggtgggggttgcctggagaaaaagaaggtatctcctgaaagggactctgagcgccaggggccagggcgttggcggctctgcattaggaacgcatctgaggaccagctggactcagcctgtagcatgagaaaaacacacatctaagcagtgtttttgtgtttgtgggtaggaagaaaaagacccacccaaattagtgtgacatgaaacttttgagtgcagtgaaaatgtggtctgttttgattgatgcccaggcaagtcagtttctgcaaatctttcaacaataattgtagccctggaatgaaaggaatacaccttaaagtagctcatttcagttaatgcttgtttgctgtttccatttcagcttctcaatcccaactacatttatgacggtgagttctgttctttttcttctagtcctagagatgattctagacctgtggggcatgtttcagagcacttgagtgtggcctctggaaatgagttttccgtggcgctctaggcgtgcatagcaggttaggtcctatcaatctgtcggggacatgtgggtgggtgtggaggaggagccagggctgatgggcctttaccgactcctttcccatgcagttcccccagaattcgtcattccattgagtgaggtcacgtgtgagacaggggagaccgttgttcttagatgtcgagtctgtggccgccccaaagcctcaattacctggaagggccctgaacacaacaccttgaacaacgatggtcactacagcatctcctacaggtgagggaggcccactcctggtgggtttcgctggctgggagcaccatcttgtcacttggcaactggaaattcctccttcacggatggatttctttggctgccttcggcactccacttcttccgtgagagc

SEQ ID NO: 33341 - DNA, 2300 bp, Homo sapien
ttcagcatgactttcagctggcatcacaccacactctcaagttacccattcatacatatttaagctctgagctaggttctagggattctaggtcagagttcctgccctcaaagagctcatgaactaggtatttttaaaaaataacttcgtaattgtgcagacatgtaatcactcatgtaatcaccagaaagccaattagaaatctccatgtatatacgtctttatatgatgcttatgtgccaagtattgtaagagttttgcacatatttagtaatttaacccccataaaaatcccatggggtagatactcttaggcgctccattttacagataaggaaacaggaacaaaaaggttaactaacttatgtaagaccatgtggcttgtatgaaggcacactaggcagtctggctccaaggtttggtcactaagtaccacactaagaggcctctcattcagcttttggagtaacaatgaacattacaggcaaccaaaatcctaaatgtgaattaattgacaggattttaggccaagaacaaacagctgtattcataaatattgtcttgtgggaggagggaaggggaactggctaatttgttttgtggttaaaggactaagtaaattttgttttattataccgcaagaaattagtcctggtatttctagtttgtagaatagacaatttgtacttgtcactgctcatacccttgtttaggttaattaggcgcaacaattttaagtcatttattttgtatgagtaacgtggctctatacacgcaagcgatggtttatggttgtagaaaactacccatcaatgtcaaagatctgatttagataaaagggattattttctaaacatgcagtagagtttgggaacatttttattatcttctgtgaatcatgcattgaagaatggttgggtggttgagggttcagacttaggttcaaactatgcactagcacttcctgaacctcagtctcctggtctgtaaattggagataataacagtgcctacctcatgggcaagtgaggattaaatgaagcaatgcatgtaaaagacatatatcaaagcatgtggctggatgccagctgtcagtaaatgcttggcattaagttaactgttgttgctgggataaagaatctcactggagtggccaaagacctgtgttctgagactaggcgaagggaggaaagcgatccaattacttgtggacattgccctcaggctactgaagccacacaagattccaggctgtttctcacatctttttttagttatggaacttctctttcaaaagatgccaaaacatttcccatgcagtcagtttgtctctggaactgtgtatattggagaaaaaggaagtgttcaacaggattttcattttcttcatttttcttctggaaaaggcccatctgaccggcagagtgcgggggagaacaacaaggtgagcgccttttcatttttgggctgtttattctactgtaaactactccccatattttttcctttggataaatcattctataagaggacagttttgtcaataatgcacatatttgcgctcccaaagtaaactgtgagttctcagtaagtgtaaccccgttctgctgacccagcgggggaagaaaaattagaaaatctccccagtcaagtgaacaggtcctgggccgacagctgcatctggactccaggctcgcccaccccggcagtaacagagcagcatcgcgcagcaacctgcccgcggggggaaacagcactggttcctcgccctcatcagccggccctccgcgattgtgcttcccaatcaacgggccttcgatgaaaagtgccaaggaggtcgccggatccgcccaagtggaattcccaagatgtttcccggggagcagcctcaggaacgcgcctggaccccaggagtagcttcccgccccgctgccgagcctcggaggtctccgcagttctggggcccgcgaccccgacagcgcgcggaggccccgcccctctagggcccgctcctcccctgcccggcctctgattggctgcccggcgcgtcagtcggtacccatccccgccctacgcctcccccgccctccccagcccgcctcagggaagcgagcccgggcgccggcgggcggccgtcgcgtctgacagaccactgcagaccacgggccgaggcccagcgcccgtccgcagcgcggccggcatggcggcgacaaggagccccacgcgggcaagggagcgggagcggtctggcgctcccgccgcaggtgagcctggggccgggcggggcggggcggggggcg

SEQ ID NO: 33342 - DNA, 2300 bp, Homo sapien
tcctgcctcagcctcccgagtagctgggactacaggcgcccgccactgcgcccggctaattttttgtatttttagtagagacggggtttcaccgtgttttcgatctcctgacctcgtgatccgcccgcctcggcctcccaaagtgctgggattacaggcgtgagccaccgcgcctggccgtgatttttacatgctagtctacagagttgttcctatgctcgtccccttccttccacacaatgagcatttgttctgaactctgtgcccactcagtggtgtatgggtgggtctgtcaacaagcagattatttcataaactgcagaggaacacttccccccaccgtggcgggaggcaggaatttgcaagtgtgtatctgtgacctgtctttcatctcatccacagattgatatgtttatacttggatactcccttgaagtaaagataaaagtgttcagactgttcaagtttaactccagagactttgaagtctgctacccagaggagcctctcagggactggccggagatctccctgctgaccgagaacgaccgccactaccacattccagtcttttaagtccgctgggggccgaacagcagtgctcaccagtgacggtggtcacagttgcaataaagtctctctctgaaaccaaagctagcatttcagcatggaaggaattaggaccttttcttcaggattacaggtacactggatgcagccatgcatggatggtttttctttatttttcagtgatttcctctgaagcagctgcactgatacatttgggagttggtggcttgactttgtccataaggggcgtggccacttcacatgatggcgggcctttaagagcacaaagaagtttaatatggacaacaacaggaaaaagcaagaagaaaacaagtagggaaaaacagctaacctggagagaaagaatttctttaacctttatgttcttcattaaaaatcttatcttggactgatttgagggatttttagaaacatggccttattttatataagcattaccttcccaggaatctttgttgtatattaatttttgataaccatttgattaactttaaaattaagtatatgtgtgtatatatacatatgtatgtttatatacacacatgtatctgtatagttttatatatacatatatacacatagacatacagagaaccactactttgtaatagtgtacagtttgttttatatctctttactttttttgttactattttatctggccagcttaatagttttatttagattttttaaaattctgtagattaaagcaaatgacagttattgaactatcacaaaactattaaactgtggtacatttaatgtgtatttaatgtgtggaatctcattatggtaggcagaataatgccctatgctccccaaagatgtctgtgtctgaatcctcagagccgtaaagggctaaatgggttaaatgggaaaggagaattaaggttgcaggtggaactgagatgctaatccaatgatgctgaaatagggagatttttctagattctccaggtggacgcagtgtaatcagaatggttcttaaaagtggaagagggaattggaagagtgtcagagtcagaggggaatgtgaaatatggaagaacggttagagagagatgcaccattgctggctttgaagatggaggaaggggccataagccagggagttgcaggcagcctgtagaattgagactggaaaggaaacagaaacttccccatagcctccagaaggaacgcagccctgccaacaccttgattttagcccagtgaagcctgtgttggacctctaatctgcagaactgtaagataatagatttgtgtttaagccactaagtttgtggtaatgtgttgtagcaacagaaaactagtattctcaggctagtttttggtcgtctttattttggaaatacttttctagtttaatttgatagttttttttttggaggtactttgctagtctgttttgagtttcagtacataagaataatttttaaaatcttgctaattatatattacttcaaagtcacaaatccctttctaagaatgacttacttcacgagatatttagcactatcattttcccagatgttcatattatttctgcaataaattaaaagggagtgtgtcaaatgctgtcatgtctgaaattagcattcatattcttttgcaatggggatgatcagtcgtgtgtactacatgaaccatgtctgatggtagcttgttcccactgtcattttgttttctggttgaagattaatgagctc

SEQ ID NO: 33343 - DNA, 2300 bp, Homo sapien
tgtcttctggaccctcctggggtgggtaagcaggtcttaaatgataaatccactctaatattccaatctccccaagcctgtggatacctttctctacagatacctaggcagttctgtcgcttcaacttcatttagcataggcccttctgggtggatggaggttaaactatcaatggagttttcactcagatccttctcacggtgggctcagtgggtccccaaacccatcctgtggttattttcctagtttgacatgcataattggaaaagacatactcagcgattaaacatagcattagagctttttctaagcctctgagataaaacattgaatccagaatctctggtgggtccatatcaataaatttggcctgacggaatttataacctttccaccttgatccctatatgagtttcctggggtggtcatgacaaaggaccacaaactgtgtgtcttgaaacaacaaaatttattctcttgcagttttgggggctagaagtctgaaatcaggtttttggcagggccaaccttcttcggaaggcactttggaataatccttctttgccttttcttagcttctgctggctcctggcattctgcggcgtttcttggcttccagttgcatcactccaatccctgcttctatctccaaatggccttcttccctctgtgcacatttatctatgtgtccccttctaagggcgccaaccattcgatttagggctcattctataccagtatgacctcatcttaaccaattacatctgcaaaaaccctatttccaagtaagttaatatcgtgagggtctaggtggacgtgaattttgggggatcctgttcaaccctcctcaatcccacaccttaatagtctttgtatattcttttgtacactctgaattttttagtatgtgcatttattactttttcaagtaaaattaaaggagaaaacaatacccccggagttctgtggcactaaatataaatattctttctgtccagtttctcccttggaggtcactactatttagtctccctaagctggtcttccaagtcctgcccttctccaaacttttaccaaactgaagacaaagtgatttttcaaaatgatctcaagatctgtcaatgaggattaagcataagcgccacagttagcctaatatggcttttcatgatctggtctccactacccctctttcagtttcatctttcaatacaatcccctgctccctacctgttccgccctggactcctcgcgggtttctgaactgcccaggccattccatcccgccctattccggggctgcactctgcttcagcgctgcttcttgcacccacgactgcaactcaaccgcagaggctactcctctactccatcccagagatgaagcatttcgcctttggatgcttgaaaacggttaatattttcccttttgtttctcttaaatcaaaatgtttacatgaaatactatgatccaagaacacacactgctgcgcttgcttaaccgggtcgagttgaactagttcgtcttctccgccccaaccccggtgccgtaactcccagccccggagcaactagcctggcccgacagcggaggcccaagcccgctgggctcgggcgttggaaccgtcccggcggggggaagcccgggcaggacgcagccgcgcttcacagctgaggaaaacccgctgcggcgtagggcaacgctcagaagccgagagtggcaccgcgacgcgccggaacgcgtcagcatccttcacacctaagaccagacttcctcctcctcacccaggacgctccccgccgctcgtccggtcgtttcccgctctcacaccctctgccagtccccacacagctgacaagggaagcaagccagcggcgtccggggacggagcaagcgcagcagccgcagcgcgcggttccccctccaggccccggcgactcagcccgcacacgtgtatgcgcatgcgccgcgtccgggcccttcagcctccggccgcacctcctcgcgcagggtcagaggccgtggggcgggccacggtgacgcgcgcggaagcgctctgcgggccctcggaaaccgccccggcggctgagaggctgcggccactgcctggcaccccgacgggaggggctccggatcgttcggagccggctgaaccccttcggccgcgagcgaccgcatgagtcgggggactatgccccagcccgaagcgtggccaggcgcgagctgcgccgagacgccggcgcgggaggcggcggccacggcgcgggacggcgggaaggcggcggccagcgggcagcc

SEQ ID NO: 33344 - DNA, 2300 bp, Homo sapien
agagaatgagataatcaaacgcaacaaaaataaggaaaaagcaaaattaagctgctaaaaaccacacacacaaaccgggacatctactgggaagcaaacttgggaagcaaaccaaggggggaaaaaaagtgaagttggctgtcactataaatcatgtctctctgcctggttttgctgaggaagcccagaagaggtagggggaggttcccattgatgcatcagggtctctccagccaagctacactttaaaaatctgtgaatgtgtaaaatgacaaacctaggctagttttttttttacattcctttcagctctaagtctatatagttctactagcagcagacagaagaggcacctgtgccacaaaaactcttcaagaaagagcactcttcctatcattgtctgttttcacaggtgttctgaatgagaatcatgtccaccagaaaacttgccaaataactacatatacttctgagaacatggtctggcttcaaagtttctgcattgctcaggaggcatgacacagctggggccgaggtgcatgcagcacgtgagacagggcattaaattaagcgcactgttctcaccaccagggtagaaggcaggcaaagcagcgattaggaaccagcacgggccgtggagcagggcttgggggcaagagaccctctatttaaccctctgcagagtctgaggttaagtctctgatatgatttggatatttctcccctccaatctcatgctaaaaggtaatcccgctgactttcaatcttattttccagtggccattaacccattaagtgtgaataacaccatcccaagggggctctcaacaaatgagaatgtctaagtactatgcaaatatgttattataacacaatatctacctaacaggcctccaaaggacccctttttaggaatttttttttcaaaagttctagcagtgctttttgcatttaaacacatcttaaatttaactttccagccagttaaaatatctgtcaaactggctgtctgtgtgctttcataatttcttaaattccaagggcatttataggtgcctaaaacttgaaagtgtagaaaagtttcactcgagtttctattctgcttccacgcgtacccccagacccttgcagaaattaggaactcttcccaaatcgtcgtcttcacagtacagtaagaaattgatctaaccagcactgactttccttttcaaaaggaaaagcgggaaggcatactagtcaggccgttaaagggtcagagagaatgggtcagattctctttgggtccaaagtctgtccaacaggtgggacgtcgcctccaagaacaagtcgcgcagcgccgttctccggcggctgcagcagggtcgacctcacttcctccctgtgccaggctgaaggaaagatctagcgggaaccagtaataaaatacatcacttctcgggtttgcttcccaagtttctggaactttctttaacttcagacatgcagatatcaaaaatgagacgagaggggagtcactgtgtgaccagaattgtgaggggccctggggttaaaaatctgcactcggacactgggaaaactgtctgccaattcctccttgtcgccaacggcctcactcagaattgaagacgcccaggaccctccgctgacgactccccaccccagcccggcttccggaggggaccgagcccgccgcccacggcccgcgccccgcgcccccgcggactcactgctcggccgggcactgcatctcgggccgcggctgcccgctggccgccgccttcccgccgtcccgcgccgtggccgccgcctcccgcgccggcgtctcggcgcagctcgcgcctggccacgcttcgggctggggcatagtcccccgactcatgcggtcgctcgcggccgaaggggttcagccggctccgaacgatccggagcccctcccgtcggggtgccaggcagtggccgcagcctctcagccgccggggcggtttccgagggcccgcagagcgcttccgcgcgcgtcaccgtggcccgccccacggcctctgaccctgcgcgaggaggtgcggccggaggctgaagggcccggacgcggcgcatgcgcatacacgtgtgcgggctgagtcgccggggcctggagggggaaccgcgcgctgcggctgctgcgcttgctccgtccccggacgccgctggcttgcttcccttgtcagctgtgtggggactggcagagggtgtgagagcgggaaacgaccggacgagcggcggggagcgtcctgggtgaggaggaggaagtctggtcttaggtg

SEQ ID NO: 33345 - DNA, 2300 bp, Homo sapien
caggtcttgtcttggtgtgcacaggaatgaggactgcagggaggagagcaggaaggtagatttccttcccaggagtccctttctgagctggacatgtgctttctgttcaggctcataaccctacctggaggaaaaatgtggaccaataagtgtcctgactctggacattcgcatttcttcccttttgggcaggggaatggaaagacagctacatgagaatgcttccatccactaagtagacatgcaaaaaaatatttctcgaattaaaaaaaatgaagattctttaaggattggctgtgcagcattggtctttgtggtccctgtatattatacctcaggagtctgcttcacttttaagtgaatcctgatgtgtgccacagataaatatgtctatgttatctgtatatgtattattttctcttgtatgtaaaaagttacttttctttgtaaaagaattcacagtgagattattaaaaatcagcagttcttaagagtttacttaaaaaattttttttttaaatttacctaaactgcaaggaggatttagggcctcttttgtgctcctaatcatcctggcacccatcacaccctggtttataagtgcttgttgtcttttctcctccagcagtccataagccccttgaggatagaatcctgtcttcatcaccttttatccccagttcctagctcaatatttggtacattttagacactcagtaaatatttgttgaatttagttgaataaaacatttttattttatgtacaacttgctcaggagtaaatatgttgtaaggtacttctgcattctaaaatcattgctagcatctacgtcttcagtaatttaaaaaggaagtcaagatgtgcctgaaaatttaccgccttttcttcctaaaacacacacactaatatgtgcatgtgcgtgtatatgcacataccacaaaatcaaaccccaaaccatatatattaaactagggaaaatataaaggctatttttttttcactataacatttgtctgatggtgagttgtatttttaattttgggggatgtgttgttagagtcaggtgaggtctgtggattaacaaacatggagagttctgttagtttctggtttattatcgaccacttttaggtttttgggatcagggtaggacataaatacattaagataattaaatgtaatttttgttatagtaggtgttatttctttgtataatggttataaaaaactgattactcattgttagaagtgttttctcatagttcagactgtcgcgtctgtaatttgattagaaaagtattcatgagcacctgtgtgtcagtgcagctccagatgctgaggacacaacacaactgagaaacaaaacaaagtccctgccctcaaggagcttgtgttttactgtatttttgtatgggtgtgtgtggggggtggtgggtgagtggtacagaaaaatatttcaggtgttgatgagtgctaagaagaaaaaccaaatggtataagaggaatagagagcaaaagtgtacgtgatactatgatacaaggtgccagctgactctggagcagaggcctgcatggagggagggagcagctctgcaggtgcggggaagagcaagccaggtgttttggagagtattgggaggctgtagctggggctggagcccactcagtggggaatggtaggagcagagaccagagaggcagagagggggactatatgaggaataaggccatgaggcaggagcccctggagctctctgagcgcaggagtaattgataccatctgattcacgtttagatggatcatcctggctagctatcatgtggataatggtctggagagtgtggtgacaagggacacccattgggagacccccatggttatctaggggtgaggtgatggtggtctggaccagcggttaggcagtggttgaattctggattttttgacgtgaagaaagaaaatgaagagtgaagggtaacccccaactgaagcagtattctgattatgctttgatttattatttgctttttttttttttaaattctttaacagaaccgagattaagcgtagctcctgaaatggatatcatggactactgcaaaaaagaatggagaggaaatacacagaaagcaacgtgtatgaaaatggtatgacacagaggtgcacatatttcaggtctttcaaatagtctatcataagttgtttaatatgtcatttgatatttttagacattagttaaaatgactgctatagacgttgttattggtgttctaattttagagttaaggaaatagactc

SEQ ID NO: 33346 - DNA, 2300 bp, Homo sapien
gaaagcgtttgaagttgtattcacttttttcttctgaataaatttgacttcattcttttctgatggcttttttcatgcttcattttttaaaattgtcttaaggatttctgcatttcctggaagtctacaaccctgaactgtttgaccagtgtgtgaagggaatcagaaacaattgtttctctctgtgtagttaggtcttcagggtctcctgagtaattcagttgagtactgtacctactttttagataactgtatcatgtccccagatgctcagccggtcttctgggcttcccttcacctcatttcccagctcacatctgtgtagccagtattttctgcacatttgtagttctttgtgcccaattgtaattttagcttgttgccacttgagggcatgtgaggttcttgtgataaatctgagagactgaattgaaggttttgctgcagaactgccacatgttgccgaaacgcagggcagtgtgggcacggagtgggctggtgcagcctttaggtgggtggtcatttgttattctaataagatgaggaggagaagtccctctccacccttagtgagtgatgtagttcgccatcactgtggtcacagtgaaaagtaatttacatcccaatcgtggttctgtgttttgtagaaaccaccttagttcacacgattgctctaggttgagaaggtaccaccagaattactatttatgaaagggtcttttagtcttacattccagttgaatggaagatttggcctcatttaaaactgtatttattttattttatgtatttatttttattcatttctttcttactatataaagtttttaattttttggggatgaggtcttgctctgttgctcaggctgaagtgcagtggtgcagttatagctaactgtaacctcaaactcccgggctcaagtgatcctcctgcctcagcctcctgagtagctgggaatacaggtacatgccactgtgcccagtgaatttttaaactttttttttttatagaaatggggtcttgctatgttgcctgtactggcagaactgtattaataactgctaaacaaggtcaggttcctcataggatattgtaggatttaattattctttaatgatctgttgacttggaggtgaactttttttcctttctaaattttatagcagtgaagtgacacacctgtgcccagcctaattctaggatttttctcctgacacacccaagactgttggaagagtcttacttcccatgctgtcatcagtcaggctgtgcctcagcttgcctttcaaactgcagattgtgttgataactagagggaaacaaagtaacaaatactccaggaataaaaaaaatggaaactagcaatgtagttcagctgtcacttctttcatgaactaagtgagcacagctcacttaaccctgcctctgattttcaattgtatgttttatcttaatagatcgattagatagttaaactagacatagtatcatttctctgaatgttaaaacttgagtatatgtgttaacattatttaaccaaactttttctacctttttttggtggattttttaaatgccagaaactaggttttatttttcttattgggaaaggagaaggtttggcttcaccctggaccttctcacatgctcagaagcactgtcccgagccatgtgttaggtggtggttgagaggctgcagtgagtcccatagcctgaaggtggttggtgtgaggacgtgctgtgggcatggcctgctgtggaatgtcctggccgtggttggagtcctgcaaggcagattgtgctttggctcaaccaaaagcaccatttcactccagcagccctcctcagggtggtactttctaagttcctgacttctagatttaggtcctccatcctaagcccacatcacagatttgcagaattaattctggaaacaaagttaggttttatagactttgtggtttcttacagcttggattgtgtggtggatttcttggaatgttaacacttctttatctctttgtttctcgatgttgtagttaccagaaaaactcataagcaaatacaactggatcaagcaatggaaacttggactgaaatttgatgggaagaatgaggacctggttgataaaattaaagagtcccttactctgctgaggaagaaggtttggaacctgtagtgtcctgtctgataagggtgaagctctcgttcttgcttgccccagaagaccagtttttagtcttcactcagtggattttcaaatgctcttggctgatttttaggcaaaatggttttaaa

SEQ ID NO: 33347 - DNA, 2300 bp, Homo sapien
cattgctgtgcactgtgggataatggatggaacatggtgttaagccacgtttttcagtgtgatcttcctcagaatacccgtttgctcttcttcccaggttgaaatgttccttcttgcctatgctgtgcgccacaccatccaggtgtaccggctctccaagtacaacacggaagaattcatcacagtctaccccaccgacccacccaaggactggccagtggtaacgctcattgctgaggacgatcggcactataacatccccgtcagagtgtgtgaggagaccagtctatgagagacgcatgctcctgacagcctggcgacgtggcgaagatgcacaggtggctcctgggcttgggctgcaggtttgggggtctctaagaacaatctctgagaagaacccttgggcccctgggagccaagttggacaggatgtcctgaagactagcttttgataagagaaattaaccaagtctttcccctcatctatgatgcaatatatttcagtgggggccttcagagcacacctgttggacggtgcaaaccatatcttctccagaaggcaaatacttttgtatcagaggaaactcagttttggagaggaatatgttctttatgtctcaaatcaaaactctctctaatggtaaactggcttctaatttttttaagtacagtatttttttttcccctttagtagtaacgggtttctatagatcttcctatacagtctgctttaactcaggaccttgagattatgagactgacgtgctgcccactgcactgagggggcttctaacagtctgctttaagtggtataattctgggatagatctgttactggcatagtcatgacaacctctggtaatcttaccttctcctttttatgaagggaagagcaatggtttggacttacatcttaattaaggctattttaagcagattgttttgcaacagattaagaattgggtcccaaagtgggttatttcaaggcatttttgaagactggaggagcgtaggagggagtggtgagggaacctagaacttcttgctccttgtgactatgacagatgtctgatgcccccagcgcactggagtctggggcttggtgcaggtggtgccccatcagtgtggacagacactacttgcctttgtggtttagtgttggaagctttaattattctacagttccatagattcacaattttatagccaaacagtttgtatccacctgctttcagaggaggaaccaaaggccaaattactttgaggtagggcttagctggacctgggttttcctatgctcttttcatgctgtgttggagggtgtgtccactgccagatctgtgtaacccgtctgggtcaggggatgagtgacagcaaaccatcttaaaatttttcatgagtacatttaagcggaagcatacgggaatatgagtgcaaaagtgtggctgagccgcgtatgcccttgattggttttgggaagcctgagggaggcagccttcctggctatgagccatcgcctgcccaatcaggctaagggtggtgactggggtggtgaaggggcagctctgctgagcatggtctgccttatggcctgaattgtcctcaaggggtgtggactgcagatggtgttcacatgaaccggagacatcactctttaggattctactggcagcccctgaattggctcaacgtttgtggaggtggtatttccctgaagtactgagctttgttttataataattaaaatccttatttggtccaatttaatatagtttagaagctattttttttgaggcaaaccgtttttgaaaatgtaaattttgtttttaattaaaaataaagtcttagttaagaaaactcaggatgcacaaaactattcagactgttactttagctttctcccattacctcatcagtaatattcaccacattttgctaaatatttattgattagagtgttgaaatcaaattctgctctaaatgtgtgtgaatatgttggagaggctttgtgttcttcactgtgaaatgcaattgtgccttgaataagaaggtacctagaagccaaattaaagtaataatgacttcttattggctttgatttttcattgcagtatatgggattgtacagcaggaaatgcttatcattaatttctgatgttttttaaagcacaactcgaaacatttcgatcatacatacatagcagtagagatctgtgcccttcaggtacattgaatctgaccatcagtttatatatgtcattgaattttaagaatactcatgttaataatagtcatctatc

SEQ ID NO: 33348 - DNA, 2300 bp, Homo sapien
ggtctccgttcctcagtgtgaacggggactccgggctgcagcgtgccacccgcctcctgcatgtgtggagtagatggtttcgaactccgtggcggaagggaaatttaagaggccaccggggctccatctctttgtacggccatgtgactgggaagcaaatcaaaggaagccgagttttaacctgttgattcttaagagcgatgaagggggacaggagagtctgtggcctgctgtgcagggtgaccgaggcgcgatggcacagctgcagtcctttggttccaagaggagattgtccaggggaggaggacacaacgtcaaccgtgaggcagctgtgtcttttgggttttcgtgaggcaggggtatgaagtcagttgtttcgtttgtttttacatagcaacagtaaagaccattcactaggtccccccgtcagtgtgagcatacccagtatgctagagaattgacacgaaacctttaaatcaaggcctctttcattaccaaaacaaaacaaaaaaaagggaacaaaatacgatgggagagggaagagatgatgccgaagtgtcatcctgactgactgtccctgcagtgcccatggcgtcccgtgccttattcattctcctctctcatttccacgatgtctgtcacctcctctgtcggaggcatgtctgtcatggcagagtcttccccctccgtggccgactcattctccatcttctttttctagaccaaagaagactcatcagtgtggggctgtggatggggacactgcacagcagaaccacgagcagggagacaacaccggggtcttgggggacccctcactgtaggcttaaaccttcttatggttggggtggcgtcacctcttttgcatcttagctcagtgtgttccttgcagtttggttgtctgtgtgcctgctgtgtgcctggcactgagctaggcaggcacttcggaggacaccatgtcccactgccccgccccagacaacccgctccctgctgccctttccaatgagggctgcgctctccccgactcctcacagtcacctgtagactgcttctccttcctcctccctaaagcctcaagcttggaatctcacattatcaaaatattccaccttgtacagcatccgtcagtcacctctgggacagctccaggcttgccgtcattctctcccacttactgcctgtcctagttcctggtcacttccctgccatgttgcctgttcttacaataaatggcctctcagggatcaggttctcagccccagccccacctcagccactgctgggtcactgcagaccttgccattatcgacacaccaacaggccaaggcaaggacattgtcctctgtctgccaaccccgctggtcccccatccacggatcccaccaacccttcattgtggccaccttttcgatgtcctgtctcccctctttcctcagcttacatgacatgctcagtaatgaccatcatttccctaccctgcttttctttcattatatttgccaggcaaagccccagctgtgctgaggttcagatctctaccatctcagcccacacccctcagctgccatggctggggaagcccaaccgcaggggacagccagtgtcctgagatgcacgtcacgcaccgtgagcaggctctctgagtggcctggccgtcactctgctgccccggcctgttcactctgctactctcttgaccaactgtttccccacccatgtgtcctcgttcttccaccctcatatacctcccttttctcagacaatgatgtggcttcctacttcactgagaaaaacaaaagtgatcagaagggcccttgcgcaagctctcggactgcatctctgctccgcccatgaccagagaggctgcccgagctcctgtcttggactgcccagtccttgtgtgcacagccacattggtatcactgtcccctctcccatcggcagcatcgcatgtctgcgggtcattccccaaagcaagccataggctgaatttcgccccatctacgctggctttctgaaatccatgtccacacctctctcccctttggcgcaaaactcttcaaagggactgtctgtacttgctgccttcagcttttccccttttttcttaccccactcccattaggcttccagccaccctaagccacgagactgggcagtgtcaccaaggatcccccactgacgaacgccaccatccaacctggtcagtggctgctcaggttctcctgcacccaggaggatgcacccgggaggaggctcccggcgcggctgtctcacctgcttccggtagacatagc

SEQ ID NO: 33349 - DNA, 2300 bp, Homo sapien
gggtcatcatccaatttttggttctgtttgcataaaagtcaagatctttgctcagaggtctgtctcaggttcaagagcgtgcccctgtgcttctgtcagtcggttcccgcttctcccctctgacctgttcccgttctcccttctctcaggttgtttttgtagccattttgcttcacagtcacctggaatgccgggagcccctgctcatcccgatcctctccttgtacatgggcgcacttgtgcgctgcaccaccctgtgcctgggctactacaagaacattcacgacatcatccctgacagaagtggcccggagctgggggtacgtctaccaacccaacagcagtctgtctgagactcagagtagaataaaactgtattccacctctatgtaaaatgagaaatcagtgacatcaaaacatgaagttggccaggatgtcatacccagaggccaagtgctagatgtctgcagggaaagacagttggaggattaatgaactctaacagatggatgtgatctgagatgtcactgtccagcctccttatcccataggaggagacagaggcacagagaatctgtggccaaggaatagatacgacattcatggtttttcttgctcttataagttattctgcagtcagcaaaggttttaggacccacgatacctttgagtttatatttcattgtgtttgattttacagcagggatccaggctttgtttatgctttcttcaatggccaatcccagtcccttattcaggtgcctcctggggaccaagcacaacgttaggtaccatagggcaacacagaatattttaagatatggtcgctaccctcaagcagcatcatatcccatctggcagatcagaacaatacagaagcaacaattaaacagtcatctgagacagcacatcacctgcatgaggatataggagccacgaacactgggagaaggaacatagtgatgtagtgtaagatgcctccttggaggaggtagatcttgctgtgccctgaaagttgaataagaaacaagtaggaatgagatagagaaccttatagagatgaccaaagcattctgtttgttgtaagtataaacattatctgatttctgtgtgtgctaattttccctacccataggtatgagacatcattaggtttctctgcatttagctgtaaggcatctatagccctgaattcatcccctcacctcaccctgatccctacttgggccgcacattactttgtcgtatcaagcagtaattgttttgaccacttacctccatctgaggtcagactgtcagtaaaatcctatctagttatcccatcactaggccaaccacaaattggtcttgacagtaacaatccatctcttaacatttagccaccagcaaatggaaataaagtgaccaagatggttccatgatgtaactctcacccttgtgaacaatcaaaaccaaaattgcataatgaaagccaggctttaaagatattccacacctttgccacagaagtcttaggaatcccttgttctttacatgcctttattttgattatgcttttgaacagtttacatgatgtctgtgagagctccgagaataagaacctctgtagtcagtttctacactgccagaataattaggcacatttttgtgagctgactgattccaaataacttttttatttctaagagttacctcttcctgacgtggcttccagccagtccatttgatgagattaacaaagacttaatttcaaacctgtttctcaggctcgagatgtgggttctaccttggttagagattccccgagtctcagtatggaaaagagtggttgggatccattaaacttcagtgtgtgttttaatttcacagcagcttgccagctgtctcggttaatttctattaggactgaacattttattttaattcaacttggcttgtctacagacacttttccttatattactttcaagtatagtgaattggcttgtgattaacatacgaaggaaaagctttgattctgaatcgttttttccattctgcttctagagttcaggtaacttttatcttcgtttcttaacacagggagatgcaacaataagaaagatgctgagcttctggtggcctttggctctaattctggccacacagagaatcagtcggcctattgtcaacctctttgtttcccgggaccttggtggcagttctgcagccacagaggtgggccatgctttggggatgtggggcttatgatcaccttggtggggcaggggggtgctgaaactgatttccagttcttctcg

SEQ ID NO: 33350 - DNA, 2300 bp, Homo sapien
gcacaatctcatccttcacctctgctaactctgtagcaactatttcagagagtttctctacctctcaccttccaacataagacctcatttcccacctcacagagtcaactgcagcaaccaaattcgtcaccttccagccaacaaacctacacacttactttccaaccctgcatcctcccaattctcttctcattgtaggggaggaggtgtccctcctcccatccagggccactcctctgggtcctggcctatgctgcttcctcaggaacctgttccctgctttctcgtgcatcgtttcccttgtcctgtcacactcacatgtctgccatgttaacacagcaacgagaagcttcctgtgtatttcacctaactctttagctacagttctatcactttatagccaaacttcttgggagggtggcttctactcactgtctttttcacttctctttcattctctacctacttgaggctgacttccacccccatcagtccacccagatgattcttactaatgactttcctgccattaaacgcagcaggcagctttcctgatctttgctctgttgactacccgctcctcagtcacacactctttcccaccagccctctccccgctgcagtcctggtttttacatgtttcagcttgtttttccattggtatttggccattaaggttgatgtagctcaggaatatgcattgtcctgcttttgttctcagtatgcttctgaggtctttggaatgagtggatcccaggaggactctagacaaaggctgggctgattctctgatttctgcagtacagggaggttaatacagttaagcttgatttagagactgtaccattgaatagagatataaacattattgtaatttcattctctcactctggttatttcaacctattctagttttataggttagtattttaaatgttaatgtaagttgttttataattattactgttggtgttttttggcagcatttttagtgacttttttttgagatagggtctcactgtcacccaggctggagtgcagtggcacgatcaaaactcactgtaacctcaaactcctgagctcaagtgaacctcccacgtcagctaccaaagtagctaggactacgggtgtgcaccacgacacctggctcatttttaaaaatcttttacagagatggggtctcactaagttgcccaggttggtctggaactgctggtctccaacagtcctccagcctcagcctcccaaagcactgagatcacaggtgtgagccatggcacccagcccatttttagtgccttctatcctataaacattaatgtctattttcctgtatatgttatttatcactactgtttttttctttgttaaatgtagcctagtcctcagatgtgtgttacatacacatctgagtgtccagcctcgagagggaaaggctacattaagttggtaatgagtaaatagattccatgcaaagtactttgaaatgccaccttggcataaatagcaagtaatcaccaagcaccaatggtaaaatggaaattatttataatgcctccaatgtcagtggcaattcttgaggggtgtttttttgtttgtttttttgttgttgttttgtttttcaaattttactaagttaatgggtttcacacaatggtacaaaaaatctctcggtttggtgcacacatgcagtgcttctctgtgccgtcattatttgaatagttatatgttccagtaaatcattgccaagggattcctgaaaacatattgcataaatttttttaaagtaataaccttaaaaaagatgccttgaaagatttttgtagttgcttaaaagaattttcatggtgggtataacaaaatgatccatgttcctccagtgaatcccaaacatctgcacatgaattacatgagagcgacattgggtcatcatccaatttttggttctgtttgcataaaagtcaagatctttgctcagaggtctgtctcaggttcaagagcgtgcccctgtgcttctgtcagtcggttcccgcttctcccctctgacctgttcccgttctcccttctctcaggttgtttttgtagccattttgcttcacagtcacctggaatgccgggagcccctgctcatcccgatcctctccttgtacatgggcgcacttgtgcgctgcaccaccctgtgcctgggctactacaagaacattcacgacatcatccctgacagaagtggcccggagctgggggtacgtctaccaacccaacagcagtctgtctgagactcagagtagaataaaactgta

SEQ ID NO: 33351 - DNA, 2300 bp, Homo sapien
caggccacatctggaagccggtgggagtggtggggggcagggttagccttggcttggacttgatatgcgggttcctcgtcaagccagtgagaccagctactttgaaagacaattattcttgggtttgttgagaaatccttttgtggtgaaaggaaatgtgcaaaaacataccttttatgtgaggcgattttgcctgaaggaacgaggtcagggtgatttgagtactgaagcggtgctggttaggagcaggtttaacctggagggtgcatcctagggaggtgagatgtaaggcaggaaagggtgcagaggaaggctcctgaccaccctagttcacacccccagccctgaaagtccacatggaagaccaccttcttttgaggatgcacatccgagtgaccgtgacaagcagcgtctgcctggatgacaatgtgacttaacaagtgtgtattctcatccagggcagagggatcgtccggcacagctatggttagaatgagctgaatagacccagatgtgaagagcaacattcgtgagaagactttgtgattttatagctagtaaagagcattctggactgactgcacttctgatcatcagagtgggctgtggccaaacccaaaacctttttatgtgtctattgtatatcatgacaatgagacccgaacagagaataacatggaagtgataatgatctaagagctagcaaacagtattgtctgttgagctcaccttcccgccctccctgcatctatctaataaatagtttaagaacccgtaataattttctctgcaaataatgtgaacagccacagtttatggaatacatgtatacagctaacattaggaggagaaaacccctttgctttaagggatcctgagtttgttacattacttaccattacccaaagggaaagaatgtggtcaaaaaataggctgcttttcctctcccaaatagatgagaagatggaagagaaaagacttttgggacttacctgccatacaaatctgacaaagaagaaatctgatctctagtatgtactagttccttagcgactgaggttgaggcaagtccaaagggaaaaggatggaagtaagcatagcactgggagacaggactagctggatttcctaggctgactaagaattcctaagcctagctggggaaggtgaccacacccacctttaaacacggggcttgtaactcagctcacacccgaccaatcaggtagtaaagagagttcactaaaataccaattaggctaaaagctggagggagaagggggacagggttttagtttataaaacaatgttgttttaaaaacattgctgttaccggtgggtctttgttcttagagctcccaagatggtggcaagccttttgttctctgacctggggttcttggcctcacggattacaaggaacggaaccttgggccatgcggtgagtgttatagctctgttagctctattagaagccgtgggtcacggaagagaaccgtggaacccagcaactagtgttcagcttgattaagatgaaccaggcacttagctgcacaggaacaatggcgagccccagcccgatcgggagcggcagtgggcgcctagctggatcagaggcgcagtggacaccctgccgaatctggaggggtggaagtcagcggcgggtctgcgatggcggtgatcagtgccggacggcgagcaaaagctcagctcgagccggaacaaacatggagcagaagagtgtgcagttgcaagatttaatagagtgaaaacagagctcccatacaacgggaggggacccagaggattgccactgccagctccaacacctgggtttatatccctatcattgtccctgtctgtgtgctctcaggcgatagatgattgacaatttctttacctcctgcttttagcctaattggtattttagtgagctctcttcactactctcttcactacctgattggttgggtgtgagctgagttacaagccccacgtttaaaggtgggtgcagtcaccttcctcagttaggcttaggaattcttagtcggcctaggaaatccagctagtcctgtctctcaacagaatctcggtccatcgccaggctggagtgtagtggcacagtctcagctcactgcaacctctgcctcctgggttcaggtgattctcctgcctcagcctcccgagtagctggaattacaggtgcaagccaccacacccggctaattttatttttagtagagctggggtttcaccacgttggccaggctggtctcaaactcctgacctcaagttatccg

SEQ ID NO: 33352 - DNA, 2300 bp, Homo sapien
ttctagacaaaggtcagtgtaattagattgctctaagtaaaatgagcccatgaaacctagaataacagaatgataaaccatgaggtgatatttgttttaggaaaaaaaaaacctctttcccagagaattcctttaaataacaagctccctttttgtatatttaagttagattcaaatatattaaaacacacctttcaggaacttgctcctgaagacagtcctgtccacatgaacctcctgttttgctgggaaatcttttaaatacagtattgctatttgacacatttaacaataaatacttaccaagtttaattttaatcatagggaatgtaatttgaggttacatcagagctacaaggtaaattagcttcctatttttcaaagcctgctcaaattgtgtggaatttcaaaaaagtattttaaaaaggatgcaaaatatggaaatatttatttatttatttattattttttgagagggagtctcactctgtcacccaggctggagtgccatgggtgacgctgcaacctccgtcttccgggttcaaaccattctcctgccttagcctcttgagtagctggggctaccggcgcccaccgctcacgcccggcctatggaaacatttaacactttcaaagtagttgggaaatacctgaacccaggatattgaggtctcaagctcactatttacaaaagctttacaaagctaaattgtgagttaatcggttcattctaggtacaagatagtttcttacttttaataataaattactttacttcgttatatttattaaatgcagagatgtgtgtgagagttggtataaaatagtaagaccacgataggctacatactatgccaggcccactacaaaatgaaaatgcagagacccttgttcaaattcaagagtgcaacagcagcgcgttagtccttttaagtgcgggccctctgtgacttcacagatcgcacgcccgtgaagccagccctgcccagagtcccttttcattcactgggtcctcctccctcgcgtcacagtcctggggtgcggggatgctggcgttgctgtcacactgccgagctttaggtcaaactctcagcaccgcgactagttaccctgaaatcactggggcccggtattacaaaacagaacacactttcctctttcttcccctttatttaaaagagatgataggctttacgagttatttttaatagaaattttttacaatgaaaagaattcgggcgtactgtttgcaaactgcagcagacaggtctgagcgccccagaaggcggccggccccagcctgggagcctgcggggaccactccctgctgccctggcgcatgtcctccagggacacgggccaccgttgcccctggaaaccctgggggacaggctccctcctgggcgacctttccacgtttctttcgccccccccggagcggcacctccatacctcccgggccgctagtcccccgaagcaggccccagccccggcgcaagctgcctcctccgcagtccccgcccgccgccagcccggccaccgccggacggcgcccttcccagccccgcgccccgctccccagccctcctcgcgcgtccgagcccacgtcgcttgccccggctgccaagtcttccagacggccgggccctcccggcacagcgcgggaaccccggcccccggccccacgggacgagggctacagggcccggccggcgagccagggcaccccggggtctccaggcggcccaccgccctcaccccccaccggcgtccccaagcccccagaccgtccccgccgcgccctcagcgccgccgcccccgggccggccgaggctccgcggcgagtcccgcccagcgccccggaggcgccagccccacggcccgagcgtgcgcagcgccccccgcggccgcgccaagcgcaggcgacggcacaggaaaggaggccgcggcgcgcccggcccggccccctccccagcccgcccccggggccgctggcggtgtccgcgcctccgcgcccgcccctgatttcctccgggcggcggcggcggcggcggcgcctcgtgcgcgcggttatttatttccgggccccagagcgcttataatggagccgctgtcagcagaaccttctgccgccgccgccgccgccgccgtccctcctcttttttttcccggcagatctttgttgtgtgggagggcagcagggatggacttgagcttgcggatcccctgctagagcagccgcgctcggagaaggcgccgcagccgcgaggaggagccgccgccgccgcgcccgaggcccc

SEQ ID NO: 33353 - DNA, 2300 bp, Homo sapien
tgtgcatctgccttcaggaatgaatgtgaagcttctccaaaggcagtcctgaaagagaggaccccagaaaataactgaacaggaaatagatacagaatgaatctttacgaagcaggctgggcctgaaggcaaccttaagcatttacatggcaaagagagccatcaaaagttcagtaaactgatcaaaaatgcacaaacaatggggattctacatgtaggctttatttttaaaagaactagtttcttctgtgttccagctctaggaataagcctgtgactaaaataaattctgccaataatgttgacttttgaataccaaaaagttttgaaaaaatgcccttggatataaaattagacgaaagaaaacacacaaaggcccattctaagtgtgcatgtatttttccgtttcctcccaccccctgcagtaaacttatattgagtagttcatttaatagaagacttcttgaaaaccacagaccatgtggtaaggtttgttttacatgggtcactaatgtggaaagctttgataccttatgttgaaagtagagcagtcaattaattccatgagtgtgaacttggcatagtatccaatttacccttaggggaaaactgccaggatccaaatactggtttctaaataaaatactcagttctctgacttcaagctaaagcatgttgctttaattcatgaagcatgaactgaaaattctgtcttttttctgttctcttgttttccttaaaggaatcctgggcataacttgactgcagaaggataggaattctgcttcttcattctctgtagaaaaatgcatgctcattttgctcgcattctgtattagtcagtatattatgggttatgcttcagtaacaaacaattccaaaatcttagtagcctgaagcaaagatttatttctccttcacactgtataaataacagaggttggtagtcatttttgattctgcataatggcttgtgatccatgctgatggaacagccacatttcaaatgttgcttatgttcatgccagaaaggaaaaaaaacattctggaggatgcaaaacttgcaaataaatgctccagttctcaccccattggccagtactagtatcatggccccactaaagcataacagggccccaaattcaatctttataagctcagaaggagaggataactggatttaggggaggtgtcccaatgattaccacagggacattgcagaaaaccaactggaaccacacaaatagacaccaggccctgctgccttgcttgttgtcatgctagacccctattaacttcgttagagatggtaccaccttctagaggatgaagaagagacctggagccaacaaagaagacatagggttcattgaggagacttacatacagggcagttcagtggcggcaggctggacaggagaaccacaaccacttgtaaaaagcatgtaatttatacagcattttcacttagcaccctccccctagcaacctccgcctggccactttcatttaaccccaacaacaggcctagatcccctgtacagcctgcatttcacaagatgagctagggattcagatgctcctcatagataaggaatgaaactctgggttggctactcccagattccttagctgggaactctgaacacacagtcttcttagaccacagggccactctcagggtatgcttcagttaagttattgctgtcagatgtgtctgctccatgcctagggaggattctactactctgcaaagtctccaggcacttttctttcatctccatcaattaatccttatttcctcttttgctcattgtagaatcctctttttaagcgctaaacaagtggtccttacacatgggtgcacattataatcacctggggaagttttaaagcatcataacccccagaccccacccaaaaccaattaaatcagaatcatttgggtatgggagcagcatccagtcatcagcactttttaaatctccccaggtgagtcaaatgtgtgacagagttgaaaaatactgttttaatgccttaaattaataacctgattatggccttcatttcagtattaaccttttgggagaggccttacggggaaaacaccaagtccctggacaaggggaagacaccaaatccctggactcaggcctcacatgattgagtgagaggaactctgctgtcagaccctacaatgcactcttcagtggaagaggatcacacattccaaacatactccatcaggtgacagcccttgcttttcttccaactaccataccaaactgccagaaaatgtc

SEQ ID NO: 33354 - DNA, 2300 bp, Homo sapien
attgcaagggagagactaagaccgtcagggaaataatagcatataaaaagcaaattgtcaactgtacatcaaacttcaagaagagcttcctttgttctactactttacacccagtttattttcaaatatgcctccaaaatgatcagatccagggtaagttccctgcatggtgacagaagaatcacaaagaccatgctatactttgaatatttgtccaccccaaaactcatgttgagatttaatccccaatgtggcaattttgagaggtgggacctttaagaggtgattgggtcatgagggctctgcctcccgaatggatgaatccattcatggattaatggattaatgggttaatggatttacgggttatcacaggagtggggctggtggctttagaagaagaggaagagagacctgaactagcacgctcagctacctcactgtgtggtgccccgtgtgctgcctccaccagcaggaaggctcccgtcagatgtgccccttgagcttggatctttcagcctccaaaaaaataatttcttttctttgtaaattacccagtttcaggaattctgttataagctacagaaaactaatacagaccaggtgagcagaaattcgcttttgcatgaagataaagtagacgtcagctcctttctagattggatttatgctttcaggtagaatctgaaataactcactcttccaaatttttgatatctctaccttctttagggcctatgacacaggttttagatataatttgacagacatttaggaagcacatattattggccagtgtgctggattctagatattaaaagatgaattaaaatagtctttcatctctttggacctggacagtggaaaaatcagcacaatacaaaacatttgatcccattcttgaaaatagattattatttttttctttcagtacatgatatctagatttaaaaatcttgaaatatggatgttttatcccgttgttacaaaggaaaattgtagtaaataaaggaaattacccaaatagaatctataagaagttaaatcactaagaatttctgcatgtggtcacaagccttttaagaaatacgtaattacaaaacgcctggttctgtattcacgcatcatatgcatatatctatgtatgtatatctctatatacgcatatttatgtatgtatgcatcaatatacacttttaatttaatttgcaacatctaacatctacaaggaaaaactgctctgtgcttgcctcactacaaagaaatttgcacggtgagtgccctggtctttattaggatgtaatgttataaaattctaggtatttacatgaaaagggaataaaacattaaggagaatttcctttttctgtttaatgcagcgaacaccaaagggccattttaaagctgtagaagtgtcacataaatttccaaaagaggctataatgttttaaacaaaggataacaccaaccacaagaaaaaaaaaaatcacagaaacgaggagaaaatacatttcctggctctgaagctgttaaacattctgagccaggaaacctccttcaccggggcggggcagggaaagtctggctctcctgggaccgactccctgctaagtcgccccaagttttccctccctctgtcttccattttccgccccagtctccaaacagggaagtcacaggagaatgccaacgcatacacctgaaaggtgtcagaattagacacggatgcgtgtttattttaaatgcccacgcacttaaaataggctgtacttgcagacaaactcaagggattccaaacgacgcctggaagttcatcttatagattgggggccaagcctgtaaaagaacaacagtaaaacagagccaacaggacgttgcttcgctccgaagggttcgcgcgtagcgcgctgagccggtgcccaggctggggcctggagccgcagccccgaaaaggcgcgctgcccctttaaaaggccgcgcatctccgggccggccttcctccccggggctccagctgtgattgacgctgggcggcgagaggaggcgcctggcgctaacaaaagtccggcccgcgggcgagctgcgccgggtcgctagtcttcactcgctccggggacccgcaacaagtggccgccgcgccctccccggggaagccgcgggcgcgcaggggcagccgaaggaggcggtcgagccgcggagcccaggggcctgcccggctcagcgcccaccggaggggatcggggcgggcggatggggacccggcggcggcggcgcggtgagcctctgggcggccccggggc

SEQ ID NO: 33355 - DNA, 2300 bp, Homo sapien
ttcaggtcttttgtttttgcccctccacttaatttaggcttagctagtacatacacttagtttaatagtattaatctactcagaagatatttaaaaagacacatgtacacccaaaaacaatctcatgcagcccacatcacctaaagcatctcagaaccaaatgcttggtgcttttttcttcacaatacctgctatcatagattatccagatccctgctcattccttttttttttttttttttttgagagggagtcttgctctgtcgcccaggctggagtgcagtggcgcgatctcggctcactgcaagctctgcctcccaggttcacaccattctcctgcctcagcctcatgagtagctgggactacaggcacccgccaccacgcccgactaattttttgtatgtttagtagagacagggttttatcatgttagccaggatggtctcgatcacctgacctcgagatccgcccgcctcggcctcccaaagtgctgggattacaggcgtgagccaccacgcccgcccggccccctgctcatttctaataacaacgatacctgaaaactcacaataaataaaaatgagtaacacttttacattggcccagaattttaagatctctactgttgaaatttagttacctaagatgtaacagaaacttttgtttgtattcctgtccccctgccctccccaacccccgaactaagtcacgcatcaactgtaataactggaactggcttctctttgacagtgtggaagcgacagtatttctaattccctgtcttccagagagctcagagatagttttgcaaagcttgggaaaggagccagctctttcttgtcttgacaagagaagaaacacatgtattttcatgcaaaggcttgcaatccgtaattttcaatcttcgagttgcactttatgtagctgccttaattattttctatattcaattgtcagataattctttagtctcatttccccatgaatagttacaaaattccaacgtttacatctttacaatagatggcatagtattgaatttagattctagtaaaaagatactaatacattttcagttcacagcagaaaacaagccccacagggagcaatagtctagctcacaaattcaactttcaacgagaaaaaaagagaaatctccactaaacttacgaccatgtaaaagatcaataagtaattagaacactttcatagcatagtgaatccttgcatttccttagtcatttgaaaatatgatcgttagtgggtgcagcgcaccagcatggcacatgtatacatatgtaactaacctgcacaatgtgcacatgtaccctaaaacttagagtataataaaaaaaaaaattaataaaaaaaaacattaaaaaaaaaaagaaaatatgatccactgttgttgaaaatctttacaacaatttcttttaacataaagttttgtgtaaagcacttactatatccaaggcactaagtgccaaacaaatgtaaactcataaattccacattcccattaacatttttaaatgcttggaaaaaccagtgacccaaggatatagagaaacattttattctttctatattatcaaatatagagagaaagaacacgtaaagagacttagtacacttaaacattgtttaatttctctgctaagggtctctctgcagcacgctgggctctgattctaaaggtcaccttatattgacctgggatacatttcgcatgggtagttccctgggcctactacagtctaagttcataatctcttctttaaagaccccagagcccctttctagggcagggcttttccagtgaatggacccaatattaaatagcacaaagactggcgtttcggtgggtccctgagtgcgggaggcaggacttttatggtggagtaacatgggcctaattctagagtgatcatcttagttttcagaacttgtcatacttcttttttttttaatagaaagctccattttaatgcaaagttaataataatgttttggaaattcagttgtggagtagaattcaagcaaactgaaatacttgtggaaaatccttctaggtcggtggggaggagccaagatggccaaataggaacagctccggtctacagctcccagcgtgagcgacgcagaagacgggtgatttctgcatttccatctgaggtaccgggttcatctcactagggagtgccagacagtgggcgcaggccagtgtgtgtgcgcaccgtgcgcgagccgaagcagggcgaggcattgcctcacctgggaagcgcaaggggtcagggag

SEQ ID NO: 33356 - DNA, 2300 bp, Homo sapien
tgggggaaagctgtactattaaatctctttaataacttttaagtggatggtcagatgcatttcctctgcagttattcttaatcattgctaaagaagaaacgcatggcatcccagaaagcggcattatgcttttttttctaaatgtagcatcataaatattgtcttagggcactatattcctgaaagcctgtatattcttatgcaatttccttacttttaaaaacattacacctaatcttttctcagaccacacatttgtaagggacatatgctatcatttcctctgcatgattactctcatataagtttgcatgcacctacaatggtgtttataattttagaattgtgttgctgtcaaaatataaattgttggcataatagcctttctttcaaagtccattcctatttctcttgtaaaaactatcacatgcttttcacatccgtgagattaagtcacccaaatttgcagtaaggaaagactctgccctttctggttgtgatatgacatctgtctcaagatacatctgtagaaaacggacttcaccttacatctgacaggtttgcttctaagcataaaccaaaatccatcgaataattcacaaaagccgcttttggcattatcactaaagcacctgaggaacatgtagctcctaagccaggaaggaaaaaggaagtgtagatgaaattaaacccagtattcaccactgggacatttctatttgccttcacaggaagggaaaggggaaggcatattggagccagcgctcacagggcagaaccagacgagcctcactggaggcaaactgggaggtaggcgtgcgctgtccgtggtgctgaaagcttgaccggcgcgagctggagccgccaccggctgcctcggggtctcgccgggccttacctgctccgcgccctggaagcagatcttgcagatgggctggtggtgctggtgctggtgcccagcgcgctggtcgccgccgccactgctgctgctgcggctgctgcacaccgagcgcgtctcgggctggtctccggcgccccgccgctcgcgctcgccgcccgcgccggcctcagactccccggggccgcctttcgctgctgccgcctccgggaggcgcctcggaccttccccggagtcgccggccgccgccacttcctggccggcgggctgcaggggcaggggcggaggcggcagctcgtccgctcccctgcaccgcggggccacctcccctagcggctcgcttggccccgcggcgcgctcgggggtctcgggggacgcgggcagcggcggcaggtagcgcggggccgcggggaccggggccggctctcccggcggcggcgtcggcggcggcggcgggggaggttgcgggggaggctcggcgtccccgctctccgccccgcgacaccgactgccgccgtggccgccctcaaagctcatggttgtgccgccgccgccctcctgccggcccggctggcgggccgggctctggctgcagggaaagagagcgcggagggggcgggagggagaggggaaaaggagggagggggcccggacgcctggggctagggggcgggacggggaggggatgcggaaggttctgcagctgcggcggcggcaggcgcggccgttcggtggagccgccggctcggctctgatggaggcggcgccgaattcggctgcgcgtgagagccgcgccgcggaagggggggccggagaagcgagggggcgggagggaggagcggcgcggcgggggtgacggggcgcgggcgcggggtgggctgggggcgcggatcagtgggacggagttcggggttcggctccgagcgggcgggctggaagtgggggatccctcagccgcctccacgggccggccccgcgctcacgtcggttccggggcggatgacccctctccaaacggcgcagcgctgcggctctcgtgagctgggaagtagggggcaggggagaggccgcgggtccagaaaccgttactggatgggccggtgggatgtggcgcgggccgggtggggcgcgacagtctgagccgagacccgcgtgggcttaagggtgcgcgaggcgggtgccctgggcgcgcccgaactggctgagcagtggagcgggaaagggcgcgggacccgggactgtaaccgccacttccaggccctcgctccccgcgcttggagccctcaagggcactctcagggatcctcgagagccttaaaacagaagtctctggaacctgtgtcctctccctgtctgtcccgccctcgaatccctgtgtcctcctcacccgctccctcctgca

SEQ ID NO: 33357 - DNA, 2300 bp, Homo sapien
gaacttatgaagaaggtttatgatgatcataaggcttatgattatcttgactgtggcaatacacaaacttgcgttgtcattctgacaggtgaagaccaaaaatgaaagcatatcgacaaccacatttcttcaacgtggtaagttcctggagattgttgttttaaaaatgtgcttgctgcctgccactctgccaccaaaaatagccagtctgaaggggctaagtgttagaggacattcctggaaactagttcatcagagaccatttgtgacaaaacattcttgaattatttttcactaccttctctctctggcaaatggaaccaatttctgtcaaaagaggtaggtcttctttatgaatcaaatatacttcttactgccaaaacgtgaaatggaaaaacgaacttaagctagtagtttatctcagccattacagagtatctattagtgggaatcaatggcgccaaacacacaatgtactacaatactattttaggaggcagaagaaaggattggaagaaaaaattattggcatttgaaccagaaaatctggtcagggaacacagaagttctttgttaatagttctataaccttgaacaagttattttgcctttctgatcctgggtcttcggctatgaaacgctgccaaaaatgactgctctgtgtctttgtgtcaaagactgaaagcgtcacatcagtgaaaattcggatagacacactgccgcatataaatccggtgctttatgatctcacactgcacggatttggaaactactgcatgtgcacgattctcagcctagttccctgcaggtgagggatttttttttttttccagaaagaaaactgttagctctgccctgaagatgagtcccacagaggttttgcagggtggagttaccgagaaattgacttcggggtgagtaaaactaagatccggggaaggctgcagccacttttccagggtaaggggcggtgtcatttgcttcctcatgcggcaacgacgaaagtgattataagccacagaacgtggcgccagggttcactagtataaaccatttcaggagacgaagctccgacctcccaggcaccaagatctttaccaacaacccgggatgctcactgcaggagggagcgggtgaggaggacacagggattcgagggcgggacagacagggagaggacacaggttccagagacttctgttttaaggctctcgaggatccctgagagtgcccttgagggctccaagcgcggggagcgagggcctggaagtggcggttacagtcccgggtcccgcgccctttcccgctccactgctcagccagttcgggcgcgcccagggcacccgcctcgcgcacccttaagcccacgcgggtctcggctcagactgtcgcgccccacccggcccgcgccacatcccaccggcccatccagtaacggtttctggacccgcggcctctcccctgccccctacttcccagctcacgagagccgcagcgctgcgccgtttggagaggggtcatccgccccggaaccgacgtgagcgcggggccggcccgtggaggcggctgagggatcccccacttccagcccgcccgctcggagccgaaccccgaactccgtcccactgatccgcgcccccagcccaccccgcgcccgcgccccgtcacccccgccgcgccgctcctccctcccgccccctcgcttctccggcccccccttccgcggcgcggctctcacgcgcagccgaattcggcgccgcctccatcagagccgagccggcggctccaccgaacggccgcgcctgccgccgccgcagctgcagaaccttccgcatcccctccccgtcccgccccctagccccaggcgtccgggccccctccctccttttcccctctccctcccgccccctccgcgctctctttccctgcagccagagcccggcccgccagccgggccggcaggagggcggcggcggcacaaccatgagctttgagggcggccacggcggcagtcggtgtcgcggggcggagagcggggacgccgagcctcccccgcaacctcccccgccgccgccgccgacgccgccgccgggagagccggccccggtccccgcggccccgcgctacctgccgccgctgcccgcgtcccccgagacccccgagcgcgccgcggggccaagcgagccgctaggggaggtggccccgcggtgcaggggagcggacgagctgccgcctccgcccctgcccctgcagcccgccggccaggaagtggcggcggccggcgactccggggaaggtcc

SEQ ID NO: 33358 - DNA, 2300 bp, Homo sapien
caccaagctagggattgtgcccacgccctttcatttcatcctttcaactccatgagcaagaagcagacatctaaggatctagagagatctttgcctagtatctgccttgcaatcaactttagaggacctcagggttggagcagtggcttctggctttctgattatggctgttgcctgcaatttaaagtcctaatgttcattttgtttgaagagggatggaggaggagttagacacatggaatgtgtgtgtgtgtgtgtgtgtgtgtgtgtgtgtgtgtgtgtgtgtgtgtgtgtgtttcaagatgaactcaatagcatcaacaaataatgagggttcagaaagtttatatttaacttgttgaaaatccacctagctatgagcctaatttcctgaagaataaatgtaaggtgagatgatatgttttggataccaataagatccagtacctgctacgtttatagggatagaaattgaacaaatggcaacatttcaaaatctgccaaaaagagccccaactgattgttttcatgtttataatctccaacttacagaatttcacagaggaacaagccgtaaagttgcctgaagataagtcctggctatgaattaatgttgaacaacatgaaaagattacaggtacttggaaataaacttctgaggaactcatcagaatttcaaattatgcaagtattatgataatacttgagaatctcaaaatcatttcaactatcaatttctgtgggattttataataatttgcagcttcaatgacaaaataatttaaaatgatgttttctaactctacctacacaattattctgactttataggaaataaattacatttatttggacatctgtacatgtcacacacattaataggtattttgttgattccaacttaaatacttacatatttcaaaattgtaacctctttaagtttgtcactgtcacaaacttggcttcatggtacttcaaatgtcctctccccagccaaaaagcagaaaatgttgtctgttaaaaggcagggaagtagaaaaataactttttataatacctgtctccagttaagtagatatggctgctctagtgagttgagaggacttgatttttctcctttctcctcccctcccctcctctccccttcccttcttccttccttacgttcttccttccttctcttcttccttccttcctttattctttccttcctctttcttgttattttacccttcaaaagtgggttttaaagtttctatatacaataaatcactgctactttattgcgtttatcatctagaattccttcaggaaccacaattacaatcgcaacaattagttgaacccaaggcttctcccaggattcctggtaactagggtgtgtcagtaaagctgggctcatggatgcctatctgacacgcttactgtggacatgaactcaaccactgcacatgcttgtagtggatgcggtggtgtgcagccccgatctcccctccaggactcaggcactcattcgcccagctgccaggagtgctggcttttgttgtctcacaaatgagtctgtctttgggaatccctcccttagcagaagagagctgccctgcccaaggccctaccccttctgcagttggggtttggggggcagcacgcatcctgtggctggctggccccttgccttgtctagacaactctgacagcagtccatgggattgctgaaggcctttactgcaacagaatcataattcaatttctccctctatggaatcctttttctcttctttatgggtattgatcctaaaagcactccccagtaaaagtcctgcatgtatatctccacctcagaccctatttctcaggtaagcattcctaaaaccactggtgctaggaatggtccgaggaaggagactctaaaatggaatctggaactgggtcaccagctgaccagccagcagggaggacaccataactaggggtgggtgggtggattacctacagcccctggcaggctgtaactatgcaattgttgcaacagtcactgtgatgtaactgctggaaggcaatgcattggtaagtctagtatccgagatatctaggggtccaggggaagtggtaattgtaagtacaatagaattggatggctgtttctgagtgctataaaatgaattagagaaaggggatgaaaggatacaatgattaattaccaatttaaggctaagtgtgaaagccagagggcctatggcagtttataaagagcttctcatctcccgcagccagaagtagaaaaaagccaggatcaagcc

SEQ ID NO: 33359 - DNA, 2300 bp, Homo sapien
cttcccacttcctggtattcatgcccttatgttaacccttctcacattaaatagggctgacctgcaaaagtaacaacacattgtggaaacgactgtgtgacttccaatgctaggtctatgaatttcatgtggctctctgctgcactcaagcagccctatggagaggcctacttgtcaaggaaccaaaacctcttgctatcagctatgtaaatgaaccatctttaagggagactctccagccacagtcaaatacagtcagatcttcagatgattttagccctggacagcatgttcactgcaacctcttaggagatcttagtcagaaccacccagctgagtcactcaaatacctgacatacagaaactgaaataaagcttgatgctaaatttgggggtaatttaatacagagtagtagataactaatacagtactggagaaaagttatgcctggtaaggacttaggaaggtaggcactatttttggtaagtggatttggataagcctctcttacaaaggcatttgggcagagatccaaaaaataaggaagcaagccagcaaaaggatgttccaagcagaagagtaatggatttctgactttctgacttagtaccaactaaagtgcttgttagaagaacatcaaatgtgtcattgcgactcaagtagggtgagcagggtagagaagggggtgtggcaggacctcagagggaggggtagagcctcggagaatagaaagtaaggtgtttgaatttgattgagtcaagggaaggcactggaaggttttttaaagcgccatcttcttttggttttctcttggcagcctggattctgagcatgcaacattcgactctaacaaggctgactctggttcaaccaggctgtgtggatgaaatctacgacctccccaagcatttgaagttcatgttttctttttcttttgagatggaatcttgctctgttgcccaggctggagtgcagtggcgcgatctcggctcaccacaacctccgcctcccgggttcaagcgattctcctgcctcaacctcccaagtagctgggattacaggtctgcgccactgcgccgggactaatttttgtattttttagcagagactgggtttcgccatgttggccaggctggtcttgaacccctgacctcagatgatccgcccgcctcggcctcgcaaagtgctgggattacgggcgtgagccaccgcgcctggcctgaagttcttttctacagaactttgctgtcctatatacatgagggtacacagccaactgggcacctggcacgggtctagtccaaattgagatgggctgttaactctaaaacacacactggatttccaagacttagaaccaacgacagagcgtaaaagatctaattaattcttttagactgattacatgctgaaatgacaggatgggctaaattaaacacattaaaagcagtttcaccgatttctctttactctttaaaaatgtggctgctattagaattacctacgtggcttggactgtgtgtctacagggagctcctctcgcgcactctgtgcactcaaattccgccggtgtcctccgccggaagggccgcctcagaaaggccgagcccccggcctggcttctccggtttcccgggaaagcgttgcaaccacgggcgagggctccgaggtcggccccgaggggtaagggcagcccttgccttcgcgacatccattcacccggctccgcaggtgcagcgcgcggtcctcagagaaaccccgaccctcgcgtcgctgacccgaccattcattaatcgggggcttcccagggcccaggagcagcctcgggcgccccactcccccattctcgcgtagccgtccccttgaccgcgtcacaccgagcggcacaaccaccagggaaggtaactgggagggcgcgacctccctcaatcaacagccacctcgggctgactgagcggacccaggtccctttcagccacagcgttccctcggcttcctgggcctcacggcggcggaggcgtggccacagcctgagaggcgggtttcctgtccagttgtgaataacttccgacgtgtgccggaagtttcctcagtgacaatcaggaagtcggcgtgtcgagtggctcttcctggctgctgaggcgggttaaggtctgagggtcttgtggggccacggcgctgatcaccaggtgtttggcttggtcggttcttatttctcgcctggcaatggcgacgtacacctgcataacttgccgggtggcgttccgcgacgcggacatgcagcgggcccactataaga

SEQ ID NO: 33360 - DNA, 2300 bp, Homo sapien
gaggtgggtgggggcagggagaagaggcaggagactggaaggaaggttgaataaaaccatgagaaaacttcatgtctactggtagacatgttcactatcttgattatggtgatggcttcttagttgtatgcatatgtcaaaatttatcaaattgtacactttaaatacatgtattttattatacatcaatgaccacccaaaaatgttattaaaaagtatggattttcttcacctgaaaactatgatctggcactgctacctttcgatggggcaggcactctccacttaacatacccccatattttccaatttttcttacaatggactttaaaatttacatacaatttcttggcctctagagacatttgagtttgtagctcttattttaaaatataatacgggacacttcctaaaacgaacaaagaaataaatattgggaatacaatacttagagtgtggcaatctttgcttctttttgtattcttaatgcataatgcaaatggcaaatggtcagagctcaaatccattctccccaaaagaagtcatatataacatcagcctcatgatgacattgtttaggaggtaaaggagaagaggactggggaatgaaagaataatttgggcaaggcattattcagatggtttgcattgatttcatttatgcttcacaacaaccccaagaaataatgttactatcctaatattattgatgagaggctaataactttcccatggtgaaatggcattgaataaacacagttaaaccaggactgttgtctggaaggcatgtaatttttctataaattttgagaataaaaggattgaaaggagggagttgatctaactgcacctggaaacaatgactgtgagcattgtgtaagtgtgggtatgcatgtgtgtgtttgtgggtggtggtagaaaatgtttaccttacagaaaaagaatagaaattataaacttgtgtaagtgtgggatgcatgtgtgtgtttgtgggtggtggcagaaaatgtttaccttacagaaaaagaatagaaattataaacttatttcacaatggcatttcccttaaaaaaacttaagtttttcagtaaagaaatgtagtattttgtgaaatactgaaatgtacgtagccttttgaaaggaaaggcattttacctctgctctctttcttctttcagtactgtgtgcatttttgtgtccattgtttaaatgtaatgatattggacaaaaaatttacagcaaaattaagtcagttctgctgaaactggattttggaattggagaatatattaatcagaagaaacgtgagagatctggtaggtaaagtttatattttagattctatgcatgaaatgagacattagcgagctatttttaggaaattctttaatacatttgaggatacttttagctttttactaaatattattatagaagctaatctccctcaaagttatatatatccttttcctatttgggctttccttcttttctcaaatatacaattaaataaattgactttttaatccacagtgtcaggggagaaagaaaaggcttcaacactctttattgtgctacttatgatttacttagttttattttgggttggactatcacaaagaaaaagaaaatacaggaaaagccaatataatcatctcttactttttaacttggcttatgaccttataggttctcaaactagaatgtatcggagtcacgtggagggcttattaaaggacagattgctaggccccagcccagagtttctgattcagtaggtctagggtagggcctgagaatctgcatttctaaaaagttcccagggaggatgcttttgctgtttcagggacaatattaagagagccactaatgtggatcatttcctttgcaaatatgtgaagcttgttatgtgcaaacatttaattatatttgtagttaagaatatgagaaatatatatttgtatttggagaatatgagaaatgtggggtaagaatacataatgaaataaatgcactatgtctgagttggctaggaaactgaaagcttccaaattttttcctcaacagaagcagacaaagaaaaaagtcacaaagatgacagtgaattagacttttcagctctttgtcctaaggtattttttgtttagttttcaatttgttcctgtgtggtttgactgtaaatgcatgtatgcatacaaagctgaatgatcttcctaataaactcctcatatttctgtaagatgactgaatgatttcaaaataaaaatatccatttggtttttattactctgtcattttgg

SEQ ID NO: 33361 - DNA, 2300 bp, Homo sapien
agctcaggagaaagaaaaggtaaaattcatgggttagaatgatcagagctgaaagttagataagagaattagccttttgtgttgattaggttttttttttttttttttttttttgttgttgttgttgttcttgttgttttttcgagacaggttctcactctgtcacctagactggagtgcagtggtgcaatctaggcttacagcaacctccgcctcccaggctcaagtgattcttctgcctcagcctcccgagtagctgggattacaggcatgcgtcaccacgctcggctaatttttgtatttttagtagagacagggtttcactatattggccaggctggtctcgaactcctaacctcgggtgatctgcctgcctcggcctcccaaagtgctaggattacaggtgtgagccaccacccccagccgataagattttgtacaagtgccaaaatattatcattgataatattttcagcatttcaacttttcagttatttaaaaacctggaatttctaatagtatagcacattgccctgcctctgacaggctctcgcacaccccgaccttcagagctcagcctatgactgttttctttcaagtccctggtatttcagttgtgtgtctgagtaaccacacccagttcatcttagactttgaagtgtctaaaatgttaggtcttgcgtaaaatatgaaatgccttaaggaattgttaattgtgagatgcatacatcacaaaataactaacactatccaaaagaaagcagatattatttgttttgacatttctttaatgtggtagaaagtcactttcacacatacaaatggtaaaatatacattaaatatagataacatgctaggattagctataacataacaacagaatacacagatttttatttttttatttttaaaatttattttattattagctttttaaagaaacagggtcttgctctgtcacccaggctggagtgcagtggcacgatcttggctcactgcagcctccacctctggggctcaagcaattctctcactccagcctcccaagtttctgggaccacaggagcatcccatcaggcccggctaattttatttttggtagagatggggtctcattgtgttgcccaggctggtcttgaactcctgggctcaaatgatcctcctacctcagcttcccacagtgctaggattacaggcgtgagccacagcacctggcaacacattttgaaaataatattgtttcttaataagcagatcttactttctgccatccctaacattcctagtcaagaaaaaaaaaatggcttcaactttttgtccaaagctttcaggatatattcctaaagaaatctcagtaatatttcttctggcctttttgagagcaagatttgaagggatttttgtcgtactcttttaaaaaagcaaatgagggatggctctcttcagtgacaagccaaactatgaaaacatccagacccacaatccttcctgtgccagtgtcaggctgcccctaaggacagggaagtcctggggagaaagcgttttgcccagatgaacacgtgaactcaacattcgtgtgcatgcttccggtgagttgagaaatctagatgacccgaaaagattttcttgcaaagcaatatccctcaaaaccccattgcataatggcttttgttttaaacctttttgagtaagggatctttttgccgagtggctaggcgttctccaaacaaaacccccaaccctcacaggtacagcctgttttgctgtctgctctccaactccctcctgtgacttgaaggaggagatttgatagcccagggtgatgtttcaacctcctgtggccactccacccttaggtgggtgcctagtcatgccagaaaaaaaaaaaaaaaagccgggggaagaaaaagggcaggcgggcctaggtgaagtcatccaatgaaggttactggctgagcggggacaccttctcacaggactggagagagaatgcggggcagctgggcagggctcacttccagccgcctgtcacagtactgggagtaagaggtgacctatttatttttagaagggggcagtgataataacccagctcctagcttcattcaagggaggcaggcgctttggaagtttgtaaacaccaactttctgagtaagggaggagcactttttttccaaaaaggaaagaacgtctctactgggtttttttcctcctgatattcagcattagagtagaaaagaaactattgtttggccacattagccgtggttagcaggtgctgcagcctttgccactgtt

SEQ ID NO: 33362 - DNA, 2300 bp, Homo sapien
agatcatttgagaagaaatacattatttaaagaaaacgtaatgtccttgaaaatcattttaacccccagagcaacaaataaaagggaaaaaaaaacaaaattttaatgacattaataaatgggtcataaattccaatgaattataatgcaaaagcaacaagtaattctgaacttaaagaacaggacagtcatttttgtcaaagaaaatacatgcatggaatgcagatgccacaaacaggagatgaaataaaacagataaggagaaggctgtatctaggctgaatggctggccaatgttttcctctccgtcagtataaataaaatggatggaagaaaacacccctggatactatcaaatatgcctttcaattattttatgcaaaaacattattttcaataggtgtcattaaagaaaacatcatagaaaaaagtttgcaactcatgttacagaaattaggctaaagtctttaatataaaaacagctcctataaatcaataaggaaaagaacactggcctacttgaaaaaatagacaaaggttatttataaacaaacaatgctgataaatggtaaatgtggtagttcttaaacataagataaaatgctcaatcacagagaactgcaaaataaaatcattttgggatagtctttttcacctatcagatttgcaggatcaaaaagtttcataaaatattcttcgcaagagtgtggcaaagcaggcagtcatacacattgctggtgggagtataaattgttagaaccctaaggagctgcatgcaatatggtgacagccatcaaaattacaagtgcacatgccctctgacccagcaattccacttctgggaagttctctaaaatacttgcatatatgcaaaatgatgcatgtacagggtcattagctataatgctgaaatagcaaaagcttggaaacattactgcctcagtaggagacaggttaagtaatttgagacatccttacaatagaattctgaagcagctgaaaaagaacaaggaagcaatcaccaagaaatactaggaaaaggaagagctcatatgttattccacaatttgcatagaatatggtgtatttgctgaaatgtgcactatctggaaagagacacaggaaactagcaacattgctggcctccgtgaggaaactgggcggccagggactgggatgagaaagagattttcaaaatgcttacccttttgtacctttaaacttttgcactgtgagactgtattagttttttaaagaaataaaatttaaaattaagaaataaaatgttaaggccgggcgcagtagctcacgcttgtaatcccagcactttgggaggccgaggcggacggatcacgaggtcaggagatcgagaccatcctggctaacacggtgaaaccccgtctctactaaaaaaaatacaaaaaactggccaggcgtggtggcgggcgcctgtagtcccagctactcgggaggctgaggcaggagaatggcgtgaacccgggaggcagagcttgcagcgagccgagatcgcgccactgcactccagcctgggcgacagagtgagactccatctcaaaaaaaaaaaaaaaagaaagaaagaaagaaaagaaaaagaaataaaatgttaaaaacatcgtaaacattagtgagacacagccctaagactattagactattgcccaatctagcataagacaatatgtccttcttatttgagtgctcgcattcactccataataagatagatttggaataaactctattccaaacacagatacctaagagatccaaagttaattcactttcagggacctccgacaagatacagctagttttaagagaaaacaccaggactagcagagatctgaggaaaatattcatcttgctcaagttaacctagaaaatgacaggctgtctattttgtgcaatttatttatttctcaactttaaggttcagaaatctctgtcctgtaacaaggtatctgttaccggagtctgattattctgcactgtgtaggtcatgtttgttatgaggacacttagcaaacaaagaaggtttttctccgccctcaatagcgtggtaacggatgacaggacaccactttcaacgaaggagacagacatttccctggcctttctgaagagcgctttttggagagacaaacctgttgctcaggggctgagcattcccgtgtgttctccctgtacttcacctaaaaatatgcctgttttccacactgtgcacacccgggggtgggtgctgggcatactccacctgcttgtttgcctcccgttttctc

SEQ ID NO: 33363 - DNA, 2300 bp, Homo sapien
aagcgccaaacaaaggccaaatgacacaataaaagcatcatttatctttcaaaaacttctccgctactgccaagagggaggacccacacctgggaaaagattgtctctcttatatggaagaaacctgaattgtttccacgttgctttttccttgacacccaggccactttccatcgggttgtcaggatactcctaagaaggggagtcggaaatgccagatgttctgtatcacctttagttaaaaaccaagcctcctgttactagagaccattcaatgtccactattccctttggtgagttacttaaggaactgtgcgtctccacctgcaaccccatgcctcctctcctgttgaattcccaacagcagttattgcccctgtccccaatccccacactaatgggggccctacaatttagggcagaggccatttattacaaaacgctcttgaaacctgatccctccactcctcccctaattttggatgcacagtttaagtaaggaatctcttagcacttagcgaaggcttcttcgctgtggcagatatcacaattgtaactgggccctcatcagactgggagcttcctgtgggtggaagctgcatccacagagcttagcaatgctttgtgtactcggtaggtgctcagtaagcctttgcctgggctctgggaatataactcctttgaagtacaacatacaagcagtaaagtgcagacacctgcagtgaatgtacagatcaatggattccacgtgtgtatacacagaggtttacaatggccacccagaggagcgttacagaacattcccctagagactcccttgacgcagggaatttaattgccctcccttccatcctgtgcaggcaggctggttgccagtaaagggatatgagatgccctgatgcatccgcagacagaacccttagtatgggggggaaggacctgtcattctagagtaaaagtaagaccaggaagattaaagaagacaaaaatttaaaaatgcaaatggtgaaaagcataaacaactattttcctctctccccacactcacccagaagcaccggggccaaagagagggcatgggaggtctcaggatcccctgccgccccaccactgccctgatgcccgcttgtgacgcagagaccggagtggctctgaaattactgtcttcaaagcaggccaaaccttgcttgacacgtgcaaagttccaatctcttgcttctcagctccccgcacgcgcgggccaacgtgcacttctgagccagatcacctagccacaaggagggggagagagggggagataggaggagagaggggaagatagggggagagacgggggagagagagggagaggcagagagagagagagagacagagaagagaaaggaagcacctgagacagagagaaagaagagagagaaaggaagcagcttcccccaacgctgcggccttgtgtttcctcccgtgtcaaacgagagggccccaaattgaccccaaatgttttttcttcctttctcaatccaacatttataccagcacgttatttccaggatgcccaggacctctgctatggttgtgctgctgtccctgcaaaggcgctggggatggccgaggtgggggatgtctctgggggctgaaatacgctgccaggggaaggggcgccccgataccaccctcagtggctgctggttgggcgaccggtggccctggcttgagaaagtgaaaatgtccaatctattttgcctggagccttgggtctcttttggatacggaaccgagcagcagtcctccacttcgccctctcccgccgctgcaagggaaaaggtcgttttcctcgagtcccggagaggccctccaggaacccagagccccccggggacaccgcccagctcccggcgcccggccccgcccctgcgcgaactcggccgcacccactttcccgggcggctccccctccgtggcctgtggcgtcacaaggcccccagccgcctgtgccccgcggtgcgcgccccgctccgggacctgccgccaccgccgccccgccctcggcggcacccacacccaggcgcgcccgcgcgcgcgcccggccccgtccctgtctggaagcacagctgaagatggcgagcccggcgcctccggagcacgccgaggagggatgcccggctcctgccgccgaggagcaggcgccgccgtcgccgccaccgccccaggcatcccccgcagagcggcagcagcaggaggaggaagcgcaggaagctggggcggcggagggcgcggggttgcaggtggaggaggccgcgggc

SEQ ID NO: 33364 - DNA, 2300 bp, Homo sapien
gacagtctccccaagaatatattaatgtgtgtagttttcaggtatagagagaatagaaaacagcaattcaagaactagcaaaatgtgtttatgaaatgaactatagataaaaataacatgatttagctactgatggctaaatcaataacagaagatcagattaattttttttattttgctctcttattttttatagagacagggcctcactatgttgcccaggctggtctcaaactcctgggcccaagtgatcctcctgcctttggctctcaaaatgcacaggcatgagccactgtgcccagcctaaatttttttttgagacggagtctcgctctgtcagccaggctggagtgccgtggcatgatcttggctcactgcaacctccgcctcccgggttcaagcaattatcctgcctcagcctcatgagtagctgagattacagctactcagccaccacacccggctaattttcatatttttagtggagacagggtttcaccatgttggtcaggctggtctcgaactgctgacctcacgatccacctgcgtcagcctcccaaaatgcggggattacaggtgtgagccaccgtgctctgctgagatgaaattttttaaatgtatgtaatctccaggggagaaaatttaaaatcacatggggaagtacacgcacgagaaaataagaaatgagctgtaagaatgtatttttgtgatttgtcttcaaacacagattatgggtatcttcgtccatgaaaccacctaacactggatttccaccatctttgccccactaggtttatggatatttgagagtcttgaaaaatatttatatgtaggaaaatacaggtttcttacaataagcttgcttgctttatttttaggagaactgcctgaactcggatgtggtggaacagatttacaagcggaacccgatccttcgatacacccatcaccccttgcactccccgctcctgccccttccgtatggggacataaatctcaactgtaagtccagagctccaccccgactcctcagagaccatgattccacttgccctgctaactctttagcttaacacagaagcatttgtttttatctcaaagactctcttattcgtcgtgaattggaaggaaaagatgaaatatacttagattcattattaaagcaagacttctagagtgtggttgtagtaatgctaagattgattgctgtagtaaaagaagagatttaaaggagtcagaaaatgccagctctccccatgaactgagagtagccttttgttttgtttttgttttttgagacagagtcttactctgtcactcaggctggggtgcagtggtgcaatcttggttcactgcaacatctgcctcccaggttaaggtcgttctcatgcctcagcctcctaagtagccgggattacaagcacccgccaccacatccagctaatttttgaatttttaatagagacagggtttcgccatattgcccaggctggtcttgaactcctggcctgaagtgacccacctgcctcggcctcccaaagtgctgagattacaggtgtgagccattgcacctggccgagtagccagacaaccagatcctaagtaattttgcattccaaaaaaggattttgttcagcaacagattaccttttaagtaagcattttatgtggtaagaagttcaattagataacaaaacagtgtcaacttacccacctctgtgcttttagatctgtgttcaactgattgagatgtatagggagtgtggtgggcattgcatccgtcctcctcatttattcctttgtcttgactactgctccgattatgctcatgccctattctgaacccctcagatgagttccgtgtttgttttgcttgtcctagtgctcaaagacaaaggctataccacccttcaggatgaggccatcaagatattcaattccctgcagcaactggagtccatgtctgacccaattccaataatccagggcatcctacagacagggcatgacctgcgacctctgcgggacgagctgtactgccagcttatcaaacagaccaacaaagtgccccaccccggcagtgtgggcaacctgtacagctggcagatcctgacatgcctgagctgcaccttcctgccgagtcgagggattctcaagtatctcaagttccatctgaaaaggtaaagcatgggggcacgggagatgagctgggcagagctgcttacacaggtggggcactgggtcctcgttcagataaagaggcttttgaacagaagacacctctagtaggacagggacct

SEQ ID NO: 33365 - DNA, 2300 bp, Homo sapien
ggggcctccttgttctctccagtttccataatgagagtctcattctaaaactgggtcctcttttgtcttgtagccttgatgtgagctcatttgaatagctcaaagcctcattacttcaatgccgattctcttgttttctttcattttcagaaaacaatacagaaaggtcctttattgtgtggtgataatacagaagaattacagagcattccttctgaggaggagatttttgcacctgaaaaaggcagccatagttttccagaagcaactcagaggtcagattgctcggagagtttacagacaattgctggcagagaaaagggagcaagaagaaaagaagaaacaggaagaggaagaaaagaagaaacgggaggaagaagaaaggtacagtacctttcttgctgggatgaaacaaatggatacattttgagtgctgtgctcggtatctgtctgtgcagccagaaatcccagcagatgccccagaacctacaatttgaaacagtaactctaggtggctagaatataaaattccttggcagcattaaagacccagttctgtgaatatttttattcatacagaataaatccatggccagaggaaggggctctgtctttcatgctttctgtctttggcaaagctgttttaaaaacgtagatctctctgaaaagtggttccagggttattgttgttgattttcacttttcctttactatttttagagaaagagagagagagcgaagagaagccgagctccgcgcccagcaggtaatgagtgcagtgacaacttagcctcttgtgtttctacttccttcccacttctaatgcttggactctaggattcaaaactgaattaaagtagaaagataacaggaagaacaatttaagaggatgtgtttatgatccaatttctgacctattacaattgggtaaagcgtagtgaatggctgaggttttagtgtgcatcacaagagtataatttctctaaatcggtataaccagcgtgttagtttgctaggcccaccacagccaaataccacagactggtggattgaacagtggaaactgattttctcccagctctggaggccggaactgcaagatcaagttatccttaagtttgatgtcttctgaggcccctccccttggcttgcaggtggccgtctgtccagtgtgtcctcacgcagccttttttctctgtgtgacctagtctcctgttcccaaaaggacaccagtcatcttggattggggcccaccctagtgaactcattttaacttagtctcccctttaaaagctgtatctccaaatgcagtcacattctgcagtattggggttaggacttcaacctatagactttatggggacacagtccaactcataatgaccatatttcatcctggttgcaaagcgggagctatgcttggacttttgtactgaagccttctgaaatctcccttctgcttctgtccaggaagaagaaacgaggaagcagcaagaactcgaagccttgcagaagagccagaaggaagctgaactgacccgtgaactggagaaacagaaggaaaataagcaggtggaagagatcctccgtctggagaaagaaatcgaggacctgcagcgcatgaaggagcagcaggagctgtcgctgaccgaggcttccctgcagaagctgcaggagcggcgggaccaggagctccgcaggctggaggaggaagcgtgcagggcggcccaggagttcctcgagtccctcaatttcgacgagatcgacgagtgtgtccggaatatcgagcggtccctgtcggtgggaagcgaattttccagcgagctggctgagagcgcatgcgaggagaagcccaacttcaacttcagccagccctacccagaggaggaggtcgatgagggcttcgaagccgacgacgacgccttcaaggactcccccaaccccagcgagcacggccactcagaccagcgaacaagtggcatccggaccagcgatgactcttcagaggaggacccatacatgaacgacacggtggtgcccaccagccccagtgcggacagcacggtgctgctcgccccatcagtgcaggactccgggagcctacacaactcctccagcggcgagtccacctactgcatgccccagaacgctggggacttgccctccccagacggcgactacgactacgaccaggatgactatgaggacggtgccatcacttccggcagcagcgtgaccttctccaactcctacggcagccagtggtcccccgactaccgctgctctgtggggacctacaa

SEQ ID NO: 33366 - DNA, 2300 bp, Homo sapien
ctgtttgaggaatgaggtgacttcttttttttttttttttttttttttttgagacagagtctcgctcgctcgtctggctggagtgcaatggtgcgatctcagcccactgcaacctccgcctcccgggttcaagtgattctcctgcctcagcctcccaagtagctgagactataggtgcatgccaccacacctggctaatttttgtatttttagtagagacagggtttcaccatgttggccaggatggtctcgatctcttgaccttcgtgatccatccgcctgcctcggcttcccaaaattctgggattacaggcatgagccaccgcacctggcctgaggcaacttctcctcatgtgcgttttagttgcatccactatgcccgtgaaacactacgtgttacattttctgaagcacaaagctgtcctgctgtgatgatttttttcatatgaacaggagaatatatcagatctctttgggaactatttacccaactttctgccaagactacttaaagccaacatgaggggttatgtgtttatttagccaagatagtgataggcttcttactttagttttgtttgttattatttctttgtttttctcctgttttgttttgaccaaaggggcctccttgttctctccagtttccataatgagagtctcattctaaaactgggtcctcttttgtcttgtagccttgatgtgagctcatttgaatagctcaaagcctcattacttcaatgccgattctcttgttttctttcattttcagaaaacaatacagaaaggtcctttattgtgtggtgataatacagaagaattacagagcattccttctgaggaggagatttttgcacctgaaaaaggcagccatagttttccagaagcaactcagaggtcagattgctcggagagtttacagacaattgctggcagagaaaagggagcaagaagaaaagaagaaacaggaagaggaagaaaagaagaaacgggaggaagaagaaaggtacagtacctttcttgctgggatgaaacaaatggatacattttgagtgctgtgctcggtatctgtctgtgcagccagaaatcccagcagatgccccagaacctacaatttgaaacagtaactctaggtggctagaatataaaattccttggcagcattaaagacccagttctgtgaatatttttattcatacagaataaatccatggccagaggaaggggctctgtctttcatgctttctgtctttggcaaagctgttttaaaaacgtagatctctctgaaaagtggttccagggttattgttgttgattttcacttttcctttactatttttagagaaagagagagagagcgaagagaagccgagctccgcgcccagcaggtaatgagtgcagtgacaacttagcctcttgtgtttctacttccttcccacttctaatgcttggactctaggattcaaaactgaattaaagtagaaagataacaggaagaacaatttaagaggatgtgtttatgatccaatttctgacctattacaattgggtaaagcgtagtgaatggctgaggttttagtgtgcatcacaagagtataatttctctaaatcggtataaccagcgtgttagtttgctaggcccaccacagccaaataccacagactggtggattgaacagtggaaactgattttctcccagctctggaggccggaactgcaagatcaagttatccttaagtttgatgtcttctgaggcccctccccttggcttgcaggtggccgtctgtccagtgtgtcctcacgcagccttttttctctgtgtgacctagtctcctgttcccaaaaggacaccagtcatcttggattggggcccaccctagtgaactcattttaacttagtctcccctttaaaagctgtatctccaaatgcagtcacattctgcagtattggggttaggacttcaacctatagactttatggggacacagtccaactcataatgaccatatttcatcctggttgcaaagcgggagctatgcttggacttttgtactgaagccttctgaaatctcccttctgcttctgtccaggaagaagaaacgaggaagcagcaagaactcgaagccttgcagaagagccagaaggaagctgaactgacccgtgaactggagaaacagaaggaaaataagcaggtggaagagatcctccgtctggagaaagaaatcgaggacctgcagcgcatgaaggagcagcaggagctgtcgctgaccgaggcttccctgcagaagctgcaggagc

SEQ ID NO: 33367 - DNA, 2300 bp, Homo sapien
tactaatctttgtcattctgaaattttttgctaatttgacagaactgatctcatatttaccttaatttgtacatgttcgatttctaggaaggaaaaaaacagtactctggatttgcatttctccctatttttatcgctcatgtatatgtcagtggatcttttaattctttccctctccattgtttgccttttctttcctgccattattgctttttctttataaagaaattaatcttggcctggcgtggtggttcacacctgtaatcctggcactttgggaagccaaggtgggcatatcacttgaggttgggagttcgagaccagcctgaccaacatggagaaacctcgtatctactgaaaatacaaaattagccaggcgtggtggcgcatgcctgtaatccctgctacttaggaggctaaagcaggagaatcgcttgaacctgggaggcacggggtgcggtgagccgagatcgtgccactgcaccccaggctgggcgaaacagcgaaactccatctcagaaagaaaacaaaaaaaagggaaagaaattgaacttttcgcagtgttaaatctccagttgtttccttttgcaatttatgttgcttcagagcggtgcgtggtttccttcttcccactctcctatggtccttgtgtgagtccaagttctttttgtaggtcattttcatcgatattgccaacaagtctgcccccaagtttgtgtgtacgtgtctggttttcttttcttttttaatagctttttttggtcacaagaatgcagctcctcagtcacagtagaaaatcagcaaatcttagatatgattcagaaaacacctggcttcagttgtttagatactgttggtaacagattcctgtaagtgcctgtttatttttatttttcctcaaacagcattatgttaacttccacttagtatcctcaggccaagataagaccataaaaaatcctttggagaaattaaaaatagagatgtgatgagtgcctaaggaagataggtccagatctatttagattttccatcagcatttatttaatttttttctttttttaagagacagggtcttaactgtgtcacccaggctcccaggctggagtacacatgcgatcatagctcaccgtaaccttgaactcctgggttcatgcgatactcctgcctcagccaagccaggagctgggactgcaggtgtgcaccaacacacctggctaattttttaaaattcttggcttggcatggtggctcacgcctgtaatcccagcactttggaaggccaagctggaaggattgcttgaggccaggagtttgagaccagcctggccaacatgagacccccatctctacaaacaaaacaaaacaaaacaaaacaaaaatacaccccctctccaagtactccctctccacatttttacatctaaagaaaataataaatatttcattacactctgatagctgtacagaaaactgtttctttattgttgtcatgactgtgactccctgaggtaattcttttgtagcatatataggaggcttgtatgtaagggggacactatgtttatttcattgattatctctgagcatgctatagttctttatcttcctcctcttatgtgcactatgtaatgtcctcatcattttaaaagtgagttgctattgggcgggcgcggtggctcacgcctgtaatcccagaactttgggaggccaaggttggtggctcacttgaggtcaggagttcaagaccagcctggtcaacatggtgaaacccagtctctacaaaaaacacacacaaaaaattagctaggcatggtggcacacacctgtaatcccagctactcgggaggctgaggcacgagaattgcttgaacccaggaggcggaggttgcagtgagccaagatcgtgccactgcactccagcttgggtgacagaacgagactgtctcaaaacaaaaaaacaagtgagtggttatgcatctattttttgtttctttgccttttcaataacacctagtaattttatattatcagggatattctacattttcttcagtgtgaaaaaacgacataaaattaaatacatttattttcttctagacggcaatggacgtgatgcagttcagcaaggaggaagttcgggaagtgtcgaggctgcttgctggtatactgcatcttgggaacatagaatttatcactgctggtggggcacaggtttccttcaaaacaggtaagattatgcctgcctgccctcctcgctccctttgttccccgtgggaaacttaaacctaaattattga

SEQ ID NO: 33368 - DNA, 2300 bp, Homo sapien
gggaggctgaggcaggagaatcgcttgaacccaggaggcggagtttgcagtgagctgagattgtgccattacattccagtctgggcaacaagagcgaaactctgtctcaaaaaaaaaaaaaaaaaaagaaaagaaaaatagtttcagtgaaattttgtgtttccagggagcatccgtgtggaatgccaaggccacactgaatttcatcagttatttttttggagtttcgtctatttctggtaaactctagcttccatgaagcaatattgagggaaagtgtatttgctttggaatccatatgcagtttgtaaatcttgcttgtaatctgctgagctgctgagctgatgcttctatctgccttgtagatggaagtgacacgcagctgtctagtcacagctttgggcttttggactcttcacatcttccttacccattaaacttgaaactgtttctttcaagtttaatgataacaattttaagaaactattttggaaattgactctcctagtagtgtgagactttaaaaggtaatggatggtttacatttaaaccagcttttgaaggctgtgatttagttaaggtggtgctacttggcagctgctaatattttttattcctatggaatacgtattctgtagtttaaaaagaaagtggctagcatggttagatcagcagaaatattctttgttgtaaagtatgtagcctggaagttatcaagggatggatacataggttagaattactttttttttggacccagggtcttgcttttttgcctaggccggagtgcagtgatgcaatcacagctcactataccccggacctcctgggctcaagagattctcccccgttcagccttttgagtagctgggactacagatgtgtgccaccatgcccatctgattttttcttttttttttcctttttttttttgtagagatgggtctccctgtgttgccctggctggtcttgagcttctgggttccagtgatcctctcctcccctctcagcctcccaaagtgctgggaatacaggcatgacccaccatgtcctgctagagttactggtttgcatagaatggtagttctcaactggaggcacttttgcctcaccggggatatttagaagtatcaggagacatttctggttgttaacactgatgggaggtgactactggtgtctagtgggtagaagctgaggatgctgctaaacatcctcaattgcagagggcagcccccacaatgaagattgatccagtctaataggtcaatagtgttaagggtaagaaaacctgatataaaagattgacttacaagaatcttccctcttgtattttattttaatatgctgcattttctaaataaaatcattattcctaaagtaatttccatagtgtactcttcggggtgtgtgtgaatgatgcattaatctgatttttattaattttaataccggcattatatttagtacaacttggttatattaaatatctagatctatagttatatgtttgttttatttattccaacattgatttctgcagcattggttaatagttgggatattaagccatttttatttctaggccttctcaactttgagtttccactgatcctaagaagcgaaggaacagacaatacggacctgatttgtatatttctgagatgaaagaaagattgaaggggctgacgttagcaatctacactatattctttggacctcttcgtgtcatctaattattttagttaattaccaacatttttgttaccaaccctgataatgcaagaggcagcctctttgaatggggtacgtgaacctttaccagtgaattcatatcttttttcttttccgtttctcccaattttgatgagtaagtgtgtggtttttcttcttaattttcatcaagcctattgttttcttgccagccacagtgatgaatcactctaaaagcttggtgagggcagttgaatcagcaggcaaaacttttttatttgctgaaaataaatggaaggctgcttataggttcacacccttgctgctctcatcaaatcttcaggcaggagggaaatgaaattggatcatcttaaacttcctggatttaatctgtgatttaggagtgagttctttccatgcttctcctctcctcttttcccttcctagcaagaggagaaaaaaagcaagtaatttaatgtaatctgatttttttttttttttttttttttacttcatggctttttgacattggaagagaaatgagccatctttctagaggagctttagtgtcatgtgtgcttttctta

SEQ ID NO: 33369 - DNA, 2300 bp, Homo sapien
actttcttaccctgttaactgatgatgtaagctttttgaagaaataaaatgattcagtaaaatctaaactttatatattggatctggctcaccattctttacgtgagtcaaattgggggcaattattaacgatatcttcataattggcaggaaaatcacctttaaaagattagtagactttaaaaaaacagttttaggcttacataaaaattggccagaaagtacagagagtgtccatagacccctcccagcccctcaccctcacttgcccctattattaacatgttgcattagtgtggtacatttgttataactgatgagccgatatggaaagtgacttttgaaatgacatggcgaggttgcccaacgtatcagtggctgggctgatgctgggaaccacgtcacacccacacactcacttcaacaatctccctggtaatttctctggcagagatgttgtgtgcagattaataccataatgactgtaattgttctgctccagtatctgaacaccagtggttgcaggacccatttgactaagcactgggattgttggtatttatcctgactccatcttcactttccttgcgaccttggacacaagctttaatggctcagcgccttaagcgtgtaaacctgtgaaacagaacaacattgcacaatatcattaactaatttacaccttgactctttctaaagggaagtgaggtgggagcaatgatattaatggtgaagaactggactgggataagttacaaacatgcttgactttccccataaggattacagaaggatgtttcattcattcattcatgctgtgagacagcctggggatactcatcttaaagcacagtccttccccaacagtcttaggaataaatcctagagtgggcatctagcccagtggttacggggagcttgggtggggtgagtggagtagcatctttgggaagggttccttcccctggaaggtgtgactttgtgagctgagttttaaaggttgagtagcagttggcaaattccctggagagagcatctcaaatcttttgtgctgaagaaccagccatttttgttcccagtcggccaggtaccaatacactgcggcgccaggtgtgactcaccacgtgagtctgacaacacccaaactggtttatactcggttcaaagagtccactgatcatgtgcttggatgtcgtggcattattaaattgctacaaacgtttactcttaatttctctacttgttacaagctttcgttcagcacaggaccaggtagcacctgaggggcacctggaaagcagattgttccagcctgcgttctaacaaggttcccaggtgaccctcgcacagcataaagttaaaagaactgccctaggggaaacgggactcagtgccaggtgggtttgatcattcgtccatctcagtgccatctgccatctctgcttccttgaggtctagaaaagggttacatttttaaaggtgatattggccacgtccccttccagtttcaaaactacatttccccgctgttacgcaaacgtcttaagcaaacccgactgcaggacagaaagtcaacacgggaatgcagcttccagaaattctgattagcctccgtcttccgctttgatctggccccgcagccccggcagctccgctgaccgcgcttccttcccgagattgctagtctaccgggctgcattaatgagatccgtgttgagccggttcccgggtctgctaaacatgaaaggcacagaagcccccagtcccttctcctcccctctaagtgattgtttagtctctctctgcagagggaagagttaaatcccctccccacgcctacgtgggaagacctggggaaacacgcggccccctcccgggtccgctaacgagcctgcggctgcttcgggcttagagtgggcggggcctggtcgggaagggggcggggcgctccgcccgggcggggccagacggtgtggttggcggagggccaagctcctgggggcggggccgcgagcgggagggcggggccggctgcgggagggcggggccggctgcgggagggcggggcgaggtcgctgggctgtagtcccgcgggcgagagctggctgagccgcggcgcgggactgctcacctccaagcgctcgcgcggggatcgcggctcctgctcactttgcggcccgctgtcctcctgcccgccccgagggcccccggccggagcgcagagggagggggccgcgctcgccagcaccccgccgccttcccccgcctgggggaagaatgtgccaccagctgttctccgc

SEQ ID NO: 33370 - DNA, 2300 bp, Homo sapien
acaactggtgctggtgctggtggtgtgtgtggagggtggtactggctgctagtagaggccagcaatgaatgccagacatcctacagtgcataggacagccttccacaacaaagaaatatctggccccaaaaggaggtgggaaaacctgcatcctccatttagctttatagatggtgtactggtgtgagggaaataaatattcaaaagaataaaatgctttagaagcaacctcatttgtaatttgcttccctggtattttactacactaactttttatttcactttaaatggcagaaagagaaacaggaaaaaacaaacagttcccgcttttttcttacctttggtttaaatttgaacatttccagctggcatgcattaatctaatttggtgctgcctcctatgacctgtaaatgtgtacagtagggtcgtcaagtgtttccactgcaaaatcgctagtgcagttgagtaaatattgccactttgcttaattcaaatatgtacgttaaagttacgataagttaattttcctgttaagtgaaaatgcacttacctttacccagttgaatacagatgtacttgcctttgacgtctgcctccctaagtatggttacagtttgtcactccggttctggagggccaccctgtccctgaattcacgcccaggtcctgagggcagaaccatcctgaggacaacctgcagctccatcgattttttcttggctgggacgcaggcgagcatgaaagcgatccaaacacagccagagggcgccaaaatgccgcaaataaaagttccaaaggcgtcaactggcttttgcgggaaggtaaaattggcttttgtgtaatcaaagagctaccgttgtcaacgatgtcacgttacgttatttttgtatgtccctcttgccaacaggtaagcaaagtgaacgcatcttcctaccccggtggctattctgtgtcccggtgctaaaccaagtgtccgcccccttagggcacccggacaagccgcggttggccctagctttgactcgagcgctcgcaagcagcagcgtgcgggctgcctcggccaaccccgtcttctcaatattggtggcctccattaaagcacagacatcaaaaacatcgacggcccctttcccctcttctcttccctccttcctctcccaagttccgagagcatcctccgaggggcgacgtctctcgccccaccagctggacctcggcgaccgcgcctcccccgaagctgcagccttcggggctgagccccgcgggtgcgggtgcaggtgcggagccgcccaaggtgcgcaactcgtttgcagcggcgcagcccagacgcgcctgcagctggggctcaccccaacctcgctgccagccgaggtagcggaatcgtagtcgacgtcgggagcgggctggactggggtctgagaagggtagctggtgccagggggtgtcattcatcacctcgaggcagctccctaagtctgagcgagagcccgagcacttcttatccaacggttccaaataaatgagggggagagagagagagagagtgagagagagagagagagagagagagtgagtgagagagtgagagagtgggagaagtccacggacagcccaggcggcgcggcgggggaagggggacgcaggaatggaggagaggagaggggaggcggaggggggatctgaatagagggcatttaggaaacgttggcggggcacagagttgggaggtggggggaagggaggaaccaggatggcggataggagagaaatgggggtgactgtgctggaggggaggggaggtgggggcccagagctggggggagtcaaggggaggcgggcgtgtccaggctggaggggagaggggagggtctgcgccggaggaggggaggggagcagagggagtgcagggggtggggagatggagctggagggggtggaggggagacgggcggggcgccgggctggagggaggggagagaggcgggcggggagcgcgggaggagggaggctgggcgggcggacgcgcggggggagggcactgggcaggaaggggagggggagcgagcgcgagaaatgcagaggctgcagcggcggcggcggcggcagtagcggcagcggcgacgacggcggcggcagcgctccaactggctcctcgctccgggctccgccgtcgagccgggagagagcctccgccagcggccaggcaccagccagacgacgccagcgaccccggcctctcggcggcaccgcgctaactcaggggctgcataggcacccagagccggtaaggaggcgcgcc

SEQ ID NO: 33371 - DNA, 2300 bp, Homo sapien
aacagtgtgcgggtacaaaatatttaatccacaatttgccttcatcctcatcaaggcaaatcttaattttggtcaattgaaatcagcaagaaagcaaaagatgagagacagcctggaaaagaagaaacacacacacaggcgggaaaaactgtcattggtgtccaagggtttcccgcaacatttagggcaaacgcctttgttcctcggctcgggaggggagtgggtggctggatgatggagatgggatggggctgccgggccctccacaccctgctctccggcgcatgcgcgaggccaagacaaaggaataggtaattacagtcccgattcattcattttgcctgcagtatactgggggtctgttggcccgggctgtaatcccgggaggtgggggtggggggtcggtccacaaccctatagcagaaggccatttcgacgctagtgttgggttttagcccgccccacagtgcgagtggccgcgggggagacagaggtgttgtcaacctgtacaaggtcctaaaaaatgcacccatgtgtgctgtgctaatttcagcagagtgagaattacatgggcaagggctgtccaccgagttcgtttcaaggcggaaatgtctctggggacgcagataaggagcctggccaagcgttcgatgaatattcatgaaaagaatgcggtttgcagccgcgcattgtgcgtgcgatcggatccaggattccgcaatttttatttttctggaaatggaggggggacgggggcggggggagcaggaaccgggcgccgggtttcagctttagcgctttgggcaaaagctgctcaaccccaaccctacgctcccagcggggctgagcccagttagggccgcgcgctgtcaggttcaagcccacaccccccgggcccgggccggggccgggacccagggcggaggcgcctggcgcattcttggaaccaaaggctcgaaaaaacaaactgctccgaggcagcccacgggttcgtaggaaggcaattccgccactgacgaggctggggctccgatctgctcgggaggtgcttctgagtgcacgtcgccgtgtgaacctcgtattccttggccccagaaccaagatccaggagtcccatgggtcgagaaaacccgtttgccaaagcaaaaagccacccacttccttctgatcgggccagattccccatcttctttctccccggactcccgccccaccccacccccaccctccatctttggctgctgcgcccctcgccccgagcgctttctcccaggctggtaagggctccgatgacggaagcgctcccttcagcccacagaaccgtctccccgggactcaacgcactgagggggtttcgcattcggcaattcctcccgtcacccgcagctcctctccccgacagccccctccccccagctccgtttaccaacctcgccgcccccctcacccctccaccatgcgagcggctgaagcctcccacttctgggccccccatcacccgggatccccgaagtgcgacggagccctcacagagggaccccaggcccttgccgtccaatccgggcccacatccctgctgcccgctgcatgaagggagagcccgggggctgcggggcggggcgcggcgcggtgggggacggaggcccccgggtccgcggcggcgcggggccaccgggcgcgcctccttaccggctctgggtgcctatgcagcccctgagttagcgcggtgccgccgagaggccggggtcgctggcgtcgtctggctggtgcctggccgctggcggaggctctctcccggctcgacggcggagcccggagcgaggagccagttggagcgctgccgccgccgtcgtcgccgctgccgctactgccgccgccgccgccgctgcagcctctgcatttctcgcgctcgctccccctccccttcctgcccagtgccctccccccgcgcgtccgcccgcccagcctccctcctcccgcgctccccgcccgcctctctcccctccctccagcccggcgccccgcccgtctcccctccaccccctccagctccatctccccaccccctgcactccctctgctcccctcccctcctccggcgcagaccctcccctctcccctccagcctggacacgcccgcctccccttgactccccccagctctgggcccccacctcccctcccctccagcacagtcacccccatttctctcctatccgccatcctggttcctcccttccccccacctcccaactctgtgccccgccaacgtttcctaaatgccctctattcagatcccc

SEQ ID NO: 33372 - DNA, 2300 bp, Homo sapien
agtattataaagtgatagtcaaggacagtggtgggtgtggcagggggctacttcataaataatggtcaggaaagaatgctctgataagaggagggtaggatatgagagagagggaaccatgtgtgtttctggggagaggtttccaagcagacaaatgaggaaatatggagtgaggtgggaggtcgcacagcacatttgagaaacggccagaagtccaatgaggatggaaaggagagagcaaggggaagtggtaaaaaaataagatgacagaaggggaaagaccatatgctgcttatatcttatttcttctgtatccttcctagagttggccttctttcgggaaagtagccatgtttcactccaatcttcaaacccaacacccaccatctcaagcattatcattttcccttctgtattttattttgtgtcttctctccaatgtggctctgtagctacatttattttttcttttattaaattgcaaagaccgcttgctggaatgatgtatagattggttattcctgtaggcaggttgccctagcaacgggaaaatcttacccatttcagcaaattttatcaataaagcagtctaaccagagactaatgttcacataattaaatgtctgctgtacttttcctctgttccttaaccatggtaattttcagattgttaattagccgagtgccaattgattgaatggctccacaggagtggaaactaagaaagcataataatagaatgatcctaagcatcacaggtgacagccccaaatcaccctcttgctttggtttccaagttaaccacagcaaatctttatcctttccaggaagaggcatacagtttccacgctgaacacctggaatccatttagactggccagtgtccactacctaaaaagccttgagtgctaaggaagcagtgtttggaaggagaacagagtgtatccagtcatgccaactgcagtctaagaatgatcagtgaagtggctccctgaaggggcaaagtgaaataaatgcatgccagccgggcacggtggctcacacctgtaatcccagcactttgggaggccgaggtggaaggatcactttcgcccaggagtttgaggccggcctaggcaatatagtgagactccatctctaccaaaaaacaaaacaaaacaaaacaaaacaaaacaaacaaacaaaaacccccaaaattagctggttgtggtggtgcatgactgtagtccctgctactcaggaggctgaggcaggaggatggcatgagcctggaaggttgacgctgcagtgagccgagattgagccactgcactccagcctgggtgacagagtgagactctgtcacacgcaaacacaaaatacatgccattcctttcaggttaaaacttaaggtgacctcaggttcaaatgataatagtggttacactgaatatgtggtcacatatttgttagaaaacataaacttttaagtataaccccctctataagatcatatatccaattcattcataacagagttgctcaatatgtccactttcttgcattcataaaatgcaatatgtacatttttctgatcttgtctgcatttgtgattttaaaaaaatccttcagaaaagatgatatcatgatcttctatggctataaatggcatgaatatagaatcatcttcattttcttttgggggaagttttctttgaaacacaacccaagtctttctaggttctgtgtcatgcatagatatctaatttggcatgaaggattctgtgaaatgattgttttggcttgccactcaataataatgtaacctccttattccgagggatgtagttcactacaatgggaaggggtatatataggtattggagagagactcctatctcttcacttttttttttttttttttggtacccaatttctttatgtgaaggaatggtacaaatcaaagaacttaagtggatgttttggtacaacttatagaaaaggtaaaggaaaccccaacatgcatgcactgccttggtgaccagggaagtcaccccacggctatggggaaattagcctgaggcttagctttcattatcactgtctcccagggtgtgctggtcaaagagatattccgccaagctagattcgggtgctcccatcttgcacaagttggtcatgtggtcacccaattctttgatggctttgacctgctcattcaggtaatgtgtctcaatgaagtcacacaaatgggggtcatttttgtcagtggccagtttgtgcagttccagtagtgactgattcacatttttttccaaatg

SEQ ID NO: 33373 - DNA, 2300 bp, Homo sapien
cctggtttcacttcttttttgtccctttacattttaaaaaagaaactaccattagaaaaccagaactatcaaaatatcaaatctcttgttttgagctttgtgatagttaattttcctgtcaacttggctaggctatggtgcccagttgtttggttaaacactagtctagatgttgctgtcaaggtatttatggatgtggttaacatggaaatcagtagacttttagtaaaacacaatacctttcatgatgtgatgggcctcatccaatcagttggaggccttaaaagcaaagacagaagtttctcttagctaaatttcctaccagtctgccctaccaattttggagttgtcactctccagaatcatgtaagccaattccagtcaatcaatcaatagataaatgtatgtacacatgtatatatgtatatgtgtgtgcatatgtatgcatgtgtgatatggtttggctatgtccccactcaaatctcatcttgaattcccatgtgttgtgtgagggagccattgggaggtgattgagtcatgggggcaggtctttcctgtgctgttctcatgatagtgagtcagtctcatgagatcttatacagcagcatgaaaatggactaatacagtgtgtgtactgtttctctgggaacattgactcattgactaaggcaagcttttttttttttttttggtttgcttataaatattttagacaagagatacaacttattgtaacaaaaaaatcttttatatacctgtgtgttagtctgttctcactctactaataaagacataacctagactcggtaatttataaaggaaagaggtttaatggactcacagttccacatggctggagaggcctcacaatcatgatggaaggcaaaggggaagcaaagatgtgtcttacatggaagtgggcaagagagcttgttggggaactccctttcataaaaccatcagttctcttgagacttattcactgtcaccagaacggcacaggaaaaacctgcccccatgattcaattatctccacctggcctcgcccttgacatgtggggattattacaattcaaggtgagatttgagtggggacacagccaaaccatatgagcttgttttaccagtaactaaataatttatttcaatggtatgagatcatcttaagtttattttttcaaaatatatgtatcttttatttggaatctgattataaaaataaattgtaaaacataatgacactgaatagttattggatgataccaagaaatgtgttaatatttttacatgaaacaatggtttgcagttattttatcaaaaggagagtaatcttttgaaatatatatttggtacctttatggataaagtgatagaaaattaaagtctttctatggaattgcttttggcatttgtgtttttagtcactcttttcacttacatttatttattacacttacatttcacttacctttatgtttctttttataaaaataaaacagatggccaggcgcggtggctcacgcctgtaatcccagcacttcgggaggccgaggcaggtagatcacctgagatcaaaagttcctgaccagcctaaccaatatggtgaaaccccatctctactaaaaatacaaaaattagccgggcgtcatggagcgtgcctgtaatcccagccattcgggaggctgaggcaggagaatcgcttgaatccaagaggtggaggttgcagtgagccaagattgtgccattgcactccagcctgggcaacaagagcaaaactccatctcaaaataaataataaataaataaataaataagacatataagatttgctacaagaaaatttatttcaatagtgtgactacatcctatttaatttcatgttgtatatttttaaggacaagagaaggaaaaggaaaaaaagttcactgaatgcttcctatgtgccaggctctgtgtaggttatcttttaattctcagagcaggagtggtggatggtattttagtcatttcacagtggggaaaatagtggtgatggaagtgagtatcagtgaggataacagactgcttcaacttagcttaaaagtagagagatggacgttcttccacgagagtcgtcggggtttcctgcttcaacagtgcttggacagaacctggcgctcgtcccccacaccggccggctgcccatagccagccctccgtcacctcctcaccgcgccctcggactgccccaaggcccccgccgccgctccagcactgcgcagtcaccaccgcgaacgcagccgcctctccttagtcgccgc

SEQ ID NO: 33374 - DNA, 2300 bp, Homo sapien
gtgacatgcacctgtaatcccagctacttgggaggctgaggcagaagaatggcttgaacccagaaagcggaggctgcagtgaactgagatggtgccactccactccagcctgggcgacatagctagaccagtctcaaaaataaaataaaataataaaaaaaaatttaaaaaacttgacagagcagtttcaaagaagtgacaggaggaaagtccaagttgcaatggttggaaacagtaaaagtgaagttaaagtaagcatgcctaggataggaatttgactactagaaatggaaatattgcttcaaccagacaagagttcatttttctcacataacatgacatgtagagatagatatcccagggcctgtggtaataaatctaggctatctaagctgacattagacatcaatattgtactccttctaccctgtcacctcatttttagcaccaggcttcaattctcaaggatgcctcatgatcacatgatggttgctagttccagccatcactttctacattccaaataaggaaaaaatgcaaaaggagggagacagcaaaaggcagctaccagctgagtaatcatttttaagatagctttcccagaagcaacactagtgatttggatttgtttctcatcggcctcatctctctgcaaaggatgtgagaaaatgtacttgggcatacctctctctacaaaaccagaaatctagggagaaaagggagagttttattacagaatgtggccattcctgctgcagcctgttttcaagctagtggtaaataatcctgcagaggtcaggcacggtggctcactctggtcattccagcactttgggaggctgaagcggatggatcacttgaggtcaggagttccagaccagcttggccaacatggtgaaacgctgtctctacagaaaaatatataaattagctgggtgtggtggtgcgtgcctgtaatctcagctacttgggagactgaggtgggacaatctcttgaacctgggaggttgaagctgcagtgagccgagatcgcaccactgcactccagcttgggtgacagagtgagatcttgtctcaaaaataataataataattttaaaaatggccaggtgtggtggcttatgcctgtaatcccagcaatttaggaggcctaggggggcagatcacctgaggtcaggagttccagaccagcttggccaacatgatgaaactccatctctactaaaactacaaaattaaccaggcatggtggtgcacacctgtaattccagctagttgggaggctgaggcaggagaatcacttgaacctgggaggtagaggttgcagtgagccaagatcatgccactgcactccagcctgggtgacaagagtgaaactcggtctaaaaaaaaatcctgcagaaagggatagactgcattgggggctatgccagggtggcagagggagagaataatatctttacatacttttaatgaggtatgcttctcttctcccactagctcagtgacattcattggggggtcaggcccagactaacaacacatggggtcagttgaagtggtgaatgatgatttttctttttaacatgactttcatgttgatcttacaccaaagtgcttttaaactagcaaaagcttagaactagttgagggaaaagtattgctctcaaaactaagcgggctttgataggaagatgaagacagaggttggatacctaggcaaagagtctgtctcagttaacattggaataaggaaggctgcaggatagctcctaacactggcgaaaggaattaacactgcccacgcctttttgtttgcttgtttcagtttcttattttgctgtagttaagagcctggaaagagaaaaaaaaatcagatactgctgattgtttcagcaggttgggggaaaaggagagaccgtggttgataatccaggctgatggatgtgaggggtaggaaagaaatctccatcatatgtatgagaatccaaaggcagaaagctgtttccatttggaatcctaaggcgaggcagcttcccagactgcctgcccaacacggagcagctccagaagaacaggatggggcgggggccaagcgcagaagggctgggaggtccccaccccaggccccctcatttccagtgaggcctgcagaagacccagaaaatttctcataggccctgaggaggaaaagaacagaaaattagtaagttgtatgcctgccgagggtcaccaaagtgtggggccaggagaccccgtagcagaggcacaggaaggacagcccaaagctgagagccagt

SEQ ID NO: 33375 - DNA, 2300 bp, Homo sapien
tttttcattttgaataattcatatttcctgttttaggattgcagtggaatacatgttttctattttctttctttatcttttttttggtttctttcttcatttgtttctattttttctctctattttcacataagcatctaatgtttttggctcacactaaagtattttaaatccatttctccattatcatttctgccataacagttggaagaaacctaagttcttatgtccccagtctcttttgcagtgagagcagccatatgctttagttctggaaactaagacatggcctgaacttgctaagagctctaggaaggattttgcttttcctcatgtcagggcatgttataaggtattacctgatataattcctggcatggctccttcttccttctttcttgaaggcagactgcaatgctgaaagctactgcagtcatcttgcaaccaggaagtaaacatgagaaatcccaagagaatttcagaaattgtcaaaccactgaaccaatgctagctgcttccctcatgactacttgttatgccagaaaaattatccaatatttattaagccacccactctatatagtgtttcctgttattttcggttggaagcgttcctatcagatgatgccacacacataacatgcataaaccattgttagtaattattgaaagttgagcattaagctataaattaaaacacaacaatgaagacaaaatgcaattcttatcttgaagaagcttatggtgaacattttataagttaagccaataagaatcaaaaacccttctgatattagttgaaggtctgcaactaatctggactggtatgtttcttactgattcttggcgtttgttttctcatatataaaacaagggattgcattatttcctgggtctattgcaggcataaatttccaagtttattagaataaaatgtattttaaattcatggatttataacacttctgtcgaacggtattttaacatttgtattccatggatactttggatgcaaaagaagccttcgcacatttcctgttcacgcttaggattctgtgcatactacattgaaaaagctgggctatgagtttgagcattttgatatggcattctaaaacttcatttacttagcattctaaaagtctagtttatttgtttacctactgaacagcataaatagaataccgggaaatatcttttaggaagaatttttcccaagaaaatcctatacaacttcagtaattttcttcccttttatgagcacaaaattcagacaaaaataattccattaatatggaggtatggctgatgcactaggtttgccagcccttttgtgatatgactgcacaattgtatgaaattgccagaaagaattttcactgatagcaggaaaagtattttaaaattgctcttaggaggcataaaggacaacaaagtgttgctatactgtttaaaagattatgaacaaatgtgaattaatggaagaattgatgataaacaacatgaattgcagtctactatatgtttccatctcattttgcaatagcaaggggttatgtgtgctgaccaagtgccagttgctccaaccaagccttgttttttttttttgtcatgatatgttgatgcttaattctaaattgtaatttggttggtgttggaaattgagatgtacgaagaagccatcactggaaatagaaacgaggcaaaatataaaagaaagaattgatagccagtacagaaatttaacacagaaaatgaaaaaaaaagcaaagaagaaagaatggtgtgtgtgtgtgcgcatatgtatgtgtatgtgcttgtgcataggcagacatatggagtaattaggcagggagaataaaagtgcatcagtgtagaggttgtgtcctttttatgagatgaggaaattatttctggacaattatcattacttctagttttccagagtaatatgcagttcacaggctggagagccaatctggtacttaaaaaggagagattcttgctttctttgaagcagcatagcgtctcagggtgttggttgagtaccacagaaacagagatgcatgttctctacatgctggaagcagtcatcctgttgctaaggaaacagcctcactcagcaagggtcacctttggaaacaacggcaagacttcaaagcagatcaatagagaaataccaagacctgaacttcctagcaaatgctctcttctattttaaatatccttttcaacaaatgtttgcttatgtgatttctgtttagtgggcagtagcaaggcaaaattgaatgtgtaataag

SEQ ID NO: 33376 - DNA, 2300 bp, Homo sapien
gacttatatgtaactatgcacaattagatattactgataatttcatttgatccaattattttcagtctacctgatattaaaagtattttaaataaaaatatctaggttagatccacagttaccagtgtgatataaatgagatagggtgccatttcaatccatcaaattatacatatatatatttttgatatgagttacagatatttctccattatgtctttaattttggctttttttttttttttttcgagatggagtcttgctctgtcgcccaggctggacgacagtggcgcactgcaagctccacctcccaggttcaagcgattctcctgcctcagcctcccaagtatctgggactataggtgcctgccaccaagcccggctaattttttgtattattagtagagatggggtttcaccatgttagccaggatggtcataatctcctgacctcgtgatccacacgccttggcctcccaaagtgctgggattacaggtgtgagccatggtgcctggcctcgaattataatatttaaaagaatttctgaaaccaatgttgacacagttatgataaaacttttacttgtatttactcctgcctggtggaagtgaaaatcaatatatcgattttaaaaagcaatttgcaacccattgtgagagataggaaagtgtagtttcccttatatacaacttgtgggaataaattaggaaataattaaaaatatcacaaaaatgaagaaactctttaataagttaaaattaatttaataatttgaatcaaagaatgataaatgtatggcaattaaatataatttactaagcttgatactaaattttatgtatgctataatttttaaaaaattttcagaaaaattttgagagaaaaatgtgagttttctagatttttctgtgttgtttatattgtatttattttttaatgtctcattagtagtttttactaatgtgatataatttgaatgagccatgatagtgtccatgaaaatctattttggttgtagtgaatttttcttgttatggagaacccactttttgagtcatttgttctatttagcttagcaatagatgggaaagcgttgtatgattaagattataaaataaaccagttcccaaagaccaatcagtaaagttcctattttgataactaaaattctacctgtagaaattttttaaagcaaaaataaaatccaattgcatattaaattatatttttcctgttatatagtaaattaaaattttgtattcattcattcatggaggttgccatctgtttgggaagaaagctggtaaacaagggcataattagtattttgtagtatttgtagaaaattgttaaagagaaaaaatgaaaaagggatgcagaaaaaaattgtcaagagatagatggtggtttgatattttatctatttggctaggaagcctgggaggaagtgtggatatgaaccatgttgctgtctcaggaaccatattccagggagagtgaaaagcaagtgcaaaagccctagggaaggagcacccctggctatctgacacataacaagaacagcagagctgagtgaaataattgaaatggagtgttatgatctgaatgtgtccctcaaaattcatgtcttggaaactttacctccaatgcaacaattttgagaagtggcatcttttgaaaaatgcttaggtcataaggatgtgaattacagcccttattaagagagcttttgggagtgggttcacttcctcttgccacaacatgaagacccagcaagaaagccctcaccagatgccagtgcctcaatcctggacttcttagccttcataactgaactgtgaggaaataaatgcctgctctttataaattattctttctgtggtgttttgttatagcagcagaaaatggactaacaaatagcatacaggaggtgataatgttaagaaataatagaaacccgatcatgtgtagatcctgtagatctgtttaagaactttggatttttcctacaagagtatggatggtatttgatcattctgagcagagaggtgacattatctgatctatatttcaacaagaaactcttgtcactctgttgcagatagactgaagaggagcaagaacagaaacagggagccagttacagatctatcccaagaattctggggagagatgatggtgtctgcagcagagtgacagcagtggagattgagagaaaaggtttgattctgtatttatcatgaaaataaagttggcaggatgtgatactgcttaagatataagtctgatgggggaaagt

SEQ ID NO: 33377 - DNA, 2300 bp, Homo sapien
attcaactagaggcagtcaaataaacagagttagggttttctagagaatgtcataacgtgaattttaacaattaaactataggacctcttacagacttaaagtttctttttctatcccttttatttttcatagctatttctttctttgggcactcagggcttcatcaacatagaaagattggaaatgtattctctcatacctctttcaataaacaaaaataaattaagaatttgtgtctggacactacacaaggagaatccctcatttaaaacagtagctgcataataaagaatatataatgcgcaatataatactggcatattatcttgatgctgctgtttccgttccacttttttctaaaagtttaaattttggaaatttccaaattctaattgacttctaacatcttccttaagagcaacagaacactgaaatgtgcaattccttcccaattagaaataattcaattcctgttctacctcattgctcctgttggtttgtttagtctttccgaaagctaaatcaaattaaatccttccacatttcacatcactcaagcaaaatagtcaaatataactttagccgattcaaacattcactctcagacccaagaaacttccaagaaatacaacttaccttatcttttcaacctctttgatctttctcagggaagaagaaaagaggggagtaattagaaattatacaacctttaacaaaagtttatcataagtttgtacaaggatacagattttttaaatcttcacagagacctgctaaagtgaggattgccttccaggttttagagtggcctcctgaggctcagagaagggtaaaagcttacacaggttcacatgtaaaggtatgtcccagccgtgatttgaatccacgtcttcttgcctttagagcttgtacaccctatcactctacctctcttagtcttaagtccttgttcctttaacattctgaacctgggcatttgtagttttatcaactaagcagaaaaagtaatatctttctcttagtgtttgcaatgatggagggtcttgtacaattcttattatatctgccaaggggcccttagactagtcattcaatttagataaactcctacacttgtttactttaaataaggatgcttgatgtgctcaatgggtgagtgtgggtgacttcgtgcggggagaaagtactaaagttatttcagctgtccagatcaattttgaatgcagcccatcagaccttaaatccctgttatcaaaagctatgtacattgcaaatcgatttaatttattctggagtgataagaggtgagaagtttgtgtgtgtgtaggtttcctggcacaatcaaagggggttggaaaagcatcacagcttctattcgtcttcacaaatataaatgctgacctccaaggggaagctctgtctgatataaaccctccataccttgagtactttgggtgaaggcgttaaaggacatcactcaagcgaaatctcatggctaccactggactatggatcactgatgaatgagccagcagttgaatgtttagcaggctgtgacgactttgcacgggaatatgaaaatttattaccagcttgccacatcagcgcctgccctgccttatttcctgggtccctcccggtggctactcccactccatctgacagtcaaacccctctcgctccccagtttcccctcccccgcagagaattgatggtctaaactgtcacggagtcctggccgtcatttttcaagaaatctggtacccaagatgatgccgttggatcagggattttatttaggagtagtagtatgcgctgaattgttttctacatgaccttgctgagggggttaaagggtgtccgttttgcttgctgtggaatttgtgcagccccaaaagtatgcacggtggggggttgggggggagaaggaggcagaagggaaaggagccgcggagaggagagccagggagaagaggaaggaggagagaccgggagagcgcagcatcaggcagacaggcgccgccagccaatcagaggcgcgctcgggagctgcagagacccagcctcggagcccagggctcgaggtgcgcggagcctgagtctgggctttccgaggacggcgagcagctgtgcccagagctctgggaaagtcccctctctttgcttcttataaattaagttcctttccaccagttagggcaagtccgccaaggtaaggcttcaataaatgacactttactctctagtgacatgaatatttttgtgtacagcggggctgctttacccagttctgagtcaa

SEQ ID NO: 33378 - DNA, 2300 bp, Homo sapien
taatttaaaaatttttatcttcctgaaaaaataatggttgcttaattcttctttctagacttctccctgcttccagatcacaactttcacttggcctttctctgtttgactagtcactccttatgaatcacttttgctgattcttttcttattttctaaaatgtaaatattatcgggtctcagggttcagaattctgaacttgtcttagtctatgttcactttttgggggatattatatagacgtatgatagatttatataaactctagcacacgactattatgttattgagctggcactgcatatcagcaagatattctttatttcaaaatatttccaagatatttttaggtacagtttatttgacagaatgtctaatgtaacttcaactctccttgattcagatagtaagttaattgatgatgttgcatatatctgggtaaccttgagtgaggagcgtcccgcttatagacatatacatcacaaatgcttctaaaacaattaacaggaaaacccccaaaacaacagcaaacaaaattaagtcaatgaaatttcaggcagcaatcaataataatgtaggtcttaaccaaagactgttggggtaaagaatgaaggaatcacaaaacacatagcaaaattttcagaaaatggtctttatataattatcttttgcctcaaaatttttttcataaagctcatcctccagcaccatctcactcatcccctgcacctgccatctccacatgttctcaacttctctctggacttgcgctagcttttgtttgctttgtcaatatttccctagcaattagtattatgattactgacatttttacttatattcttatttctgttattgtcttgccaacaaatattcataaaacgttctcattgaccttattactttatacctaacctatgaggctgtcattgttaataacatttttgaaataccttttgttgtaatactttgataaagaattacataagcaaaccatttttattactttattgtcatgcctcatgtatcacagctaaattctgaaatcagactcttggcttgagaatgcaatcaatctgccagagacagaagtgtgaagtggtttgttgttttagttgtggggcggggagacaaaaaatgcatgtattgaatataaaatgctttaactaaatttgaaaactaaaagcacagtcctttatagacaaataacaagaaaaagactaaagactaatatgttggccaagaattaaagcatctcagctggggaagatgcatataattcctttttcaataaatgggagtactgtgggcatcccaccactgaaaaacatgccagaagtttatctcctaaatgattcagtatggtgaatcatgactcagtatttcccagaatgaaataaaatgcttaaaaatactacaatttactaaaatgaagaagttaaaatatcacttgcctattagtagcatttgtgttcacctttattattagaactaaagaactgggtctccaagaacagagaagaaacaatgattgtaatgtgtctgatttaagccaaagcaaccttcttttcatgagaattttaatttaaaaaatcaatagaaggattctaaccacatcaggttctcagtgttggggaaaaatttcagagcatgctaaaaataatctttgcagtgcctgctccaaatttcagtgtaaaattcccccataagtacaatttcaaaatcaaaattttagctaacaacaaaaggcatgaatgtggatgtaatgtattgggtgaaaaataatatgaataatgagcattatggagaatgacttttattttattttattttttttattttttgagacggagtctccctctatcgccaggctggagtgcagtggcgtgatctcagctcactgcaacctctgcctgcagggttcaagcaattctcctgcctcggcctcccaagtagctggggatttatttttctcaagcaattctcctgcctcggcctcccaagtagatttggggatttatttttcaatagctagtgagaattcctctaacttataaagcacctgctttatgctaaccactttttagcagctttgctatcaaacatggcaaaaactatctgataacagccaggcatatagaaagcacaatctaatatatgagtctgaattttactgtgtcccttgctgaaaaaaattcagccattaaaataaccaaaaaattcataatcaagaaatatgtttctgtcatgaatagttgttttttactttagagtgtaaagcatgagatgattatttgga

SEQ ID NO: 33379 - DNA, 2300 bp, Homo sapien
aatctggctattactatattttcagtaattatcttttttatctctaagtcatctagtgtatctgaaagctatttattatcttttttctgatttatgacattttaactgtatgaaattccatagtatcttttatttacaaaggattacttccaacatcatcaaaactcacattaaatgacatatttgattatccatgtttttaaacttagtataatgctttgaagaaatactaataaaaatattaaaaacagattttcattaaaagtcacctgaaattaaatgtgcctggtttaaaaaattagcaaacacagaaaacttttagatccaattatatcttttaaataaaattaaaaagtaactgagaagtgacagacttattttttctgttgtactaatagatattcttgattttcactagataaaaactgaaattgggatatagattgttttcaaagaaggtatagaatcaaacaaaactacgactatgaatatagtctaatgatgatgtttaaaatataaataaatttgcttgaggaagttaggaaaagttgttatttagaggtactagatggactaattattattttttaaatgatctccccaaaggacacaaagtttcaaaatgactttgacaagtttttgtaatgacatgaaataagtaagatgttattccttttcagtatgctattaattcctctgaagctgttggttcgaaggcttacagaaagaatggtgtagcagcatcagacgataattatatcactcttaattttcaataatttgatataccaaaatgagaggcctccattattgagtgttctttaggttttcttttaaaaagaaaaatatcacaaagcttggtttgtttatgatgataatccttcacttttaacaacaatggttttaattttaggaacagtaattttggtagaatctaacaaaacagaaaatcacaagaattaaatatgttagaggtagaacctatttattttaactgcatgaatgtatccacttcagtttccggctgtgactgtatcgacgccaacagcactctgcttcagttcctcttgacttgctgcaatgatttatgtgtatgttaacactaattcatgtcccaaagtgacaacttgaaagactgcaaatgttgcccaggtggttgattatcagagaagttattgaaatacaagaagttaagtattcagtgggtggtaccagtaggtcaaacacaattcatcacacccgatacaaatgcccttggctagatctggttgtatttgtaacattatcaaatgaattacatattgcagtaaaaacagattgaaggagctatttctctgcttttgaccttgactctctgctgacttaaatatcatttggtgggattactgtactctcttctttatttcagataaaaaatgttgcctcgtgaaattttcaatacatttctcaaaatttttcataatcatcaaaaaattatcaaccttgaggcgaatatgtgagggaggtttgggaacaaaatgatgaggtgaaaatttgatgtaaatagttgttcattttacttttacagttttaacggtgaaaaactattttgggtcatggctgtatgttcattaattcataagagggggttatgcacacatcttcatgagaaaacatggtatcagtatcaggagatgtccaggctgaatatttaaataataaatcaaaaaaattatttcataactagccattttcagaaattattcaactcctctgtttataagccataaagaaccattctagcagtgatagtcttaattccattcaagtgtaaatgctaatcagtttccagtttggtggttgtggactatgacaagcaattatgttcttgggaccagggagagaccattttctgcttgtggggctgaaacatgcaattggggcagcatggcaaacagaattttaagataaacctcagcatcctgtccctggcatatacactacctttgagtgtaaacggggactgcgattatgatgtgatagtcattctcatcattgttacctaagacattagccccggcaaccacagagagatattttccagctggttttgaggaagtgagctgccatgtactaggccacgtggcaagggcctggttggggacctccaggggttgagagcatcctctggacaacatggaaaaagaaaatgaaaatggtgacctcagccctatagctagaaggaattgaatcctgtcaacaacgatgtaagtcttaacgaaaaccccaagctctagaagaaaagatagcccagttgacag

SEQ ID NO: 33380 - DNA, 2300 bp, Homo sapien
gagcaatattgtctcaaaaaaaaaaaaaatgaggaaggtcagtttagaatctaaatcagacaggtctctgtagatagggatagaaaggacaggtatatactaccaaagttccaggatgataatatggtattttcttggaggatactagaaacttgataatagtggagaaatgctaagaacagagttttgctcagaaggactcatattcaagggttcatgattttcccttcattttttcctcttttgtccttttggacatttctagaaagatatacatatatagatatggatagataattttcctgtttgtcattctactttcttttaataattcttaactgttcaaaatgttttagatttctgtgtttccttattatttaaactcaagtgatggagtggcagaaaaaaccaactcttccattatgtacttcagtacactcttgtactgcagtgtgtgcaggcatggggcaatacactttccaggggatttataagacagtataaaataaatagcaaccaaaccaaattagcagtgtttggaggcaaaaatggaaacatttagggaaacatacaacataaatagagtgctgttgaatgaatgactagcaggatagttgagacaaagccccctttcacataattctaacaacgttacaatgttactggaggaattcaaccccatgtttaggaagaggttaatatttgataaattttctacacatctctccatctctctgtgaaaatattttattttacttgagatgataatataaacagttattttcaggaggtacaaaatatattaattgtataatttttttggtagtaacttaaggtgaaacttgctcaataggggaaaagtagctgtcataggagcctaaatagtggagtaggcttctgctgccataagccaccaagatttataaagagaagaaatagtcatggcatctgtttgctcaactaacaacattaaatttctatgtgcaatattggtaatgatgcatctaaaccttatgtagtaaataatttatgaatcttttagggtgtcagagttttttggctttagtctaggtagaaaggtcatcgagtaagtagacagcctatacgtttaatgaatatttgtatttgcgatggctcacgcttgtgatcccagcactttgggaggccgagatgagtgaatcaggaggtcaggagtttgagaccagcctggtcaatatggttaaaccctgtttctactaaaaatacaaaaaattacctgggtgtggtggtgcgtgtctgcagtgccagctacttgggaggctgaggcagaagaaactcttgaaactgggaggcagaggttgcagtgagccgagatcacgccattgcactccagcctgggcaacagagtgatactccgcctcaaaaaaaaaaaaaaaaaaaaaaaaaaaagcaaagggtgtcgcctgtaatcccagcactttgggaggccgaggcaggcggatcacttgaggccaggagttcgaaaccagcctggccaacatggcaaaacctcgtgtctactaaaaatacaaaaaattagctgcgcgtggtggtggacgcctgtaatcccagctacttgggaggccgagacagaagaatcgcttgaacccgggaggcggaggttgcagtgagccgagatcacaccgttgcactccagcctgggcgacagagactccgtttcaaaacaaaaacaaaaacaaacaaaaacaaaaattagccggcgggcacctgtaatcccagctactcgggaggctgaggaaggagaatcgcttgatcccgggaggcagaggttgcagtgagctgagattacgccactgtactgcagcctgggcgacagaggctctggcttaaaaaaaaaaaaaagggaaaggatgttacagaaactccagatactactccccttcagtggtctgagttgcgcggcgctttcccgcctgtccggtagggggcgccgcgcagaaagccgcagtccctctgcggaaggcgccgctcttggcttcggcggcgccgctgtagcttggaggcggtacttcctccagcatttgccgcgagttattggcaagttcccctgcagtttgggctgtctctgtggctggttctgcggcgtgcggccagccatggagcgctctgggcccagcgaaggtgggtttcatgaagcgagtcctggcggggtgggccgtgtcgggggagctggggcgccgcactaactaggccgcctctcttttcttgctccagtgacaggctcagacgcatcgggaccggacccgcagcttgcggtcacc

SEQ ID NO: 33381 - DNA, 2300 bp, Homo sapien
gcctatcatatgaattttgagggaacacaatcatgcagtctgtagcagatggtaataggctgatatattacacttgttgatgtaaatctgataggtttctttctctccaaggacagctttttaaatatttaacagtatcaataatttttcagtttctgtgagaattttataatttataatttgcagacttaatgtataatctattttgtcctaacaattacaaatatattttttatttcagattatatatattcctaccagatggagataattacagctttaaaaatttttattttttcattttatttcacatattgacattaaatttttattgacacataataattgtacatatatatggggtacaatgtgatgttttaatacatgtactcaatgtgtaatgatcaaatcagggtaatttgcataatgatttttctgtagggagaaaattcaaaatctactcttctggctattttcaaatatataatatgttattgttaactatactcatcctactatgcaataggacaccagaacttattcctgggttctacatctgttaagccaaccaaagattggaaatattgggaaaaaaaattgcgtctgtactgaacatgtacagacttttttcttgtccttattccttacacaatatagtacaataactatttgcatgacatttacatcggatattatgagtgatctagagttgatatgaagtatatgggaggatgtgcaaaggtgatgtgcaaatactatgtcattttatatcagggacttgagtatcctttgttatcctcaggagatcctgaaactagtcctccatggatactgagggctgactgtctagtcctatcctcacggaactttcattgtaatgagggaagactgactataaacaaaatatatgtaataggtggtggtaagtaccgtggagaagtaacaaatggggcaaagtgagttatacagctccatccttagaaaccttggagtacttttcttagtttatactcgtggtggtttccttttgtctcctttattacatgggactctgacatgtgcccatagctagggtggcagtaggatctacccgaaaagcgtcctgctgatacaggaccaaagcatcctgttgttctcgagcctataaaaagagctaatggtcttgcttctcttaactgtggcctcctacactgtgttttggatgattggtgatgtcttggatattctgtttctttggaactttgaatatacaacactttactagggaattagcaatggaagcagagcaaagatgtacagaggaaacaatgcataactctgatggaattgaagtcatgaggcagcagagagcttaaattagagctttaaaaatttttattttttagagggaatttaattgggagtaacagcagtaatagttaacggagccagaatgcttgagtcatataattgcaaagcagagttgggagcaacagatgctgaagagtagttgctgtagttcctctttgggtcgtaggagcagttgtcatgttactatatagctactgaatgaagaagagttcttagtgaggcctgggtgaacagctcttcttagtattctgtgtgaccccatttgaccttttaacaaatccctaagtaaataaatagcccctaaggtaaactaagtttttctctgctatttttttgcttgagagagctataactgtagtagacttatatttctgaacattttagtgcttgccaatatttggtaatatttatgtttcctatatttgtaatgaacattcttcttccggtacattttttgttaaattattgtttcatgcataaaagttcaccttttattgtataaaattgactcagattaatttatacacattgacaatgggtaaatagagcttttcagattattaaaagctgaaggatgcccatgtaagcaaaaacaaaaaagaaaaaaccaacaaaaataaacccaaacccctcaaacaatttcgaacacaaaacattcttctcacgccggcatccctgcttgcaggtgtgaggggggcaggaatcagcgaggtgtcctgggctgagtccccggagtgggaagaggtggcaggaaggggatctgaggaggagaacaggggtcctggtggtctgtgcttcttcccagacacgggagctgtagaggagacctctgcagcagatgctaggggggccactaggcctaggcagtcttgggacttgggtctgtcctgctgtgcatccatagtgggtgctttagaaaggggaggcccacgcgaagcccccgttgcaag

SEQ ID NO: 33382 - DNA, 2300 bp, Homo sapien
ttgatagaacctctgcagtgctgggtgtggtggctcacacctggaatgctagccctttgggagaccgaggtcagaggatctcttgagcccaggagtttgagaccagtctgcacaacatggaccccatctctacaaaatatttaagatgagttgtggctgggtgcagtggctgacgcctgtaatcccagcactttgggaggctgaggtgggtggatcacgaggccaagagttcaagtccagcctgaccaacatggtgaaaccccgtctctactaagaaaacacagaaattagctgggtgtggtggcatgcacctgtaatcccagctactcaggaggctaaagcaggagaatcgcttgaactggggaggtggaggttgcagtgagccgagattgtgccactgcactccagcctgggcgacagagcaagactccgtctcaaaaaaaaaaaaaaaaaaaattgttgggtatggtcgtgcttgcctctagtcccagctacttgggaggctgaggtaggaggactgtttgagcccagtaggtcaaggctgcagtccgccataattgcaccactgtactcccacctgggtgacagagtgagaccttgtttcaaaaaagaacctttgcaatgatggaaatgccccatgtctgcactgtctgaaatggtagccactagctacatgtggctattgaggtcttgatatatgactaggataactgaatttatttggtttaattaaaaaaaaatttttttgagacagccgtactctgttgcccaggctggagtgcagtggcgtaatcacagctcactgctcaacctcctgggctcaagtgatccttcctcctcggccccccaagtagctggagccacaggcatgcgccactacacctagtgaatatttagcctttttatagagactgggtttcactgtgttgcctaggctgatcttgaactcctgagctcaagtgatcctcctgcctcgacctcccaaagtgctgggattacagacctgagctaccatgcccagcctggtttagtttaatttcattttacattcattcattcattcattcattcattcatgagatagggtcttgttctgtcacccaggctggagtgtagtggtgcaaacacagctcaccacagctttgacctccgggactgaagcagtcctcccacctcagcctcccaagtagctgggaccacaggtgtgtgcctccatgcttggctaacttttgtactttttgtaggctagtcttgaactcctaggctcaagcagtcctcccaactcggtctcccaaagtgcttggatgacagacatgagccagcgcgcctgacctaaagacatatttttccttctagtgtagttcagctttaagactgtatcagcagatagagacggaaaagtaataaaaattgagtatcaggttatatttataaataaagcagttactaattgatgttttttttttaaacctcctttttaattctgggttacatcattccctggctgtctttttttgttgttgttgttgttgtttttattattatactttaagttttagggtacatgtgcacattgtgcaggttagttacatacgtatacatgtgccatgctggtgtgctgcacctactaactcgtcatctagcattaggtatatctcccaatgctatcccttccccctccccccaccccacaacagtccccagagtgtgatattccccttcctgtgtccatgtgatctcattgttcaattcccacctatgagtgagaatatgcggtgtttggttttttgttcttgcgatagtttactgagaatgatgatttccaatttctccctggctgtctttaccctagcatcagtgagtcctgcagtcactacagcccccagtgaggacagatattttggtcaccatcaagtggatctttatttttacctaacatttacaattctgccagttcttactcttaattctctttgccttgaatcccaggatccaccttgatgttcagtgaagagtaccagaaaagtctgctagagcagtaccatctgggtctcaatcaaaaacgcagaaaatacgtggttggagagctcatctggaattttgccgatttcatgactaaccagtgtaagtggcagtttagcgcatgggataatgtacccgtcctcattttttcaggttgccttgcccattctggacattttggctgtaagaatattggaaacaaaggggggaagctggtttaatccatgtagattgtgttgagaatttcctaggaaaagtaagttgtgcttaggaagtag

SEQ ID NO: 33383 - DNA, 2300 bp, Homo sapien
ggtgccagcccgactaccagatgacctattaattgagatgagtccccaagaaagtcacataaaccaccacctccatgcctcttctgcataccctgcataccaaaatttctcttcttaaaaccctgctttctgcccacaaagctgaagtgggtcatttacatatgaatctagccctttcccattgctaagcttgggaattaagcactttctttttaccgccctcgtgcttgttatttgattttgcaagtggagagtgggcaaacctgtgttcagcaacaatgtctcttgaggccttccaaggaaagatgagatttatcttaaatatacaaagccttctgtccccacttcctcttaatcaatgaaatttgttattttattccttttgttgattgtatatttaccattgtaatatacatcgaatttgagaaggacttttagttgttactttctgttttaacaacccttggctttctcccccattgtagcctactcctgttttatcttgggctacttctttttattgctttccttttcatgactactgaccctcacattctttctgttttgcagaaatttgtagaaatttttcactgagtgttttttcttttatcttttttttctgctcttttatagttttttcttttttatatcattttattggtgctttggagagaagaggagaaacttaaactcaaacatgttaaaagaaaagcaattcagcctaaccaacatggtgaaacccaatctctactaaaaatacaaaaattagcttggcgtggtgcataatcctagctactcaggaggctgaggcccgcgaatcacttgaacccggtgttaccgggggatccttgtttttagagcgcccaagatggtggcagtcacttccaagatggtggcaagcctcttgttctctgacctggggttcttggcctcacggattccaagaaatggcatcttaggccgtgcgtgagtgtcatagctctattagaagctgtgggtcatggaagagaaccgttgaacccagcgactagtgttcggctcgattaggacgaacctgggcacttagctgtgcaggaacaatggcaaaactttagcccaatcgggagtggcaatgggcgcctagctggatcagaagcacagctgacaccctgccagatccagaagggtggaagtcagcggcggatctgcaacgggcaaacagcagtggtggacagcaagcggaagctcagctcagctccagccctgagaaagaccagaagactgtgcagcagcaagatttaatagagtgaaaacggagctcccacaaaatgggaggggacccaaaaggggttgccgtcaccggctggaatgcctaggtttatatcccgatcattgtccctccccctgggctctcaggcgatagatgattggctatttcttcaccttctgttttagcctaattagcatcttagtgagctttctttactacctgattgggcaggtgtgagctaagttgcaagccctgtgtttaaaggtggatgcgtcaccttcccagctaggcttagggattcttagtcggcctaggaaatccagctagtcctgtctctcactgggagaggaaggttgtagtgagccgagatagcgccactgcactccagcctgagcgacagagcaagactccgtcgcaaataaaaaaaggaaaaaaaaaaaaagaaaagaagcaattgtattaactgtcttatgtacttttttgcatcttaaatattctataatacctttttttcatattttgcgattattaaaagtcaagttcccaagaaaatagattctccaatagggattagtgtgcatcaagtttattaggaagttgtaatataataagaaatatatttgatctctgcccccatgacccagcatacagcttctaaaactcttgcaatctttgagatgatgtgtcttttgtatgctagtgagaggactggtgctggggggcagttactggatagcattagcataggggctggttgccaggggaaccaactaagtgattgtgactttcagtccctaccttgatattctgggagaaaagagggattggaggttgagtcagtcactaatggccaatgattgagtcagtcatgtgtatgtaataaggcctccataaaaaccgaagaggatggggtttgcagagcttctaggctggtgagcacttggatgtgctggaggcatccagagggtggagcacgtggagagggcatgaatgctcagtgcaccttccctcataccttgccttatacagcgtttccatctggctgctgttg

SEQ ID NO: 33384 - DNA, 2300 bp, Homo sapien
aattaagcatagatttggagcctttcctagttttcttttcttatctttctctgttttgttcttcctcttttccttccttccttccttcttttgaagttttgatttgatctagccacaaacttggcccttgtttcaaaataattaataaggtacatttagcaaggagaattaagtacaatcagaaactgtaaccttgggatattgatttgcttgtagaaaacattgattgtctcctatagagataaattcaactattttggctacatccaaacacttaatccaaagattaactctgatccttgtttagtctgctaaaaagacttgtaagaaacattgccagaaagagtgtgtgtgtgtgtgtgtgtgtgtgtgtgtatgtgtgtgtgtattcacaggaaagagaattggactgaagaatgaagggactttatttcttctcccaactgtgatagtataggccacatgatgtgtgtaattcatttcatgatctctagctgtttttgtcatctctgtaatggaaagcaaaatgagattttatcttaaatagcttttggatcaaaaattctaagcctatgaaagatgcaatgttaatacttctttgttgaattttccaaaaatagggctatgtctgaatttccacagctgtaaattgatactgttagatgtaaaaaggtgactagaatgtagtatcaaaactccaggagtgtattttcctgaactcttaatctttttctagttctactttatctcaattgttaggctgatcttagataattgattgcaaataaagtttaatacagaactataaattgcaattaggatttatataaacaactcaggatagatctggtgggtcattcctttggaaaggtatgtggtagatatattgacatatcataaattttaggcttatcatcatttattggaattttcacaatgtagttggcattctatgaagacgtaatggggtttatatactttggataacgttgacaacctgtatgccagttgtagaaaatccaatttttctccctttcagcttgcttccttgttttgacaagtttctttaaattttctatttttgctctttctttgtaattctaaatagtactacttactatcccaacctaaatttgacagtatcctcacttttttagtgtccttttataaaatgagctttattgcgttatttcgtttttcaaatatatagagaatcctaacatgtttgtcctttatatacatctctgctgcaaagcctatgtatgtagaatcactctgtctctaaaattgtgctttaatggctgtaggacaggtccttgtttgttaacatacaaatgcaaataaacaaatgtaaaacacataattatttttatccccctccattgaatttgaaactgagcagaaggtggaatagtgaaatcacatgagaaatacaccaattgaaatcctttcttaaccaaataattagctgaaagtaaggctgtatagttcttttcactcttcttattttccattagctgttataacaaataattgactttctggggttctttttactcttcttattttccattaattattataccaaataattgactctagacatttttaccatagaagaaagatttaagagtttcattcgttcaatatgctgttttttaagcaaccattgattaaatatttgtagtacattctgtgctgggtgctgaggatagggaaacgaatgagggaaataaatcttaacaattaaagtacagtagatgtttaagatcctgacaaaagaaagaaatacaagtaagacatacacatacacccacgcacaactgtatttactacactttgcaaagagaaaaacagaatttttctgaagttgattcatttaagtgtcagtcatttaaatgtgttttacatatttcccgaaacatagaatgaacctttgagatttatattttgttggtcaaatatagttgtaagaaggaagtgtcttagactacagctgatgtttttttacctgattctgtaagcaataaaagtcaaacattgccagtgtggggtaacttatatgctaagaaaagcagctctgccctctgatgctaacacaaagagggttttaggcaaaggcagctgttcttcatcatctatattgagaaatagtagtattgcttttatggacatggttacttcctacagcagaaagaaagaaagcaaacaaaaccccatatattgttttgagatgtctagaatgcagaagaactggagaatactttctgattttgttcagcattcaggatactgatggc

SEQ ID NO: 33385 - DNA, 2300 bp, Homo sapien
aaaggcacatttttcataccataaagtcaagtcagacatactagacaagctattggctaaatttgaaatgtatttctacttaatttttacttagcttttgagagttttgattacataagtaatgccaaaagaatgccacacaataatttcaaacaacagagaaatgtatacatttaaaagtgtataaagtaaaaagagaagtaagtttcctttcgcattcatccaatcctgtatatttgtatgtgttttttcacaactgcctctgtgcatgtgtgtgtgtgtgtgtatttgtggctgcatatgtataaactaagaattttagtctataaacttacagcaaatattgacacatttctttattgctgttattgtttttattaaaattgaatcatatcctgagccctcaacttgccattacatgactaagttcttcccatctcaggaatcagaaaatcccaagaatctttatcacaacagaatgttctgggagagtccccttggatttaggacacacaggtcaccaaggaaatggccctgtgcaaactcacaccatcatgtgaagtggacatctgcattctagtgctacacagactacaccgtctgcttcagagagtttgcaggtgatcttctctcagtctgtcctcctcacatttcaggtccttcacagagccaactcctgctcactgttatcctcagcctgaaatcacaaagcttccttatgtaggccttctttatcaactcagattaaattaaaacctttcctcctagtggacaacaaggcactttttaatgtatccattatcatacttctcaaatttatttttgccaactctctgcttccttattaaactatggtatccataagggtagcttacagtgctcaacatttattcattaattggacagatactcactgagcttctactatggtgaattgatgtgctggatgctgagaataaaacttctatttgaatggcatgattctctctcactgtccctacctttgagacagatgtgaataaaaaagctacacattattacttaattagaatgataaatgttatactatctatgtgagtagttggagcaagttagtctcgtgagagaggtgagtgtttcaggaaattctctggaaaaatttgtatgtaagttgagacctgagaagtaaacacaacttcattaggagagaagagcatccttagttctttagtgagactggaaggtgtgtggagtaaaagccttagagaggaggaggtggtggacacacattctgaaagacgaagtattctaaagccaggctggccagcaaggattttatattaccgaatcttttggggttttttccatgagaatactgtgaagccataagcaaggcagcaatatgagtagatctgcaattagaacatgatggtggacttggccaagatggtgaaaacaaacagaatagaattgaaaaatattttggagttaaaaataggagaatttagcgattcactgattgtgggtctgaggcaaagaagataaaagttaaaaaatataagaggaaaagcaatagttaacactcataatgcattgctaggtactaatcattaagtttctcacatgtattagtagatttaatttgcacaataaccataagaagtaggtgctattatactcaaacatcattgatgaggaaagtaaatcaaagggttaataaataacttgcccagagttgtacggccatagggtggtttggttccagaatctattacttacacattactcctgggcttttggaatgagaaactgaggatggtgttgctataaactggaacagggaacattggagaagcagtgaatctgggttaaggcacaagatgatttttgaacaggttgaatttaaggtgcctctgagataggcaactagagatgacaggtctggcattctaaagttgaatataaacagaagatatcattttgggacttatcaaaatagaaatgataatgaaagccatgagatgcatgaaagcattcaggattacagtatagagtaaaaaagaaagcctatatgaagtagaggaaggggtactggcctcattgtctagggaggaactgctagggtagtagaacaatgggattatgctgtcacaaaaaccaaagaaaaaacataatttcttaaatcatggtctgtcactgaatctggttataaaaccttatcttgcactagaaggatctgtagcttttccagctgagaatggggttcaggataccgaatcaacacaagaaaagagagaaactggggatgaagaaaactcagc

SEQ ID NO: 33386 - DNA, 2300 bp, Homo sapien
aaaaaaatccccaaatctcagtggtgtagaaataaaagctattttatccttccatgctacatgtccatctagggacaaataagactccaatgttctcttctttcaacaacccatgctgatagagtgcgcacaaatttatatttgttcttcaatattctgtttggaaatggcaatattcttttccattcatgtttcatactaagatgccaagactggggagaagtgcatccctcctacagggagagcagcaaaaatctgcaaaacacacacaccaatgtaatttattacatgatcattttcaatctctttcaaatctcaatgatttcattaatttgatcttctccactccaccttcagatgctcttttttcttcaacttttgccgtttgtactaataatattgcacatcttacaatgcgctaggaggggtcaaaacatttattttttaaatgacagatagtaaacattttaggattcatattgtaagtctctgtggctactacttgactctgccattgtaatgcgaaagcggtcatggacaatacataaagaaatcggcaccactgggtttcaataagtctttatttacaaaagcaggtggctggtcttctgttgtaatttgtagaccccttagctagagcaatgactgtccaacctgaatgtgcattggaagcatctggagggatattaaaacatagatcgcagtgtcccattctcttaaagtttctgatttgataggcttggggaagggcttgagaacttgtcttttcaacaagttccaggtgatgtttttgctattggtctggggaccacacattgagaactctcgacctgtagtacaaagacaatgttctgtagtcaatgacctattatttgtgatcaaaaaaggaatttaaataaatgaaaaatatactatacaattgagggaaaagcaatgtttatgattcattttttcatcagcatattcttttcttcacaaaatccaagtgaccaaacttagccagagactgccctgaatgaaatatttattggctacataaatgagttacaataaagttagcattcaccttgttatagtgacacagcatacagtgtgtaaatattacatttttccgtgcctcccttcacgtgatagacaggtcacgaaattgttttgtttgtaaagtctccccaagccatttcaatttgtcacgatacacaaagcttggctacaccacctacatcaacacatttgtattcagtgaaacaaaaagatttcagacagtcccaataattttattctttttcaacactagcattgaaaagacattgttatttgtgtacagtcctcctgtagggagacatatttttaaaactgtattgagactctgtactcttgagattttttatagaacaaaattaaatgattatctgaaatattgtggcattcttgatgtctgaataataaaatgacttagagtcttagaaaatacacgattcttggtgaatatatttaagcaaatgtttattcaatagttagcactttaatagtgaaacacaaagaaagataatcatggttaaagaatgcaaagttgttttgtggcttttggaggaataggttttcaacaataacacttttcattgtaatattttattgccattataatattctataaagttttaggtaattattaataaattctctcatataaagagaaattaacattaatttttaaaatcttacaatatttaaacatgacaaaattaaaacagaccagactaatgtatatagtcttagcaatcttgagttcttcatagactctgaaccaagttaaatcagcctagaaacaagtaagtgaattaggagaaattgcttgagcatggttattgtcaccaataagcatctgattctcgtttagacaattaaacattgagacagcttccaggtaaacgtaattaattgtcttgattcacaaaaaagactcaagcgacttagtggaggaaagactaatagaacccaagattttttcctcccaggtgacagttctctgatatgcaatagatctcaagcatttaaaaagcaaagcttcgggtgctaacccaggtgctatcactttctcagcgcctaatcttcacccgctgctaggctcgtttaatgagtcttctgagagctaaggagtcctcggattcattcaaagcattctacaatgaacgctaggggggaaaaagaacaaacaaaatacatttcaaatataggattcaattacttttcactactcaatgatgtgtcaaaggcacgctgtgttttgttttgagggcggg

SEQ ID NO: 33387 - DNA, 2300 bp, Homo sapien
caggatatggcaacatgcaactttgacatcattttcttggttgtctagatatatttttgccaatcgtctctttgttctgttcccaatcttactgctctattacctcattttccagaagtgctttgtccctctgtgcttctctacatttccccttctatcaaaagtctactagtttatggaagattccctccttctctttgtaagcccttacccccttctttcacagatcttgttgattctccagctagtcttcccaagtattcctcctccttccctttgacttacatagaacattttagagaaagttgaaggaaagagccttaagacatgggttagagtcccagattcactactcacttagaccttctcttttccctctagtatttagacactctaggtattttcaaggtttgaacattaactagagtcatgcatatgaaaacatgttgcaagccgtaaagaactaaagaaattcgtgttgtcttttaatatgtgactctcacattaaagggaatgcccaaggcgtcattcagtaatgaatctagtttgaaagaattgtcaagaacagcaaatttactgaatgcaagtggctcagagcaggctcagaaaccagtgtccccttctggagaagcaagtacctctggacagcactcaagactaaaactgggtaagaaaaaatatttgcggggactttagtccctctatgtcctctagaaaggttgatgagtatggtctacctatgtggggtggactttgcataggcctgggcttaagctggactcaactgtgagaccagaaggtagatgcagtattttgttaaaattatttatttatttgttcactgagacagagtctcactctgttgcccaggctggagtgcagtggcgcaatctcggttcactgcaacctctgcctccatgaaaatagatgttttcttgcctcagtcacccgagtagctgggattataggcgtgcgccactgtgcccggctgatttttgtatttttagtagagacagggtttcaccttgttgaccaggctggtctcaaactcctggcctcaagagatctgctcacttcagcctcccaaaatgctgggattacaggcttgagccaccatgtccagccttggatacagtattgaatagcatgtaagaacattaactttgaagtcattcacttgggttataatctacatagaagcactggggccttgggcaaatcttataaattctctgagctcctgaatggtaatctgtaaaatgagaccaagtatatatagaccaagtacattgtttgaaagcattaaattaaatataaatgaacccatacatgcaaggtgtccaataagtacctctctgataatagatattcttttgtgcatttctacatttcctcttccatcacatgtctactagtttgtagaagatcccctatagagatcatactttatcttagtgttgtatgtccaggcctttgttcaatgcctaagatgtaatgtgacctcaagaaatatcttccaaatgaataaatgcatgaatgaaccattttgtaagtagaaatgttgggaggttaatggtataatgagaacagccagaaactaatattaaataggcatctgcagtcagtgtgggtgtggggtctaagtctctctgaagcagtagttaaagagggggacactagagtatgtagaaaggtagatgccaatttgatggtagatttcacattttcttatgaaacaaggacaaacaccccagattcccaattttacccgtctactcttctccaacctagaactcaggaagaaggagactgaaagaaagatgtatagcctgcgagaaagaaagggtcatgcatacaaagaggtcagcgagccgcaggatgatgattacctctgtaagtgacacttttggccactcacacagcttgctgttatgtcctggtgcaataatttcatcatttggcccacaaatcattcccttactctaatgaattagagtacaggattagggctaaataatgtgaatgccaagctctttctgaagctcttatatcaaggaacatgcattacaactttcctaatctctgcttccctcacttccagattgtgagatgtgtcagaacttcttcattgacagctgtgctgcccatgggccccctacatttgtaaaggacagtgcagtggacaaggggcaccccaaccgttcagccctcagtctgcccccagggctgagaattgggccatcaggcatccctcaggctgggcttggagtatggaatgaggcatctgatctgccgctggg

SEQ ID NO: 33388 - DNA, 2300 bp, Homo sapien
agctcagcaatcagagataacttggacctcagttctttacttgatctaaagatgatcactactctttagtgtcttttcttcctcctcttcctcctcctctccttccccttccccttctttctcttcctcttctttcctccttcccttcctcccccttcccctcccactcctcctccttcttcttcttcttcttgataggggccggaagcagtggctcatacctgtaatcccagcactttgggaggctgaggcgggtggatcacctgaggtcaggagttacagagcagcctggtaaacatggtgaaagcccatctctactaaaaatacaaaatcagccaagcacggtggcacacatgcaatcccagctactcaggaggctgaggcaggagaatcacttgaattccggaggcagagattgcagtgagccaagatggcgccagcacactctagcctgggcaacagagtgagtgaaatgaatgagactacatgtcaaaaacaaaacaaaacaaaaagaaaggcaggagtaatgacttccaagttttctacacatcaaagctgtaactggaagactctcactatagttttttaatttctctttttaaattgtttttaaaaactttgacaaaaaagacataactttagatttgtttttttttttttggaaattttgttaccagatggtttattgattgatactaatcctaaatccaagagttgtcattaagtatacaaatagtattttaattatgagtatcaatccaaaatttaactgtttatgtaaattttaagtgtaataatagttgtgtgtgtacatgcatgtacacattaatactaagaaacagacccagcgaagataatatgtatgatacaaaatgagatacttctcaacaaacattcactcctttctggctccataaatttgggatttgctctctggcttacggtggtcaaaagagagtaaagtgagatataagcaaaggctatacctatgattcaggaagttggcctgtctttttgctgttttggatctgccatcaaaagacagtgatttgaggagctgaatagtaaccaatgatttaaagagagttaggaaatatatggaggagatttgcatgtaatttgcagcttaacattaagtcaagacaatcatatatgagtctagtagagcaatagtcacccttcaaacatggaaatatgggcataagcgttagaagccagagtgaattagtgttgattacacagcaagaaatggcttactaaaaatgtaatgttacttacaatatgtggaattacaaccaaatgtattaatcaacataactacatcacatgggtaaaaaaagaagttatattgtacaatttaagatgtaaatactcctttttttctctaatatatgaagttaagtcttacataactctcaatgactgaagataaatacaattgtgtaattaaagaaatttgctaagataattatctctccaatttataaatgaaatatattatttaactatttagatataaattataagtgataaacgagtgagaagaacttttagaaggggtcaaaattaattaagcaagattttttttttttgctaaatgcccatctcacaggtttttaaaaaaatttttttttgctaaattataactaagcaagtttcaatgttttttaagatgtataggtcatgaatataattttactaatgtcatatgtggtgtgagataaaatatttgaggcatttttgaattgcatccagattctacactttgtttcattaacattttcaaataaatcttaaagtattataaatatttaatatttaaaaattttggaactcatcaaagatattgagaggtgacaacgtgctggcagtcctcacagccctcgctcgctctcggcgcctcctctgcctgggttctcactttggcggcacttgaggagccgttcagcccaccgctgcactgtggcagcccctttctgggctggccaaggccggagccggctccctcagcttgcagggaggtgtggagggaaaggcgacagcgggaaccggggctgcgcgcggcgcttccggcgctgcgcgcggcgcttgcggccagctggagttccgggtgggcgtgggcttggcgggccctgcactcggagcagccggctggccccgccgcggccgagcaatgaggagtacaccctccgggccagcgactgtggagggtgtactgggtaccccagcagtgacagcccaccggcgctgcgttcgatttctcgctgggccttagctgccttccctcagggcagggctcg

SEQ ID NO: 33389 - DNA, 2300 bp, Homo sapien
gaaaaggcccatggatgcatcgtcatggcttcaccttaggacatacattttaagatcctttattgctgataccttcttgctatagtagtgtttccctgaagaactttgagagaaactcaggtggtaaatatatgccagctgctattcagtttgattcttccttggaacactttatactcttatttatacataagcgacagcatctgccagccaaaaaattagtgtaagcactgttttttgaataggtagctccaggctcgatgctttacaaagcacattcatccctgtggatttagcttttgattttaagagccttgaattatttgtaaagaccctggagaatctctatattgtgttagggaaggggctgacgacggaattttttagttatgaaagttttgtctctcctgtctctgtggcatcattagaaagtgaattgttaccaacaagggatatttttatgtcaagactttatattgaaaggaaatattttgcttatgtccactcactatataattaggttaaagagcacattccagaaaatatggaagaagcataccttcccacttttctccatagcaacaagtagatagcaaaaggtccatttgtagagaaccccatggctctgggtattagcaaatggtctggcatagaggaagtggaaaataatgagatagcatttttctcctttttattttccctcctctctccacttcttctcaaatgcatacctcttcagactcacttgaatggtagaaaggctaattaatgtatttttattaggtgaatactttatgtggagaaagcataagtttttaagtaacataagaaagtgaagaagatataataatgataataaagatgatggtaatgattatagtcaacgcatattgagtcctgatcattaaactgatactttcataagaaattttcacgcattaactcctaattttacaagtaactgtgagattagaggttctactttgatttatattgagtaaaccaagacattgaatatgtggagtaaattggccaaagtaacataacaaatgagtggtgaacttgggaatcaaagcagcagctatgttagaccccagggcctgaacgctaaacctcgtggtacacgaacaagtggataatatgcaacaacatattagcaaataagaagttagaacctgacgactgaatccatgtgggttcagaagactgcagtaagacttaaaaggattggtgaagaaaggatgcattttaaattttctcttgcaaaaagtgataaatacacttcgattctgtctgcctttctttattctcgctcagccttgtaaatatatccctgctaagcagtctgttcttatatatcattttttaaagtgctgattttaatattggagtaacattcaattatatggagagaacaaggggatataaattatttttagtagtaatatacttcctatttgtatgtgacaatatattttacctttgtatctgaaaattatttagattaccttaagacgtcagataaattttacaaggcaaaatgatatccacagcccatgttggttgagaccatttaataaggttgctgctgtcccctagctattctgctattgttttgttttgttttcagctaattatagtctttattgcattatattgctcttcagctttacttttccaaaatgtacacagaagtttaactgtatccaaagactgagatattgatatcataaaatctgatgaatgtaaactgaatttaaaatgtaaacatactctcagccagcataagtgcctagaaaaatctataataggaaaaatgcaattataaccaatacagggttgttactcaaagctaagctaaataaagtggtatttatatttttattaatttacatatcaaaacaagtttgaaaatgcatcattttttttttttctgagatggaatctcattctgtcacccatgctggaatgcagtggcacgatctcagctcactgcaacttccgcctcctgggttcaagtgattctcctgcctcagcctcccaagtagctgggattacaggctcttgccacaacacctggctattttttgtattttttaatagagatagggtttcaccatgttggccaggctggtctcgaactcctgacctcaagtgatgcacctgccttagtctcccaaaatgctgggattacagccacgagccatcgtgcatgagccagccagaaatgcatctctttatgtgagaactttgatgctgttgatttcagcatttatagcaaaaggtatgattagtatgct

SEQ ID NO: 33390 - DNA, 2300 bp, Homo sapien
gttcttggtctttatgacatggatttttatttatttattttccatttttgacatggattttctacatggatttttaacatcagtatgttatcttctattaaaaacaaagcaaaacaataaacaagaacaaagtattcttgcaaaatattttattgggattgcaatgaatttacatgaaacatataagtgcttcttggtctcaaatatacatatatctccatttatttaggacatcttaatgtctttcactacaattttacctttttgtttggatatgtagctgacttttgccatatgaatttgtgggactctgttagctttctagagatattgtgctattatgagtgagatttcttaacatattctttttatgggaataatcacttctagtgtgcaaaactattatgtattctagtaaattgaagaaaggtcattatacatgcatattaacttcaatataataattataatcaatataataaataagttttcattaaatgcctttgtataatttataattttcttgtgagtttttcctataatctgatagaaatagctcactacaatatgttgttagtaattttttgtctattatcctattgctaatcttctttttctgttaatgtttgattggtgcatcattttccattcattaatttcgaactttgtcaatgcagatttccttgttaatataggcaataataggttgactctataatacatagaactgatattagttctatttctccacccctcaatgattaattttcctttaaattcaatatttttgtcaccactattatttccttctttcctcatagctactaattgtctaaattcttatttttctgtgctcccttttatttttttaactgaatcacaaattcttccataacttcttaaatttcctcatcaatctcctgaggataaatgggtttcatcttgttggagataagataaatctcccagagccttctgacagattccaaaagggactgtttgtgattcaaactttgtttagagctgtcatcctgtaatatttcttcaccagcatctttggcctctccaatctcccatgttttcctctttttttgtgtttattcttggattttaatatgacaacaaaatgctggatgtacatggactctcttgttgggcaagacagacaagaccgaatattatttttttggagaatattgaaccgaccatttcattaacttcttcttcttaatattgctatcaagaaatatgtagtccttctgatctctgatctttgtataagagccacggatttatttctttcagaagcttgtagagaagcttttgtttgtccatattcctgaaactttctggtattgttccttggtgtgtgtatgtatttatcaaaattgcagaaatgctcaacaggccctttcagtctgcagtcgcatgccattctcttctgggacagtctataaattgttcattgtccctctgctccatttttcttgctcagtcattttggaattcctgtttattagatattcatcctcctggcttttccctttaatttcactgtccctgactcctactttccatctctttgtcttcttgctttacttcgtagagcattttcctgttattctccaagccctctattgaaatttttatgatttgtacaaaattttaatttccaaagacaatttttattctatgtgaattcatgttttgtattatatatgtagcatctaatgttttccacgggtggctacaatgataccttccacccatatcttctttcagtaacttgccattccataatcaggaggaaaaagtctatacccctcctattgaatccccatcaagatgtggaacctaattcctcttcccttgaatattttgtaatggagagaacgtaagtagctaaggtgatactgcatcatttttgaggttgggtggggcaaggtgaagaaagatgcctctgcctttggaacttgaacacttgtactaccactccctgagttaccatggacgctatccagttgtctggctgctaccagaatttcaggagctcccactgggctgtgcagaaaccacatgggaaagccattggaccacataaggacagagtgagagtgagagcaggcgtgaaagagcaagacacagagagagagagagagaggagagacagagagagagagaaggggaggtgggcgggggggggagagagagagacattcaatcagccctcaggaactctagcccctcacctaccatttgactgcaacttcgtaagtaactctaagtaaagaaacacccag

SEQ ID NO: 33391 - DNA, 2300 bp, Homo sapien
cagaaggaagctgagtttctgatgactagacagggcagaataaacacaccaaccaaaaacctatgtaagagaagcataaactatataattcagaaaatgttattttgggaatacatcatttcaacatgtattctaattaataaaatagcaatttacctcagatcttagcctttggttattttctcgacccatttaaatgtaacccccaaattcttcacattatgtagtcatacattttgaaattagcactaaacaaacatatggaaatagttaatttaataagagaacaatgtgtgtgtgtgtacctaacctgctgcatttaattaaatattataaatttctcttgatagctaatttaacatgtcaataacagtattatattgaatacacacatataccaggcaaacacaaatacacacaaatatacgtatcagaggtaaaaaactgaatatctattttcacttgactctgaaattaaggcaccctgtcgaagaaaacatacaaaacataacaaaaactatgggcaaatgatacggtgataattcagaattctagctctattattatcaaactttagaggggccataaaattttcctgatcttaatgccatcgtctgtaaaattaagagtttcaaaagtccatttctgctctaaatgtcatttagctgttcagctcagtggaaatgtttggtgttttcaaatataaaactaattggtaaaattcatcatataataacactgtgatacattaaaacctttttggaatctaattttgaatctccctctcacttcttttttgcccctcagattgagtttcttcctttttcattgtgctgattatgtaaggggcctgttgactgttagaatgatcaaacaggtacagaggaggcagtatggcaaccggaaacaatactaaactggaagtaggagtgtggtattacagctttgaccccgcctccagttagtcctgtgacaatttaacattctgagcatttttatctgctaaagaaataataataataacagcccaaaatgatcttcgtaatttctcctctagctttaaaactataattgacatatatgtatttatatgcatatatgtatgtatatgtgtatataatttatttatggatggcactttaaaaggaatctacctgtagccggaaaaatgcaaagatgttaattactttgtggagctatactgacatcctttggtaaggtttggttgattgcaatttgatgtggagattgataaatagcgagacagttagatgtttaagtagatagaacaatccaaatgtatttacatctgtccacacactcatttgggtatgaaacccgtatttatgagaaaaaacaacgttaaaaagaaaaaaaaggagactgtgtcaagttcaaagtctaaatattttaataacactaattacatatttacatttttaataaaatattttatctataaagtattaaaatgcaaagattaggcagagaagactggctcgcggacattccaaaatgatgagcgaggtatgcactcctgtgacaataagcaacaagagaagggatttggaaaatcaagccgagaaagttccctgaaagcaaaaaataaacatttaaaatcacaacgaaaaatcactctggtaacatatcaaatctggttgcaatttgacttggcgctctgataatacttggatttcggtagtctggtgtaaggacggtgcaggaatatatattccagaagaactatctttttttaaaaaaaattgcaagaagcagtcctgttcctgagattgtattacggacacaggcggattagattgggctgattaccttagccttgaaacagagagtctttctgccctgcgggggaggggacgcctttcaagcaaagccctcctctcggatgcgccctcccctcgcattcacttgcaaatcgctgtgtgctcgcagaagccagcacttccacagtctctaaccttcccatggcgagtgctgcagctctatcagcagaacctttctctccgtgtgaggaagagcttttttcccccctttccttttttttttttttcctttccccttaatcagaagcactgaatgaaagccaatcagagagagctcgcccccgttttcttcggttccctgctgtccagagttaaaagtgatgctgagaaagagcttgagttagattgaagtagaatcagtgatagaaaataacagccgaaaacaaacaaaaaggggacatagtgacaatttctcctgggttattttggctggaaccaacttccattatccagaagctg

SEQ ID NO: 33392 - DNA, 2300 bp, Homo sapien
taacaagaatcaactgttttggacctagttttctaaatagtttctatatgttgtcttagcactttactgcttgctcacaagtgtttcaggaaaatgtcatttatttacaatattatctgatgcacactctgcagggacctaatgttttaggtgagctctcagtaggtaccttcatgtggatccaagaagattcatagtctctgcattttctgcctcaatctatctgtgtttctttggcttcatctgtattacgtgttgagattccatgttggttcttattaatgtgatttctgccaacaaaataaaaaaggaaaagaaaatcacagatattaaggcattttacagtcaacgatgatgatgatatttgaattattaatatagttactgttattattttaaacatagagaacttgaaaatagtgtcttacaggaaaatcctagaagataagtaattacaactatataatagaaaaagaaagccttttgctgcattgaattttcaagtcaattgcctaatttcttcagaattaacatctattaattcaatattttaatgaaataactaggttgtgtaggttgtaagcaagaacactgtcaagggcaatgaagtaagaagtgattataacaattttcatccctagaggaggtgcttggcaactattaggaaaggagagggatgaccaaggattgggagatgtaaaggtcactcagaggtggcttcaagccagaataattgacgtgtgggggtgggggtgtttgacgtgagagggggtcaagattgacaataagagacatcagagacattactaagagagaagaaacacacctgatctgggtggaaaagtattgttcttattttctttttatatgtgtgcaattagttggtgaaatatataaactgagagatgttcagcaagcaatctgaggcagcgaaatttgaggtagaaaaagaagacaatgatggacatattttaggagattttcatggtttagtaatactactcatatatgttgagaagtgtcagttaagttttataattgggctaaaatgtttaaggaaagaagttttactctgaagatgtaaagaaaacataactggtgattaaatgtccacaaaggcagcacgccatatttgagctccctcctgagtaagaaaagaaaataacacagtttcagtgtgaaatcccctatgcctgattcctgatcgctctgctaaatgttgtacagggtaaatgcacatcacggtttctctctttttaacaacaacaacaaaaaaatttgatgatactatgaataaaggacaaatactaagaagatctttacagactaaaatttgattccaaaataaatctctaaatgttactctcctctctctcttcacaccatagttagcaaactaatatctaaacaaatatagagcaaactaaatatgtctattaaactttgtttaacatatatatgtcagattaaattgtagtttcaaagctatagaaataaataatataggctctgtccacaaaaatctctgtctagtgggaaagtggacaataaaccaaagattacagcacagcaggacagtgcaaatactatggaaaaattttgctcaaaatatgtgataataaagggaaggattgcctaactgttgaacctgagggatgtgggggtagtgaatagttactattagacatatgatagccatttgcaattatttggaaattactgaaactttagacacatgatttttgtgtgtcctagacccattaaatgaaaatttatctggggaggagtataagtgtacacacataccccacacacactcacacgctttagtcaaaccttcaatctgatgatcatgctgacatataaaattcaagttgcttgacacctgtgtcatagctgttggaagttgccactgacatagatcaaatctttcttcaatgaaaagctatctttattgaagatatttcaatgaaaggcacataatattttgactcctaatgaaactgacctggagacattgaaaaggagggcataatagtgggattggatttaagtagtgagattagagaactcacagaagatgacgtttgagttaaatgtgatgtcacaaatgacaacacgttgggaagggtttaaaatataattttggtcacattctttagctcagattgaattttataaaaacctgatcatcaatcctctaattcatcccgagatgaagagaggcctagacttctcttcattactctagttattcagagtttttttaaagtagccctatgagagttgcaacaagtaaa

SEQ ID NO: 33393 - DNA, 2300 bp, Homo sapien
ctgctaatgtaaataatgactaatacttttgtacaaaatgtttgctaaatattcatacacattactgcaagtatgaaaagttgttttcatgtgatacagaatgctactcacatttgaaaacttacaagtagctatacacatgatataaaagaatttttgacaattccagggtttaagtcctttgttttcaaatgctggttccatatcaaacaagagaaaggtagaagacctttcatttggcaaccccttttttttttcttttttttctcagagtagtaaaaataacttcaaatcgggatttaggctgctctgttgaattgtggatttcacacaaaacagccttttcccacagttggatttcagtgggaaataaaatgtatgcaacattagggatttaaagcttttatttctgaatgtctaccttaaactatgataaaatattttgtttggtttcttttttccactttacatacattactttatctcagtattaataaagaggcttctataatatgtagctttatttataggagcaagtagacccagaagacataagtctaaaggagcctgtgaattttaaattaagtgtctttgcctcaagaaaacagtcttagcctccatgaagaattcatcaagctgtcttaaccacttgaatctatctagccctgggaatacgcataaggctttatttcttccttctttttctttatttatagatgaacaaaatgaagttcccttttttttgtccacctcctacacttcaaacacagaagtatttaaaagccattcactccatgttcaatcaccacgttttagtagtgtcacattttatttggggatatgtaaaattgtgtttttttttaaaaacatttgttttccttttaaagaaacgaatttccataatgcacaagcctccgatgggcacctctattatctacatttcatggataagctttaccattgggggaaaaaaaagaagttgaatttttttttgtattgtcagttttcctttgaagcatcaaataggatattgatattttttcgcacttaagctatttacttactgtgacttaacgagccgttataaagtgagccatatccccaccgtgcatttcatacaactattactagaacttcttttcagaaggatttatctactaatcaatatctttcttattgtgccatttccagaaatactaaacagacttctttctgaagcagggtttaactttagctttggtccacccgctctaagaggtgtacaatgtgcaacagggactctaacaggtggatcatgtagtttttgtgatgtggctatggtcaccattatttttggttatttccagggaagatgaaactcattcaattgcattatctggtaaaaagcaaagtcgttctagaaatttaaaattattcttaaaaccattatctttactgaaaacagatatgtcaattactgaaaacagatatgtcaatcattaatttttagatgtttaacaatgtttctaaaagactattttagattataaactcgtagaggcacaagtaaaaaaattcatcgttatcaatgatatatattatctgtatttttttctcctctttttcttaaagttgacattttgacactgaattgaaataggtagtagtaaattctgcaggaaccataaacaaaatttcttttgagcaacagcactctccctgtgatatatattttctacagatgatttacaggttacagacatgctgtgacctttctctcccaattgcaaacagattaaggagagctgattaaccgagactaaaaacactgggtcgttttctcttatgggggtctttgacaaagccctcctttctgagtcctcccacttcattcgcttgcaaatcattgtgcccaaagaagtccttactcccccaagcccaaacctggcgccctgcagcgccatcagcggcaatatcttcctatttgagggacgtctcttattaatcagaaacgctgaatggaaaccaatcagatagagagttcctttgccttcagcttcctgcctgtctgagttaaaagtgatgctcgaagagaaagccacactgagatgcatgaagattcagctgtgaagatactataaaaagggaagagaaggaccgagacagaagcaacaacggaactgtcagtgcggagtagggctaaactcagttccattgttaagcaaggtaagtgttatttactttgcttgacaatgtaagctattcagtttttgctttcttataacgaagtagtacaaatattgcttttctcctagttgcta

SEQ ID NO: 33394 - DNA, 2300 bp, Homo sapien
agagagttgtattctttataaagaatttgtcttcctcaacttatcaattaacattaactcatctacacatcatgaatagaatgaaattaggagtggataggtaacaaagtgttacagtgaggaagcatcagtaatagagatagagcattctctcttcatgtgagacagtgcatcaatgaggagaaatctattgtattaatattacctccaaaaatgttaagataatgtcattaattatttcaatggatgctacaaagcccagtataatatgtaaagataaaattgtatgaaatgtctcaatttttattaacttgatcatgaaattaaataaaagcaactaagttgtaaaaaattggaaagcctgatacaaaataatttaaatgacataattctatgtcttcgaaaaaaattaaagtttaagaaatcagttaagtataagtatttatacaaagtttataacctgtccttataccagcaaagtacttagagagtaaatgatagataacaatgtttcattattgcaacaaaatggaaggaagaaaacaataaatagaaagggttctataagacaaatacacgatcaaatggaacaaaattaaagagctttattttaattatatatttatatgtgtataataggacaagaagactaaataaaatctatatttgttttctttatatgaacactaaataacaaatattctaaacctgtctattaaaattaatttattgtttggataaaattcttttttatagtaagtggaatatcagaaagcagacttaataaagttattttaaagttaatctcaaaaaataaaaacaaaagcaaaaatacaaccctgaaattctggttcatctttggcagtgaaagctccccatagtccatccatcctactaattgtaactataaactttgaatactttttttttttttgagacggtgtctcactctgtcgcccaggttggagtgcagtggcaagatctcggctcacttcaacctctgctgcctgggttcaagtgattctcctgcctcagcctcctgagtagctgggattacaggcgcttgccaccgcgcctggctaatttttgtagtttttctaagtagagacggggaactttggatacattttttagagtaaaaaaagtaaattaaaaataccctaattgaaaactctgaaaataaacaagttagttttttttaagagatgccaaaatttgaaaaagcaactgttattaaagtgatttgcattattttttttttccttgggatattttttcccattcacagagtggaaaagcataggtgactacaagtcttgctagacactctgctgtcaatttggctaggaaaaaagcaaaaacaaaaacaagtaatggacattcagtaaatattagcagagacaaaggaatgttacaaaggaagcaaatggaaattttttaaatgaaaaataaaatatctgaaattaaacatttattaagttcaacagcaaaaaaagaataatagtaggaaaatatgttgaacataaaatagtatgtccaaaaagccagatctaacttcttattgcctacaaggaatcaactttgaatataaagaaaatggtacaaattaatagatcaatagccattccccaatataaagaacacagaacaatgaatgagactaaagagatactttgaaacagaaaaataaggaaacctcaaaacgtgaaggacaatattaaaaggtctaacgtatttgtaatttcggtacccaaagttaaaattggggcatacttctaaatacccaaagactttcaaaatctgcagtacagtcaatgacatacatttacgaatgaaagaagctcagcaaattccaaatagtgtaagtgggagcaaaatgcctaggcagataaaaaggggtccctagagaatttctggccttcttcacaagtgtttacattagatgcttttgtgcagatgagggaacctgcccagggcttgtctgggcatgcccacagtggactggagcctgacatgctcactggggcaagtgggtggagccatgaggaattcatgccttgcaaaggggaggagcctgccctcttgagctcttgtggtgacctgggaatcaatgtgtgaggtggtgctatgtagcaggaacccctcttgctttgcaaatagttttttgtttgttttcctttttgcccaatagagccctgctctactgacccttcaatgtgcccgtgtgcctaaatattcctggtcgtgtgaaaagaacccaggtattagctgaactaaggagcacaattctgcaacatttt

SEQ ID NO: 33395 - DNA, 2300 bp, Homo sapien
tgagaaattttgaatgggctggttggaagatcaaatccaccacaacattcccttaagccaaaacctaatccacagcaaggtcctaactctcttcaattctatgaaggcttagagagatgaggaacgtacagaagaaaagtttgaatttagcaagattggttcatgaagtacatggaaagaagcagtctccataagacaaaagtcttagatgaagtagcaagtgctgatgtagaagctgcaggaagttatccagaagacttagatatttgataaaggtagctatactaaacaaaagattttcaatctagattatacagccttctaatggaaggagatgaccatcttctcagagccagcaaggagaagtcaatgcctgccttcaaagcttcaaagaacaagctgactatcttgctagaagctaatgcagctagtgacttgaagcagaagccactgctcatttacctgtcaggaaatcctagggctttaagaattatgctaaacctattctgcctgtactctgtaaatggaagaataaggcctggatcacagcacatctgtttacaacatggtttaccgaaaattttaagcccactgtaaagatctactgctcaggaaaaaaaaaaaaaaaagccctttttaaaatattactgtttgctgacaatgcacttgacacccaatcactccaatatctaaggatattaacattgtttacatgcctgctaacacaacattcattcctaatggatcaaagagtaattctgaatttcaagtcttattatttaacaaatacattttataaggctatagccgccacacatagggattcctgtaacagatctgggcaaagtacattgagcatcttctggaaagagatcaccattctagatccattaagaacatttgtgataagggaggaggtcaaaatatcaacattaatggtagttttaaataagttgatcccaactatcatggataagtttgaggggtttaagacttcaatggaggaagtaactgcatatgtggtggaaatagcaacataatttgaattagaagtgaagcctgaagatgggacagaattgctgcattctcataataaaacttgaatggatgaggagttgcttcttttggatgagcaaagaaagtatcttcctgagatggaatctagtcttgccgaagatgtggtgaacattattgaaatgacaacagaagacatagttggggaagcagcagcagggtttgaaaggattgattccaattttgaaagaagttccactgtgagtaaaatgctatcaaacagggcatgctgtagagaaatagttcatgaaagagtcaattgctgtggcaaaccctactgttgtcttattttaagaaattatcacagccaatcccaaacttcagtaaccgccaccctcatcagtcaacggccatcaacactgaggcaagaacctgtaccagccaaaagattatgaactcactgaaggctaagataaatattagcaatttttagtaataaagtatttttaatcaaattatgtatattgtttttagacacaataatattacacacttagttgttttagacacaatgctactgtatatttaataagctaataagctacagtttagtgttaatataactagtatattcactgggaaacaaaaaggtttgtgtgactttgtgaatggcagaagggatccgagttactggtggtgaatctgtatggatctgcagcgacctcagttcttgcctcctcagaagagtttgactgaaggatgtaaggcagaaaaaagagaccgaggcaagtttcagagcaggagtggaagtatattaaaaagctttagagcagtaaagaaaggaaagtacacttggaggagacccaagtgggcactgagaaggtcaaatgcagcattttaccttgatcctaggactttatagagcagcccacctctggcgtcttgtgcccctttcccatgaatcttcccttaagttgggctgcccacaaatgcagtgccctccttacacttgggaagtgagcatgcgcagtgtgcttaggaagttctacgcatgtccatctgaggctttcttcccttttttttccagtggagtgcccctgaaaggtcatactcctccattttgtcttttaatgttgatgccccgggagttacttcttcctggtatcttccttcaattaacactttaacgtgacagctgtggaccatcaggagattgtcgctccctggcagtgacagccaaattatcatttttagagaggcaacgcgataactgtcaaatcatcctc

SEQ ID NO: 33396 - DNA, 2300 bp, Homo sapien
atattacttacctagagcccaattgtgcaactgattgatcatgttgccatgccttctatgtcagtagagattttcacaatcaaaaacaaaaagtagtttttctataatgttttccaactttataccctgttaaattatgacactaaattataattgtgagaaataacaacctgcatttggcatatcattataaataaatggcatcacatttattttctcatgaaagtaaacattacagaaaaagtagaaaaagatttagagacatactattttattcttctgtaaacaaatattgaaataaaagtctgtacatttgcccatttaggaagcccttggaatacataaaattactgcattattttaatatattaactcaattaatccctaaaagaaacctctgatataggcatgctattgttatgctcactttctggacagagaaaatgaagcacattgatgtcaactggaaaagttgcattatagtagattcaatcattcagcatcatttattttaaaaatctatcctttgctcactgatttgtgataaaatctcaattaaatatcaagtgtccataaaatgagtctatttctgatctctcttttctgtgttgctatgtttccatatgccatattatattaatataattctgtctgaattactgtaccttgatgacaaatctcatgattaagaaaagttcattagctctgttattcttctctaatggtatcttcactattcttggttctttgtattttcagatatattttttaaaattttgttcaggactgtcaacaaagtaaatttttggaattaggattttgattgatatggctttaaatctatatcccaatttagagataactgacatctttacagttttaagtcttattttatatgatcacaggaagtctgttcatccgtttggattttcttttttgactatgtcattttcccatgacaattattcatgaaatcatttggggtaaatgatttcagaaattatatgtatttgcttatcttagacatttaggaaaaccatcttttggattaaaatattatgtgatcttggcttgcaaatctatgttaagattttcttttgattatacaatctcaaggaaatccttactagacctcctgctctaagatcagtaacttttattgtaatcttcttgtgatgaggaagttggaagggttttagacttgcttctcactttcacaaaaattataactttgtgtgactgtagatatttaatttttttaacttttattttaggttcagggttacatgtataggtctgttatgtaggtaaactcatgtcatcggggtttgatagcagaaaaaataactactgggtactagacttagtacctgggtgattaaataatctgatagtagatttatatcaaaaggttattgaaatcaactggggaaggtgtttgggactgtgttctcatctcttggtatatactgtgtcaaggagaaccaaaatttgtcaagttcataatttttgtgataatgtctccaggacaaaactgtctctgattctgggtccccatgttcccttaaatattctatctagctccttctttaatgaatttaagaactttcataaagagttcacgtactcctaactgcagcctttttgttttcaggacatctagtcacctactttaacaaacataactcaaatttatttacgtaaatattttatagttattattacctgcccttgttgaatatctgtactgttgtaatataagaagaaatatctatttgtttttttccttcagttcttgacatacggctcctgaaacttttatagataggggtactaagagaatcttctgttccaatatttggactttgacctcagttcctgacacagatctcctaaatccttggcaatttcctggatgataggatcatcttttgttctaatgaagcaactcttggtgggctcacagagagtctcaagacaggagctggttgccaaggaaaccaaccatgcaataagaggattagaatattcagccccaccccatgacttccagagacagaggaaaggctgaaggttgagttgattaccagtagctcacgatataatcattcatgcctacataacacagctttcataagaacccaataggacagggttcaaggaccctctaaagaatgccacacctatagaggcatggaaactctttgccactttcatctgactattgatctatatcctttgtaatgcctcttataagaaatgggcagatgtaagtaaagcgtttctctgagctctattag

SEQ ID NO: 33397 - DNA, 2300 bp, Homo sapien
taactatacctactgggcctatgtgcctttcccgcccttaatttgggcagtcacatggatggataatcctatagaagtatatgttaatgatagtgtatgggttcctggccccacagatgatcgctgccctgccaaacctgaggaagaagggatgatgataaatatttccactgggtatcgttatcctcctatttgcctagggagagcaccaggatgtttaatgcctgcagtccaaaattggttggtagaagtacctactgtcagtcccatcagtagattcacttatcacatggtaagcgggatgtcactcaggccacgggtaaattatttacaagacttttcttatcaaagatcattaaaatttagacctaaagggaaaccttgccccaaggaaattcccaaagaatcaaaaaatacagaagttttagtttgggaagaatgtgtggccaatagtgcagtgatattacaaaacaatgaatttggaactattatagattgggcacctcgaggtcaattctaccacaattgctcaggatgaactcagtcgtgtccaagtgcacaagtgagtccagctgttgatagcgacttaacagaaagtttagacaaacataagcataaaaaattgcagtctttctacccttgggaatggggagaaaaaggaatctctaccccaagaccaaaaataataagtcctgtttctggtcctgaacatccagaattatggaggcttactgtggcctcacaccacattagaatttggtctggaaatcagactttagaaacaagagatcataagccattttatactatcgacctaaattccagtctaacggttcctttacaaagttgcgtaaagcccccttatatgctagttgtaggaaatatagctattaaaccagactcccagactataacctgtgaaaattgtagattgcttacttgcattgattcaacttttaattggcaacaccgtattctgctggtgagagcaagagagggcgtgtggatccctgtgtccatggaccgaccgtgggaggcctcgccatccatccatattttgactgaagtattaaaaggtgttttaaatagatccaaaagattcatttttactttaattgcagtgattatgggattaattgcagtcacagctatggctgctgtagcaggagttgcattgcactcttctgttcagtcggtaaactttgttaatgattggcaaaaaaattctacaagattgtggaattcacaatctagtattgatcaaaaattggcaaatcaaattaatgatcttagacaaactgtcatttggatgggagacagactcatgagcttagaacatcgtttccagttacagtgtgactggaatatgtcagacttttgtattacaccccaaatttataatgagtctgagcatcactgggacatggttagacggcatctacagggaagagaagataatctcactttagacatttccaagttaaaagaacaaattttcgaagcatcaaaaacccatttaaatttggtgccaggaactgaggcaattgcaggagttgctgatggcctcgcaaatcttaaccctgtcacttgggttaagaccatcggaagtactacaattataaatctcatattaatccttgtgtgcctgttttgtctgttgttagtctgcaggtgtaaccaacagctccaaagagacagcgaccatcgagaacgggccatgattacgatggtggttttgtcgaaaagaaaagggggaaatgtggggaaaagcaagagcgatcagattgttgctgtgtctgtgtagaaagaagtagacataggagactccattttgttatgtactaagaaaaattcttctgccttgagattctgtgaccttacccccaaccccatgctctctgaaacatgtgctgtgtcaactcagagatgaatggattaagggcggtgcaagatgtgctttgttaaacagatgcttgaaggcagcatgctccttaagagtcatcaccactccctcatctcaagtacccagggacacaaaaactgcggaaggctgcagggacctctgcctaggaaagccaggtattgtccaaggtttctccccatgtgatagtctgaaatatggcctcgtgggaagggaaagacctgaccgtcccccagcccgacacccgtaaagggtctgtgctgaggaggattagtataagaggaaggcatgcctcttgcagttgagacaagaggaaggcatctgtctcctgcctgtccctgggcaatggaatgtctcgttataaaacccgattgtatgc

SEQ ID NO: 33398 - DNA, 2300 bp, Homo sapien
agtacaagagctgtcttttatataatttcatgctgccacctgaactgttcagaagcaaacggattgtccactcatacagttgttgttctaaacacctttgacatgtagcttaatggggtttgaagaatagtatattgcaaacaattagaggtttcctttgtgagatattaactggttcaacagacagaaaatcaacttcactatcaaccctcttctaccataaaaatcagccaatttgcacattttttctgctaaaggtggtcttaaaatatgacttattttattgacatatttacgtattatgtattcatgtattatcctactaccacatatgctaataaattatacctgtacatataatctgtgggtctctatgtctgcatacacacctgcacacccttttaccaataatatttctgcttcttgtgtgttccagtttcactgccttggacatgttatgtaacttctgttgtctcttcatcagtctgttttctctgtcttaattgggaaaatatgacaccacttattgaaggatgaattaaataaaatagtctacaaaagtactttgtaaacagtaaaggactacacagacacacagagctaatatttccaattaaatgtataagaaattcataatctgacgaatggactatgaatctaaagcagctttcttctcccccattcttacttcatacgtgtttaaagagctctataaaaagaaaatgttcagcctcttctcacaaattggtagcaattcttcatttggggaaggtcttttccagaaagaaactcaaatctttccatcttccatgtgcagaacatctgtgctaaaaccattccatgcacacttctttgaagcactggctgcctaaaggaatacttttgatttgggctttatttaaatgcctgaacttctattggagaaacaaaaggttttctagtaagagctcagttgggaacaggaccaacctccagccagtttaactactcagaggccaagcagcctggcatttcttagagctctgtgcaatggaaatctccctgagaacttgcagcacaggcgaacagctggtttgggaggctagtgaccctgggtgcaatcactgtggtaattagatttaattttcctaatccaacagtggctgactccatcatgcctatgtctcctatgtagaaaatcattactctcatttaatggtactttgacatgtttcacatttttgtggcttagtaccttaacattagatattacctctttgtaactatcaatctagccattcaaacagctatgtgtactaaagagtttaatttgaaggttatccaacttcggcaactttccagaaggatcttcgaacgttaagcagaccttgaatatcattgtacacccctcttctgcaagtcttttgtatgcttgtatcaattcatttagaacgatggcatcagtcataagtcattggcaagcctgaagggtttgggttttcagtgtttctgcaagcccagggaagcatggcttcatgctacgacatcctggggtcactccaaaagagtaacagagatcatggggctacgtgaaagcgtgtcttcctgggaggagagaaggaaagacatgtatgaatctatccatgtctgcttgcatctggagaacgcctgtttatgttgtaaagaaaagccatcggtattgtcatctcaggagaccggcttgttttatgtgtgtgcatgttatacgtgctatcacacgaagctggccaactgatagagtgacgaggtactgtgtccctgggaattgtaattgcttggtcggtgaaaaaaaaagaacatcagaccattgctgataatagcacaaggtgcattttgatagtacaaaagaggaaacagacggagtcatacaagttctgagtatatcttaaaccccctccaacaaaaaaaagaaagaaagaaagaaagaaagaaagcaagggaaagcctggggctgaaggagtgttccagggagcgaattgctcaggacttcaaacactgggagtcattctgtcaaggggagggggcgggcgggggcaggcactgggcctctttaacaaagtcctcctctctttgctccctcccacttcattcacttgcaaatcagtgtgtgcccacaagagccagctctcccgagcccgtaaccttcgcatcccaagagctgcagtttcagccgcgacagcaagaacggcagagccggcgaccgcggcggcggcggcggcggaggcaggagcagcctgggcgggtcgcagggtctccgcgggcgcaggaaggcgagcagaggt

SEQ ID NO: 33399 - DNA, 2300 bp, Homo sapien
taattttttttcattgtttttaactttgctttcatgaccatcctgccatccttgactttgaactaatgataaagtaatgatctcaaactatgacagaaaagtaatgtaaaatccatccaatctattatttctctaattatgcaattagcctcatagttattatccagaggacccaactgaactgaactaatccttctggcagattcaaatcgtttatttcacacgctgttctaatggcacttatcattagaatcttaccttgtgcagtcatcagaaattccagcgtactataatgaaaacatccttgttttgaaaacctaaaagacaggctctgtatatatatatacttaagaatatgctgacttcacttattagtcttagggatttattttcaattaatattaattttctacaaataattttagtgtcatttccatttggggatattgtcatatcagcacatattttctgtttggaaacacactgttgtttagttaagttttaaataggtgtattacccaagaagtaaagatggaaacgttaaaagaagagaaatgtagtattttgggttacctgattagagtgaaaattttttacaatcatattattccttgtgtcttctgaatggtttccgattttataatggactgccctatatagtaacaagtatttcatgcttgagctatttcctgctttcagggtttcttttttctagttcttcatacacacacatacacacacacacacacacacacacacacacacacgaatgcaaacaaaaggctatatgaggtcttcactctaatgaattgatatgtatcatagtcacaggtaagtgttgaaaaaagcttagtaaagttagaagctacttactcatagcaatagaacagcaccttaatcacacgatttactgtaaaattaaagaggtctctatctgtatgtttcatgtcacgtaacaaattgaatcaaggaagatagtcctgtaaaaagaaaggtatcatctgaagttgaggattgacactagcagtttccaatgtttaaaggtaagatctgagttctcctaataagtaaaagtaagtagttctatagcagaatatctgagatgtaattggcaaggtattttatccctccctgcagatgacacagcataccaagaacaggttaatatgattacttatggaaataactttaatctcttatcataaaagctgatgatgaagtaaatttataggaaattggataatttgagactggggctaaatatttagtaccagggtactgtaagtatcaagttggagtgacgttttcctataattcagactctttgacatcgtggaaccaataagagtcatagttccatcattctccagcttcgtctcacttccttcccaccccacctgagtatcaggtcaaacatcattgcatgcgcaggttttttttttaattgctaggtcccaggcaacatgaaagattattggagaaaaaaataattttcagcccagttttttcattgtctgtttcctaattttagatgttggtgatgggaaagatggaaggagagtgggaagaagtaaaattttaatatttgtttcaatcactttgaaactaaaattcattaagcataaccagattgcttttgtgggttgtttcaaggacattgagagctttctgatgatatgtttttgccctctattcaaaagcaagagttcctttaaactactaagatattccctagaataagctgaatttaaaaaaacattaagccattgtttaaagccccttcacttcctggccacttacttctgaaaggcctaaaaaacatttgtgcccaaataagtaaataaaccaaatgggaaagaagcaaagattattccatagaaccacaagagagggaatgtgggcacagtaaatagatgtttctttcagaactttcctgcctttacagtttgtgtccataaagggatgttcagcaatgaaattactcccttttcagatggaacaaaacctgcccatttaattttaacgcagtataaaaaacgtgtggtttagtttttattttcagctcccaaagagttgtgcagaaaatcttaaaattttttttttttttttttttttttttttgagacagaatctcgctctgtcgcccaggctggaatgcagtggcgcgatctctgctcactacaagctccgcctcccgggttcacgccattctcctgcctcagcgcccccagtagctgggactacaggcacacaccaccacgcccggctaatttttgttgtattttttagtggagacaggg

SEQ ID NO: 33400 - DNA, 2300 bp, Homo sapien
tatcctgggatgtgacaaggattgttagaaacatagttctctccattgctctaccctggttgcctctgctgctttccagcccattctcttacatttatgtgagaccgtccctaaagaaattgactaaaactaaaatttgtcaactctgagtaccttattccgacttttcctcctttatggctctcctttccaggtgctgagtattctaacttctctgaaagatgtagattttttttttcttttctggtacagagtttcgctcttgtttcccaggctggagtgcaatggcgtgatctcggcccactgcaacctccgcctcctgggttcaagcgattctcctgcctcaggctcctgagtagctggaattacaggcgcccgccaccatgcctggctaattttggtatttttagtagagacgggcttttgccatgttggccaggctggtctcgaacttctgacctcaggtgatgtgcctgccttggcctcccaaaatgctgggattacaggtgtgagccaccacgcccagcctaaagatgtggatttttatgtttgtttgcagaagagggcttgcgtcagagatctggaaattcgttttttgtttgttttggccactttaaaatttttttcaatagatttaggggtacaagtggtttttgactacatggatgaattgtatagtggtgaagtctgggcttacctgtcacctgagtagtgtacattacacctaataggtagtttttcatccctcacccccctcccaacactccccatctgagtctccagtgtccgttataccactctgtatgcccctgggtacccatagcttagcttccacttgtgagtgagaatatgcggtatttggttttctgtttctgagttaattaacttaggataatggcctgtagttccaactgagttgctgcaaaatacattatttcattctttttattgctgggtagtattccatggtatatgtataccacgttttctttatccactcatccgttgataggcacttaggttgattccatatctttgcaattgtgaattgtgctgcaataagcatagaagtgcaggtgtctttttgatataatgacttctttttctttgggtagatacacagtagtgggaggaccgaatcaagtgttagatccacttttagtttcttgagaaatctccatactgtttttcctagaggttatactaatttatgtagtttatataaagttcagtgtattataagccttcccttttcactgcatcacaccaacacctgctgttttttgattttttaataatggccattctctctggggtaaagtggtaagtggtatctccttgtggttttaatttgcatttccctaatgattagtgatgttgaacattctttcatgtttgttggccatttgtatatcttcttttgaaaaatgtttgttcatgtcatttgcccactttttaatgggattattattgttattattttttcttgctgatttgttttagttccttgtagattctggatattagtcctttgttggatatatagtatgcaagtattttctgccattctgaaggttgtctgtttacagatacttggggagataagatggaaagatcagggcttagaattcaactggatagacagctccctttcctgcttaatttgggatgatacaaagatggtgctcccatgctgagtttttgttttgtttttgttttttgagacagggtctccctctgtcatccaggctagagtgcagtggcatgatcatagctcactgcagcctcgacctcctgggctcaagtgatcctcccacctcagcctcttgagtagctgggactccagtcaggtgccaccacaccagcctaattttttattttttgtagagatggcgtctcactgtgttgcccaggctagtcttgatctcctgggctaaagtggtccctccaccttaggattacaggcgtgagccactgcacccagtttatgctgttttaaagactgaacttatttcattgaaattttagctggccatgactcatccaagtcatcatttaaattttggaatgaatcctgatcatgccaggaattcattatctaactgtggaattcggcagcccaaatacggagacagaaaagttcatcacatgcacatgcggaagaaaggtatgtctggatgattttaagatgtgaatctcctattttggcctgtgttttctgttgtaaattatttcgcctctaggaatggttccctgggtgactctttcaccgtctcatattctagtgcttactgactctt

SEQ ID NO: 33401 - DNA, 2300 bp, Homo sapien
gagccagatgggcagcatgaattgggtgttttcagtgacctatgaatccataattgatgagttatcaccctactatccctgatctgcctaaggagccagagattctaaaatattttaaaaacttgagaaacagaaatgtttatggttatggttttattaattctttagaggtgatacttgtggttttaatgggttcttgtcatgtttgtgttgctgctgctaatactgttaattaagcaccacattatgcaggtttcttggcgaggccaggccagctgggttcttgtcattaaaatccagcagttgtggtcaagcttcatgtgcagtgttgttagccgctgagatgaaggtgaagccttctcatttggttcatggccttttgggtcaggtaacaaacgtgtataatatgagcctgcagggagacgttggggaactgaacctcacttctttttattgcagattccactgtgtaaagtaattagattcaacatagactacacgattcatttcattgaagagatgatgccggaggtaagggaaaagattgtgtgtggtttgatgtagtttgctcttttgcttgttccatactactattttaaagcattgaacttggccagatctggcttttgccaggaatatctctaaagtatcatattcactgttgaaagagtcagtgaaatgtagctctagtatcaaggttaaaattcaggccaattttcaacttgttgacctgtttttatacccctttctccttgtgttacgtctgctgatattaactttacatctgtttctagtttcttttacgtaggggacagattttggttactggccattatcagaggggaaattggaatagtgaaacaatctgatagctgttgtaataatcttattcgttatctccaatgacaagatcaatgcttggttcatttttcttcccatatatttacatatttttcctaattgtttttcattgcgagtgctcaacagcagatttatctcaatatatgcaagagatttaaaattccaaaggaagattaatgtgaatctcagaatgattcatagtctgatcttgaatttagtggtgtcaacaaatcatactaagaaataacaactagacagcaaacaagcttgtgcacttaacattgtgttggagtcagggtcaatttccggagcccctggctctgcttgcaaaccttgtttaatgggacagctctgtcatgggcagggagtgtggagggggaaattgatcggcatcacatgtgtgcctagttggcacctgtttcattctgagcaagtgttgtttattgtaccttcctttcaaaaagaattaaagaaaaagaaccaccccttcattctcctgctttagaagggtttttttttttttttaacttccttttggtttttaaggtcatatgccttcatttgctattgtaaaagtttatgacttctggcgtgatctcacgcagggtgatttatgaactccgagcaaaacaagtaggaggaagaattatgagataagtctcacttgcaaatatatctgtttagcttgtttacaggagaaattttggtgcagagttgtataattttcttagccctttatttgcattcattactttttgaactttttgggtacacaggacctctgttttttggtaactccatgacaattatgctggatgtatggggcgggggtgggggacaagcctatcaggtgcatatgtataatctgaattaacaaaacatcctcagaagattctgacacagtttataattgaattagaaaaatatattaatataagtgagactttactttttgaatttcttattttatttgtatactgagaagggctaagttgacattaaggaatcctagtggcattattgtctatttcatttccatctgaaactagcgatcagtggccaaactcttcaggaaactatatggtcttagtatagttttaacagacacttttaaagacacttgacaagaacaagttgaaccttcagttaatgtatattttgccaaactacagtaatttaattttggtttatttttcagaatttttgtgtgaaagggcttgaactcttttcactgttcctattcagagatattttggaattatatgactggaatcttaaaggtaagtaataggatttaaagaagagagtagtgtttatggaagaacattatggtatatgtgaaaactcttataaaagttgtagggagatagttgaaatttctcttattttttaaatacccagagaaaagtgttattcacaggaatgcttgttatcatttg

SEQ ID NO: 33402 - DNA, 2300 bp, Homo sapien
taagggctacataatagagttcatattttcctctctagatcatctggcatctctctctctccacgcacttctatctgaactgtgaaattactacttctttcctcagctccctttcctccatttttctagaagctaaacacctgctctgcctcaactttttctagatgacctggaaaattcctccccatcttttttttttttttttttttttggtgatagagttttgctcttttgcccaggctggagtgaagtggcatgatcttggttcactgcaacctccaactcccgggttcaagtgattcttctgcctcagcctcccaagtagctgggattatagacgccaccacgcccagctaatttttgtatttttagtagagacggggtttcaccatgttggccaggctgttcttgaactcctgaactcagttgatccacgctgctcagcctcccaaagtgctaggattacaggcataagccaccgtgcccggcccctcctcatctttgaagacaactcatatgttacctcctctttggttcttttatactttatactttttttgttgcttgtttgttttttaattgaacttagaagttacattgcattgtattctttttgtatttacttacatgcctttcttcttacacatctttacctcttaagataggacccgtagcttattttagagtacctatgaacctaatatagttgttagcaaagaataggtattttaaaaatacattgaatcatgcaaaattttgtaactcttaaatatttttaaatgattataagaacaaagtagaacttaaaaatgataatggctattatgaatttcactcaaattaaccactattctttagaataaaaaggaaaagcccccaagaactaaactttgtatctgagaaaaggatttccagtagatggcattataagactatttttctgtttttcttaccatccctttcactgatagaattaaaatttgtttctttctgattgctgtggtttatgaaaatgattacatctgtataaaatcatcttatggacagattaagcagccagaaaaactcagttaacgcgtctctgggacttctgggtctgttattttccccagctagccagccaattctctgcagtaatctccctccctttttcattctttaattcattcaaaaatatatttacggaaaacctgttatgtgtaggcagtaggcaattgtctgatgatacattggtaaagtaagatagatgtggatttattttatgctgagccttccttcattttcacatgtatcttgagtattagaacaggtaatgagaggggtatactctagtggctaagagctggagtctagagaaagacttcgcagttcaccaagctacctgttatcttaggcatggtacctgatgactcttctgccttagcttcctgcactgttcagtggacatggtagccaaacccatgttatagggatgttgtgatggttacatgaatgaatattgtgaagcatttgggacactgcctggctcaaaaaatgttagctattattatttttattatcatttgttattattatatttattaccacaattgcctttgcttaagagccagatgggcagcatgaattgggtgttttcagtgacctatgaatccataattgatgagttatcaccctactatccctgatctgcctaaggagccagagattctaaaatattttaaaaacttgagaaacagaaatgtttatggttatggttttattaattctttagaggtgatacttgtggttttaatgggttcttgtcatgtttgtgttgctgctgctaatactgttaattaagcaccacattatgcaggtttcttggcgaggccaggccagctgggttcttgtcattaaaatccagcagttgtggtcaagcttcatgtgcagtgttgttagccgctgagatgaaggtgaagccttctcatttggttcatggccttttgggtcaggtaacaaacgtgtataatatgagcctgcagggagacgttggggaactgaacctcacttctttttattgcagattccactgtgtaaagtaattagattcaacatagactacacgattcatttcattgaagagatgatgccggaggtaagggaaaagattgtgtgtggtttgatgtagtttgctcttttgcttgttccatactactattttaaagcattgaacttggccagatctggcttttgccaggaatatctctaaagtatcatattcactgttgaaagagtcagtgaaatgtagctctagtatcaag

SEQ ID NO: 33403 - DNA, 2300 bp, Homo sapien
aatgctggcagacttttccactaccggatcacagtctccccgcctacgaactttttagtaagtttctaaagaatcacatgcatatcatttaaaatgtaaatagagtaaaatgtgaataggctaaagttattgattctgttctcaaatgttcttactttgaaaaatattttatttttatgttgacaaattggcctttctcacgatgacgtttctttcagcttcctcttcactatactgctatatctttttttcattaaatattgttggcatcacttaatagccaaattcataatagccaacaatgttggagctatggagtgggaagaaaatatagaacacttccacatttcttgaaaattagtgaatggtggccgggcgcggtggctcacgcctgtaataccagcactttgggaggccgaggtgggcagatcacaaggtcaggagatcgagaccgtcctggctaacacggtgaaaccccatctctactaaaaatacaaaaaattagccgggcatggtggcgggcacctgtagtcccagctactcgggaggctgaggcaggagaatggcgtgaacccaggaggcagagccgagatcgcaccactttactccagcctgggcgacagtgtgagactgtctcaaaaaaaaaaatttttttttgaagaaatgccaaactgtttccaaagtggctgtaccatttttgctcattatttttttcttttttcagaggtgagatctcactttgttgcccaggctgaatttgaactccggtctcaagtgatcctcttgcctcaccctcccaagtagctgggattacaggcatgtgccactatgcctggctttcttttccttttatttaatttagaccatctttgtgaagtttttcaaatataaattaacaataatattggcaaaacaaataatagatatttcgatattcttttgctccccctctttccaagttgttcttaatagataatgtttaaacgaatgaaatctaatatctgtgttagaaatatgtcttataggtcatcagtcttaataattactgccatatttagcatttaaggttaaaaatggctgggcctggtggctcatgcctgtaatcccagcactttgggaggccgaggcgagtggatcacctgaagtcaggagtttgagaccagcctagtagggatggtggaaccccatctctactaaaatacaaaaattagcctggcatagtggtgcacgcctgtaatcccagctacttaggaggctgaggcacgataattgttggaagctgggaggcagagtctgtagtgagccaagatcatgccactgcactccagcctggggaagagagtgagacttcatctcaaacacacacacacacacacacacacacacacacacacacacacacacaatggtgggttataagaatggcataaggaatagagggcttcatgcttagattgatatatgtattatttagttacaaatccaattttcagggaattaaggcctttgaacttgtgtgggaattgatttgttgcagtgtttggttggttgacttcttggagaggctgggaatagagctatgaggggttgaccttctggcaccaagaggcctttgagagacttctaggctgttgctagtctccactttatgatgctgagtctttttccactttgcatttgagtcagctgtgttattaccttgctcctgttaggacttctgttagttcagaaacatagttcattaagaacagaactggtagtattgtgagattaaataaacaagttcccagaaaatgaagcttaatatagccttttatttatttatggcacccataatattacatcattcattgtctaagtacgtaaatattatacttactatctgaagccggataatttcatgtaaaattaaactttgtataaagttctccctggtgtctgaaaggaagtccttatgttctattggttactttctgtcctgatggatttctgcatatgcaactcatgtcatttatttaatttggggttcgtgtttctgtttgcttttagactgacaggccaactgttatagaatacgatgatcacgagtatatctttgaaggattttctatgtttgcacatgcccccctgaccaatgtaagtatgtgccagttggctgcttttctctttccttgtacctccttcatcccttctttccaaaagtcaaaacatttcctgtcatctgcctcctaagaaacatttcctctgcatccctctgtattgtaaatgagctgcaggaagtctgcagcagtgcatcaggt

SEQ ID NO: 33404 - DNA, 2300 bp, Homo sapien
catagctcactgctgtctcttactcctgggctcaagcaatcctctcacctcagcctccaaaatagctggaactacaggcgtgagtcactgcgcctgactccttattactattatccagtccagtaccctcatgataaacctggggcccggacaggtgctcctgccaccataggctactcactgccaacagaatcaagttcaacctctgtgcttggcatttaaggctctattgactctggacccaggcttgttctccagtaccttccccagaaagaccctactaccccatgttttcccaacagattaccattcgagtacaaagaaccagctagttctttgctcccgttctcctctctaaaatctcccaccctaggcagaggttgcagtgagttcagatcgcgccattgcactccagcctgggcaacaagagcgaaactctagctcaaaaaaaaaaaaaaaaaaaaatctcccaacgtatgaatctgcccagtgattttctatccatctatcaatcttaaatgccacctcctctatgaagcccttcctgattcccttaggtaatcccattccctctagacttagtctatacttaatccttttacagcacttaccagagactgcctcatatcatagtgaagtatgcacacgtctaactcttccactagattatcagctccttgatgatatgggttgattcacagtcatttctgtatccttcacatccccgggaaaagcaacctacacacagtaggtggtcaataaatgtttactctctcaccaatagtatgtttccatgttgctactgtacatttcccttccatgtacctccgcaacagaaagcaggccttttcactgagtcatgcaatatttaatgagcccataaatgggaagcactgtcccaggccctgtagactcagagataataagacacacagcctgtaggattcaaggaactcagaacccacgtacaagtaagtgttttaaaaatacaaaataatgcaataaacacacaaaaaagaggtatgtgcagggcttaggggaacacaaaggtgtgtgccgcacctagaggtgggcaaaagtcagggtcacgaacactcttgtacagtgtgtaacaagagctgaacattcactgccagatcctcatggatgtttcagtagttagaaaatctaaaaatactaatcatgaaattgacctattgaaggcatagtccggctgtgttgtggatgcagactttaattcaaaagtcaaggaattcactgcacctggaaaagtaactctcttttctccgtctgtctcttctcggttgcggtttggaaacagagacactgaaggagctgtcttgaatagttaacacggccagaacgtcagtgcatgtaaaaagaattttaaagtgtgactacatttttattgagaactccctctttccccaggtggatctgcagggcagtcaccttcatcctgatccataactgcacatttactgtttgcatctcccgccagacggtacgccccacgaggcaggcgctgagctcaggatctcactcccctccgagagccgggcggccccaggcctggaccatagtgtgtgctccacaaatgaatgaaaggtctcctttttcacttccacttatttgcgggatccaggcctagcgtcgctcttttgcccttagctgcagatctgaagtggggctgcccgaccccaattcccggacgcttttcaccccagccccggagactccagccccgtttaaatcctgacactcggaaactctcttctaacacttgcaaggtaccccttttacctataaaaggctctcgggccgcgagatcgccgtcagagcaaagccaggctactaccgcaggtaccaagacagtggcaccgcccgcgcctccggaacaggaaaccgagggaattaaaaagcaaacctgagaaagctgggccaagggagggaaaactcttcagcccaccgcagggccttgtgcgcggtgattggcgcgtcaacgaaagcgatggacgtctagaccaatcgtcagcaaaagaccctttggagcccgcgccccctccccctacgtcctccaatccgaaaacgcaaccgggtgagggagcgcttccgcccggagagagctggccgggatgaggcgccggctttcccgggtcttctccagctgccaccgctttactgcaaaactgacgggcgcaaaaacatgagtgactccgcgggagggcgcgctggtctccggcgttaccccaagctcccagtgtgggtggtggaggatcatcaggaggtgagcggacggc

SEQ ID NO: 33405 - DNA, 2300 bp, Homo sapien
aattgaaagcatactatgttgctgtaaagtggaaaaacataaaatttgtttactgtagatggtgcagatgataatctcaagcattactttgtcctcagaacttccaacctgcatctccagcggccttcctgctgcccccttgaactcaacaggtcatgtggggaaacagaccaggactggggctcaggaacaaactaccgcttaatgcctgttctaacattaactaggtgttcaaggtaccctaggtctcaaagtattcttttttttcctttaaaaagggataggggcttgtcagttgcccagcctggaaagcagtggtgtgatcatggctcactgcagccttggactcctgggttcacacgatcctcccacctcagtctcctgagtagctgggattacaggcacgcaccactacgcccagctaattttttcacttctatttttgtagagatgggatttcgctctgctgtccaggctggttagggtctttttggtacacttagaatggtggggttgggctaggtggtctataaaggccatttctcctcttacatcttctctaattctaggtttaatacctaatttgaaagcaccgtctaacctaggctttctcattctctcaaggtcatagacactatatccaggtcctgagaaacctatcttcctctcctattagctgtcaccaacagtaaatccctcttcttttttaacgtccagagaactgcctcccatcccaagcctactgatgctactttaaaacatatttattagatccatgggcctcctttgttgacttggaaaagtctagattaagacaccaatttggctactgtaaatcagcacggccataaacatggaaaccccttttagtgtttatctatgcagggcaccgtgttaaatttttttttttttttacgcaatatgggccgtgcgcagtagctcacgcctgcaatcccagcactttgggaggccggcgggggccgatcacgtgaggtcagactttcagaccatcctggctaacgtggcgaagccccgtctctactaaaaatacaaaaattagctgggtacggtgatgcgtgcctgtgatcccagctactcaggaggctgagacagaagaatcgctcgaacccaggaggcggaggttgcagtgagccgagatcgcgccactgcactccagtctgggtaacagagagagactccgtctcaaaaaagaaaaaaaaaagatttttaaacacagtatgcacacaataatactcctaagagccctgtgagtcctacgattactgtccccatttcagatcagagcccacgttccaagcataaagcctcccatctaaacagcagggctgtggtggcgattccaggagatacttggaagccagagttaactgcaggttaagaacacagggctctgcagccagactgtccggtttcgaatcccgatgccaccttttgtttggttctgggatttgggggcaaaccgaggtaaataagttgccccgactcgtaggaagcgcccataaatgtcagttctcattcttcctagttagctgttttggggtcctctccacagcaacggaatagggcagtttaactctggttaactctctggcctccgatgctaaggttgcgccctctgcttggccctctgagcgtcagggcttccgctgattctgccccagagccctgttgccgtccgctcacctcctgatgatcctccaccacccacactgggagcttggggtaacgccggagaccagcgcgccctcccgcggagtcactcatgtttttgcgcccgtcagttttgcagtaaagcggtggcagctggagaagacccgggaaagccggcgcctcatcccggccagctctctccgggcggaagcgctccctcacccggttgcgttttcggattggaggacgtagggggagggggcgcgggctccaaagggtcttttgctgacgattggtctagacgtccatcgctttcgttgacgcgccaatcaccgcgcacaaggccctgcggtgggctgaagagttttccctcccttggcccagctttctcaggtttgctttttaattccctcggtttcctgttccggaggcgcgggcggtgccactgtcttggtacctgcggtagtagcctggctttgctctgacggcgatctcgcggcccgagagccttttataggtaaaaggggtaccttgcaagtgttagaagagagtttccgagtgtcaggatttaaacggggctggagtctccggggctggggtgaaaagcgtccgggaattggggtcgggca

SEQ ID NO: 33406 - DNA, 2300 bp, Homo sapien
taaagtatatgagagggtatgcatatgttatatgcaaatactacactattttatgtcagggacttgagcatccacagattttggtatccacaggaggtcccagaaccaatcccccacggataccaagggacaagtgtacattgaaaaacagcactctcttatccccattccctcagttctttgcttcagaaacaaatactgtgatcagtttcttgtgtatctttccagcgatattctatatataaatcctgtgtaacagattattccttaaacagtgatgtgcctgattactcacctaaatatttgtaataaatatttgtaatgaaagtttctagaaggttacataaggaattcagtggcagttattccttttagagtgctattaggaaacctgggaacacaaggatttgtatagcctaaataccctttggtacaatggactttttaaaaagcatatattaaactttattatttagtagcaattttttaaatatcattaggaaagacagatgttcatctttttttttttcttaagagcatgttcaggctgggcatggtggctcatgcgtataatcccagcactttgggaggccaaagcaggaggaccacttgagccaaggagtttgagaacagcgtaggcaacgtagcaagaccccatctctattaaaaaaaaattttttttttaatttagccaggcatagtggcacgtgcctgtggtccagctactcaggaggctgagatgggaggatcacttgagcctgggaggtcaaggctgcagtgagtcgtgatcgcacccctgcactccagcctgggtgacagcgagaccccatctcataaaaaagaagcatgttcaaaagttaggggagttaagttctgttgttaactctactgcttattagctatatgatcttaggaaaattacttaacctttccgacccatagtttcttcaagtatcaaatcagaataataatcatacccaactcaggattgttataatgaataaagcactgaagatatgccacaacattgtgcttaatgaattttagcccttgggtataaccttttcctgagaatactcctaaataggattactggggccaggtgtacccacctatataatggatccatgtagctgtgctaaacaaggggaaacattatcctacaaagtttgtatagcaagcctctttctccccttgtgtggtgcctcctgaccgaggttctatgtctttgacattctacctccagtattgcctttgtacttcagagatctcttctgttgttagagaaatggctgcaaagtgaacatagggagttctttgttgttgttattaaagatatgtatatttcctgtaaacagctaagtctgtttagatcctaggacatggcatttatatagcagaatattatttaaaatattttcatctcgtgacccattagccaccaagtatgcttccttaggtaatttttacatagtagtaccatgcccagctggatagagttgccttgaagaagtgatatttacaataaaacaaaattttacaatatttacaataaaattattacaataaaaatctaaagtatacattttgcctgattctcccatacatacctttaaataattatctaagatgttcttgtatcacaaggaaggttgtctcttccttaaagcatatcattaaaaaattttaacttttttttttctggtatgtggattttttgttttgttttccaggaagagtacaaaatcttacaagagctgtaccaatttaagaaacctggcaccaacctaacagaggtatcctccatttgtttctttggggttttattcatttatcatataactaataatatcttgcaaattaccacagtgatctcaaagactgctcaaagtgtgtgtgtgtgtgtgtgtgtgtgtgtgtgtgtgtgtgtgtgtattggcgaagcccatggttagtacttgaaaattatgttttaactaatagagccaagttttttttgtaatgggatgttgcttgttttttgaaagaataactatataatctcagcttttcaatgtatttaaaggaagatttggtagatattgttgatactcgaattcatcaattagaggatttagaagccactttcgctgatttgtgtgatggtgatgatgaagaaacggtacagagatgggcttcaaaccctgggtaagactctcaaacatttttttcccccaactctactaactttcagtcctagatatgttcctaaatttgcaagatacattgcttttaaaaaagtagtattcagctacttggga

SEQ ID NO: 33407 - DNA, 2300 bp, Homo sapien
cagcaattaacaaggcagaggaaacgtgatgtttgttctgatgatcagagaagcctttccagtagagatgacatttacctccttgggatttcagcagacacaggagagtgagaatgtcactctggcagaggaaacagaatttacagattaggagtacatggctggaatgaaagagttggggatggagtggataagaaatagcagtgactacagtttgagtgatacatttatttgcatattcattgattcagcaaacttttcattggtgctgagggaggtaggcccaaggtatgtgctgggtacagaggctgagaaaacacgggacagagtggtggaagatgggcctgggattgtggaaaaaacagaaagcaccagccctgtttgatccttctagaaggatttttttgtagtgtcccaatgatacctttcattgataatggttaccatttcattgagcacctcctaagtgctgtgctgaatagctgtgttactgctagttccagcaatcctgcatggtaggtgttttctctatttacacataggaagagaagctctgagtgcctgagtgcccagcttgtcatatacgatgcttggatttgtgcaagcattgatctcaatggcctggtaattataaaagctgaagaacagctgaaatcaagaacttctccaccccagcccctgaggacaataccacctccaaatgccttgggcccactctggtctctggtgtggtgggacagcgctgtccggtctgcgcaggtgatttatgtctgcctgcttttcggagaggccagagtttattgccttgctgggcagaactgcagctggggcctgccctgtcccatccccatccccccgaaagcaaagatttccaattactgttctgtagaaaatgtcaaaagcattattcaactattcattatcccaggttttgcaatttttcatatgtttttactcttatctgccagcacttgaaaaagaccagctttttcctcttaagagagcttaatttgcagagctgtgcagtcttcctattatgttcttatcatcctctccctttggtaggcagaatgacaaggatgacaaaaaaagaaccaaaaatatttgaaggccttcctgaaaatccaccggaatgaaggatcccaaaagcctgaggctcggttcctcgagtgacctggacgggagccaagggcggctggcattagctctcacagtccactcggcaggagctcgtggctagtgctcatgggaccaaaaccaccaccccagggccatgggattcccccccaggggcttaactgggggattaagcagctctgaggtgccaagaggtcccctctccccgaaatcctcgtaccagtgctaaattacctttggtatcccaaggaccagaggctaagggtagcttggggtgagtggttagctcttcccccatctcctgtggcccctccgccccattctttgataaggtaactgacatttttctctttgctgtgtaaagtgctatgcagaggcaacttcacgtcccctagctcgctctgttccacctagatggcgccctaagccccgcctgtatggagattcggagcagccatctccctggatgccttcctcccacgatccccaggtttctgaagcgggcgcaccaggactcctggctcacccagagagacgccttgcccgcggcggggctcgctcggggaaatccccgcccaccttgttattcctgcaggggaatccccgccccccgtccctgtcactcggggaagggagttcccgcccctcgaatcaaccagggggagggaatccccgcccatcctggaggctcggcggatcccctgcgcagcgaggcgaggagcggaccccagcgccggtgcgtgccggccccgggcagcgggacgcggcggggcggcggctgcaggcagccgaggagccgcaggccgaacccaaggcaccgggattgcgcctcccgcggctgccggcgaaccgcggctctgcagctcggggcaggcgcggcggcggcaccggtggtggccgcggtggcggcagctgcgcggggacccgccgggcggcgcctgggtctggacgcgcgaggaagccgcgggagcctcggccaagccgcgagcaggtgaagcgaccgtcccgctgcagccgggacgcgcggctccgggtgggcaggggatgggggaggcccggcacccccgagaccgtgtgtgcccaggaaagtttagctacaaatccgggtgcgggaatcccagccctggcagggcggggagtgaggacgccgaaccggggtccca

SEQ ID NO: 33408 - DNA, 2300 bp, Homo sapien
ggaagcaaaggagcacttctcaaattattattagaaaattattcaatttgaacttaattcccataaaacttataggatgctaatgaaagactaccacttcctggcagaagagtgggaaaagggaagggggtggagccagcattcactgagacccttataatatgtgtaagccagacactttgtgttagagaattctaatacccttggttttttctgaaatcatcagcctaatttgctttgacccaggaattgcgatgtttggaggactggtctacaaagcttgttctcactgggcacatgtagtgttctcctaaactccatgaggtattgttggttgcagtacccaaaacttcttgaaataaatcttatcctggggttctgtttccttttggttcttccgaaggaggaataccatgacctgacactccttgcctgtttctgggttggctgttgtgcccacctgaatgaagcaactaggggtaattccaggactggtaatgatgataattatttactatgtgctctggggctgcttctgagagtgggcagatttccagcccaggcttgacatgggttggcccctcctgggctttaattacccattccggtggcagtaatggtactggaattgaagctttcttttgcctcctccattataattaattgcttcgaattccaccagatctgtccgttgcaaagctcatttacttttaggggctgctggatgcccacaaccagagcttagagccagaggggtggagtgggactggggtgtgacttaacctgaaccccaaggagtggagtgtgtgcctgcctgtgcaagtcccgggagggaggcccagggcttgagtgagtttgtttgcactgagattggtgccatcaacctcaggagctctccattcctctagctcaggtccctgggagctccaccctgggtgccttttgaagccaggtgaaatgtgttttgagcagacgttccataaaggcttgaggtttggcaccagtgacgcttttacttttcaacaagtgtcaggagtggaaaaatggaagagaatacagctgaagttttgaaaagcaatgaaatgtggggtgactccccctcccgctgccagcccccctcccctgctttaagaaaagcaaacactcttttcctgtcttatttgtgttcccattaatttaagacaggaagcctcagtgggtgtgatgtaaacaattcggcctcgtgggtcgggcttcctcatcagtttgcagctggagcgatggctgcagggcccaggcccactcaggcctcctgggggagggcttgttgactgaaccccacagaaggtgggaggggtaggggagcgggagaaggtataaaggaaatgcttcagtcgtgcagtcaccggcgattgtaattcagcggtgttaactttggttactccagccgaaaggctctgaccggggatttctggaaagttccctgacatcctgccccatacgatggttgtgattttagctgggggctccacccctgtaagaactcaggctgccgcggattatgaaacggagtggtcatgaagtgaattgatgtgggaaggtggagcttcttgcaatggctcggagggagaacttttggtgcaaacgagggtctagggtagggcgctttttcctctaacctgctccaggtttgccccaggaagctcctgagccctcggtgtaaacaaaggtgtctggatgagaagccccaaactccctgaaatcctccccagggcggtttccttttcccggcgaggggagtgaccggggaggggatcttggaatgccgtggggttttgacaagtgagcaggggagtggcgagccgagtttaggattgcattacaggcttttcctaacctcctccaccgcggcgcggagggaggaggggggggtcctcccacagacctggagccggcggagagcagccttcgggaagtcctgcaggagccgcgttccaggagggcagctggcagccgccccaggcccccgggccgcctgcaggtgattaggctaatgagctgccccgggggcgcggagaccggcctggcgagcggattacccggcgcccagctgctgccggcggagactcccaggagctccggagaggaaccctccgaaggtgacttcagaactggaggtaggaaatcggcttctcaggcgaaagcctcaggttttctgatctgatccaggtcgggtgcagactggggctgaatccacaaatgtggagatttagccacagcctcggaggcgcggagcggccacctaagcgtctgcccttctc

SEQ ID NO: 33409 - DNA, 2300 bp, Homo sapien
tgagagaatgggacaaagagaggcaggataactggttttaccatagatttttggcagatgtcaccaactaatactgtcaggaatattttataggcaaattttacctcttgttaggactgcagtttggtcacaggccaaggcaattttaatctttttccctcacttcttttaaaagaaaaaaaagctaaagagcagacttccttctccttagcttgaactgtgagcaggagtccacgctttcctgaactaggaaggtgagttccaggaagttacccacacgatcaactttcaggcctcttgaatgcacacaaaaaatgtggacttgcctggggctccctgctggtgtttggagactaggaactaatcctcccattagttctttctctgccgcaccagggaaacatcatatatactagtgactttctgtcttctttatctcatcagtaaaaggcggatcctgtttttgttttcaagaatgtgttagggtattgggatggctagaatccatttggagcacatgagaaaatgtatagcattttctgtttaggagacatttgaaccatctaattaaaaaaaaaaaaaaaaaaagacttaagtccggatactagaccaccagttttttaatacatggaaaatttagaagcaatttcaaaaatgtctcactgtgactggaactaggttatgtcaatacaaggctcctaggggaaaaatttatactggataaaactctaaaataaatgaatatactaaaaaacaccaaaaatctggccagcagtggtggctcacacctgtaatcccagaactttgggaggccgagatgggcagatcacttgagaccaggagtttgagaccagcttgaccaacatggtgaaaccccatctctactaaaaatacaaaaaatatctgggcatggtggcgggcgcctgtaatcccagctactccaggaggttgaggcaggagaatctcttgaacccggaagatggaggttgcagtgggccgagattactccactgcactcccacctgggcaacagagccagaccctgtctcaaaaaaaaaaaaagaaagaaaatagaatggctgcaagaagtaaacagaggatgtttgctcctattttgttccttacaagtatagctaacaaaggaccttgtgagtattggaataataaaatgtcattcccatttaagttgcacatgtacatttttatacctgcaccaaaggtttttggaatctttgtctctggctgttggatcatgaaagacccctttggcttcagctgtaaaacaaggcaaattttacccataatagaaactactatatatgtgtgttggtttagggaagcctattttttaacattctatttcctgataaaaccttagaaaaatcatattgtgtttaaaagttgaggattttttcagcaactcaagggctgactgataatttctggttttgctagtacttgtctacaatggaagttggaagcttagtcggagtagaaaagttgtaaatttggtgtcatcaagacaaatggcttttatttcccaacagacttctttataaaataatttaaccccttgatttttgtttgcatttggatgcaatttaaaaaaaaatctggccctttaataagtgcaagacagattaaatgtattgtgaaatatcaggtcactgagtggaaagtttcttcactgatcatcctagcttcacatttttagttatgtgaagtacacattttgatagtattttggttttctcctgcctgaaatcttcagtcctcctccctggcagtctgtagaatgaagcagctgtggtccgtggccaagtgtgcgtcctttggtgatggaagagctgatctgcagatacctgcaggaggaagccatgcatgatgtctgctgggatatgatttccccccatactcctggaaaattagaaccgtttatagcagcctggttccaatacactggcagggcaaggattggctccttctcttacaaacacagcgtggctggatgcattcataaatgaaaaatgatctgagtgctgtgggtgggtggggctctggagctcaggaggtgaagccgggaggagagagagagaatctgctcctcagctccacagagcatggggagctggcaggaagttggagcacgcatggcgcagcttgtatttttgttgatagttaataacccaggactttaaagacctgaatggagaagggaagtgaagcacaaccaactttggagtctgtcccattccagaggctgctgaagcacagcagagcacgctcacctgaccagctca

SEQ ID NO: 33410 - DNA, 2300 bp, Homo sapien
aatattttagcaagtttttgttatcattaaagccattttccatacaccatgctgattctctgtgcttggggaacttgtctttctacaaatataggagtgacttctcaaatgttgtatgtgttcatgcctcattgccagtgggtttaagtttttaaacaatgactatgaggaacgcctttgaactagatttctgcagtttgatttcgaaacataggacatctgttgtcaaacttggcaatggctaaaaaaataagattttcatgcttcccatagttattttaattgaagattgaaatacagaattactgcaaaagaatatgtgttgtcattaattgtcccattttgtgacattcctgggagctaagctaaacaataaaagttattttatgtggtagtaaatcagggaccatatggtatcccaaaataagtctgactgagcagttaaattccaggaaattaaaggctaatgttaatgtaattctcacatttgatcactaggggatgaaatcctagatgtaaatggaataccaataaagggcttgacatttcaagaagccattcatacctttaaggtaacaacattcttattgatctcctttatcctattttcctttctttatttccttctggcttgggtttggtgagttgttttttttttttaaccctttgatataaggacattccaaatgtttcagcccacctttcctcactgttttctcagcaaatccggagtggattatttgttttaacggtacgcacaaagttggtgagccccagcctcacaccctgctcgacacccacacacatgagcagatccgcctccccgaacttcaataccagtgggggagcctcagcgggaggttccgatgaaggcagttcttcatccctgggtcggaagacccctgggcccaaggacaggatcgtcatggaagtaacactcaacaaaggtgatagcagctattccttacctttgtctcatttcttgaataacattttggaatctgttgttagcttaattcttccttgttgttctatgaattattcctttggtacaatcttctatcaacaacacgtggtctctgcatgggacagtgaggtcaggtagagagatgttagtcactttagtcaaagtgaagggaagttaccagtagcatggagctctctaagctctccccatgaatcactgtgggtcagaggcttgtgtttaaaaaaaaaaaaaaaaaaatcactggccaggcacagtggctcatgtctgtaatcctagcactttgggaagccgaggcaggtagatcacctgaggtcaggagtttgagaccagcctccccaacatggcgaaaccccgtttctactaaaaataaaaaaaaaaaattagctgggcgtggtggcaagcgcctgtaatcccagctactcgggaggctgaggcaagacaatcgctcgaacccgggaggcagaggttgcagtgagccgagatcgtgccactgcactctagcctgggcaacaagagcaaaactccgtctcaaaaaaaaaaaaaaaaaaattcaccggtgagcttaagtctggggctaatataaaattttaaagaacaaaagattatagttaagtgtacagttaacactagtaactagaattcatgcgtgatcaccaaatcttactgcttttcatccctgtttctttttcctccccacctactctagaaacatgatggaagattaaacaaccaagagattatgtgttaaaaagaaaagcaaaagaaagcttgagtttgtgtacctagaataaaaacgttacttatagcctgcctatttctaaaaacagatgtgaggaggttagttagactaagcagagagttgaccgtcggataattcagtccgtaactagctcccaggttagccatgggctcattctattaacagcagtggcaagtgttgacaaggaaaagctggatttacattctgagtctggaccagaaataaatggttattggtctgaatagatattaattctgtttcaaatcagttacacattttttctagtgattgtgtaatttttgtttttattttctttgaatggtgcctctcacagagccaagagttggattaggcattggtgcctgctgcttggctctggaaaacagtcctcctggcatctacattcacagccttgctccaggatcagtggccaagatggagagcaacctgaggtttgttgtttgcctgatagtgtaaggttctggagtgttcataaatatgaaatatacacgtgtgatatttgttctattacttccctttgagggatgttga

SEQ ID NO: 33411 - DNA, 2300 bp, Homo sapien
ccttggcttcccagagtgttgggattacaggcgtgagccaccatgcctggctgagagccaaagaacctttagggcctgtggtgaaaagcccctccaagaggactgacatcagagcttccttactcctggcccaaggggatatgtttttctttcttaattttttgcagctgtagctcaaaggataatttttgtttgttttcactagaatgaagaagatgtttgcttcatagtcttgaatagaaaagaaggctcaggtctgggattcagtgtggcaggagggacagatgtggagccaaaatcaatcacggtaagtgacagagtcattaggctctcaggaaaatcccccctcaagcagcctcagaatgtgatcagggcacaaattccaatcagcgggttcagagattgctggatttcattcccagctaccaacataaaaagggagaagtgggagaagtagtacgtaaggttttcgttgacaaaagacaagcatttttaacacagagctgacatgtataggccatttccaatccctataaacacaattcgctatagccttataatttacctccatattttaagcagtagaaaacattagaatcaactggccaaacttgtgtttatacaattactcccgtctcaaaaagtcactcaaaattttacatcattcaaaagccttcaggaccatccagagggtcaccttcactgcacgagcccaggcctcattcatcttcgtattcccattgcctcctggatgccaggcccatgtcagacactaaaaaggagttaaaaaaaaatgtgtggagacactggcattgacatttgtgttccatcccccgcactgaatgtatgtttttttttataaagcaagtgtctaccttagaaagttcctttactacaagacccggcacggtggctcacgcctgtaatcccagcactttgggaggtcgaggcgggtggatcacctgaggtcaggagtttgagaccagcatggccaacatggtgaaaccctgtccgtctctcctaacaatacaaaaattaacttggcatagtggtgtgtgcctataatcccagctactcaggaggctgaggcaggagaatcgcttgaacccgggaggctgagattgcaccactgtactccagcctgggtgacacagcgagactccctctcaaaaaataaaaataaaaaaggaaggttcctttactacagatacgcagttagttactatctcccttttaccggaaatcgtaagtggatctggtttttgttcccttttcctttcctcatcccaggtccacagggtgttttctcagggggcggcttctcaggaagggactatgaaccgaggggatttccttctgtcagtcaacggcgcctcactggctggcttagcccacgggaatgtcctgaaggttctgcaccaggcacagctgcacaaagatgccctcgtggtcatcaagaaagggatggatcagcccaggccctctgcccggcaggagcctcccacagccaatgggaagggtttgctgtccagaaagaccatccccctggagcctggcattggtaagatgatcatttcaacaaccagcaggctgtgagctactgcagaaagaggagattctggttgaacatgaaggaaaataacagctaactaacttctagatctgaaaaattaaatgtagcgaagtctagtgtgtttggatgctgcttacaaaagcagtgttacaaataaattagaaaaaaattagaaaattagaaaaatccccccagtagttcaagctgtactgtggaagatttaaaatgactgcagaacagtttccctaagtgtcctaagaaggaatctcttacattcacagcctcttgttaggactggtaaggaaaacaggaaactacgtgacggggcgagcagtgttgaaggagaaattccagaactaagatttatccttgggaaacagcaaggttgtattctttcctggtttagaagaaaagaaggaaatgagggggcaagagtattttgtgtctgaaaacagaaattgcagccttagtcaaccaagaagaactcactggaagaggtttagaaacagattttctacgttccgtccatattcagagcctcagaaccacgtgcagcgtctgtttctgcagtgcgagctgtttaatgccctgttaagtactgcagatgtctggagtgccgtgcatcttggcattcaggggtgacgtctttttttattcgagagggcaaagcagagggtatgggttaggcagtgccttctgggaggggccttttgttccttctccacat

SEQ ID NO: 33412 - DNA, 2300 bp, Homo sapien
aaatggacagaagttaaaacctaggtggccaagaaacacaggaagatgctcaaacttaaatgtattggatgaaaattagaaatattataaatcattcttttaatctatcaagttggccaaaaataaaaaatctcatactatgatgtgttggcaaggatgtggagaaaggaaaacacattttttttctcgtgcaagtatctactggttaatctttaaggaaaattttagcagtgcttacgaaaatggaagctatgaaacaatttaaatttctatctgtagcagaataaaatatattcatctaaaggaaagctaaatagcagttgaaaaaataaattacacctctctctatatactaactgggaccggctcaaaaacagtgttgaatgaaaaaaagccaaatgcagattgtgcactgtgtgacaccaattcatggtaagcataaggaacctaagaatgtgttcaacaaaagctatgcaagacctttttgggaaaaagcataaaagctttctaaaggacaattttaaaaaatctatgagtaaatggagagagagacatatcctgctcaaatctgttaagattcagtttggcctcatgtaataggaaatccaaaatagcagtggtttaaacgagagaatttatttctctcttgtgtaaaaagtccaaaagctggcaaacctctgctttgtacaacactgaatgtttcctaaaggagcagtccccaagctttttggcaccagggactggttttgtggaagacaatttttccatggtgagggtttgggtgggggatggtttcaggatgattcaggtgcattacatttattgtatactttatttctgttattacattttaatatataatgaaataattatacaactcaccatcacgtagaatctgtgggagccctgagcttgttttcttgcaaccaggcatcccatctgggggtgatgggagacaatgacagatcatcaggcattagattctcataaggaacatgcaacctagatccctcgcatatgcagttcacaatagggttcacactcacgtgagaatctaatgctgctgctgatctgacaggaggcagagctcaggtggtagtgtgagtgacggtgagaggctgtgaacagaggaagctttgctcactcacccactgctcacctgctgtgcagccctcctgccaccagtctgtggcccaagggttgaggacccctgtcctagaagactttcctctacttcatctcattcagtccttctaacaacctagtaagataacaagacagatatcatcatcaccattttgcagatgagaaaactggagtttggagaaatctgtaacttgcctgaagtcacagatttgagaccaaacccagtctgattgctccttcagtgtgcgtcaggctgttctggttgcctggaacctcccatgtcctgaagcccaggtgaacactcacaaaattcttttgtttcacataacctgaaggccttcggttaatatgctagaataggacattgggtactaagttaacacaaatataattggttctttggtccttccaaaaatgtatctatctcaagaaaagcaaggactagggaccaaatcattttcctggggcccactacagggctgatattggtgaggtctctcttctaatgtaactaactgcctctatcatttaccacagaaaatgtttttgtccttgtgtgggctggatttcttccaagctgtatttttatcacataatatttatttcaataatttcaataacgactttcagtaatttaggatgaaatcgatacatctgctcagtcttttgaggtctaatcaaaatttctgagaaaatttttttcacacttgggactttttctttcaatgccattttttttccataagatgcctccatagctggtgtacctttagaagtatatgtgtgagaacgtaaatggagggtttacacttgcatttttttcaaagctcatacaaagctagacaaagctataatgtgaacatgctaaactctgtaagtaagtagtccccatggtcactaatgagcacataatcactgattctcagaacttgcatatatcagccagaatctgttaacaattagaagctgacagcctgggcaacatggcaagaccccatctctaccaaaaatataaaaaaaaaagctgtgcatggtggtgtatgcctgtggtagcagctactctgaaggctgaggtgagaggatcgcttgagcccagtgaggcggaggctgcagcgagccaaaactgtaccactgcactccagcctgggtgacag

SEQ ID NO: 33413 - DNA, 2300 bp, Homo sapien
ctgttgagattttattgtgactctcctgtttttgatttccatgagcttcctttttaaaaatcgtagtttgttttatggatgtaataccttcttttagatttctgagggtatcacacctcttttgaaaatttcctttatctgtattatatctgtttcttcagagttcttattttctctttttgatctcttctgtgttggaagctttctttcacgttatccgtgattgtctgtttatatttaggaatggttcccgtccccccaaaaaaagaagctaaataaaaatgatatgtttggatagaacatatttatttgtgaaccacacttactactgaatttttgaaaggaatttagaactaactcgagtcattgaaaagttgtaagcagaagcagtggaatgccatggtaagatttgtctgttagaaagatcagtgaggagaatggattgaaaaggctaaaacttgtttagggaaattagttaagaggcttaaattaatccaagtgaaaaacagccagattaggcagactagaatatagttgttcctcagtatctgtgggcgattggttctaggactcccctcaaatatcaaaatctggatgctcaagtttcttatataaaatgttgtagtgtttgcatataacctatgcacatcctcttctatactttatgtcacccccagattacttacaatacctaatacaatgtaaatgctgtataaacaattgttatactgcattttaaaatttgtattatttttcctggatatttttgatcctcaattggttgaatctatagatatggaaggccgactatattggcaagatgatggagaaaagtgaaacatttcagaaagatttagaggacagaacttcataagaaaaagtgattcactatacccaggctctggtgtccctgacataagatccgttgcaaacggatgtgcgtgggcgagctttgaggccaaattgcaataaatataaagaatgagtgggacgtaagaagtggtggcaatggccaccatatttagatgtaactttttctcctgaggctctgctttctttattttcttgtgctctctcacccttcactgaaagcatggtctagaatagcactgtttgatggaactttgatgatgaaaatgatctgtatgttcaatatggtagctactagctacatacatctatgagccagacacttaagcacttgaagtttggctactgcacattgacacatggtgttagtaaaaacatacactggatacactggatttttggtcttagtatggaaaaatatattaagtacctcaatttaaaaatacttattacatgttaatattttggttgtatttggttaaatcaaaatattaaaattaattttgcctttttttcttttaaaatataactactagaaaatttaagagcggggagggatagcattaggagatatacctaatgctaaatgacgagttaatgggtgcagcacaccaacatggctcatgtatatatacgtaacaaacctgcacgttgtacacatgtaccctaaaacttaaagtataataataataaaataaaataaaattgaagaatagatttgtgacttgtactgtggtttttatatttctgctggtcatgatgtcacagagatagatactgtatgtatatatttttaattttttataagattgacaaagtaaaggacactttgaggacaagtttaagagaggactctcagcattttaaaagtgatgttaaattggtggggcacgatggctcatgcttgcaatcccagcactttgggaggccgaggtggacagatcacaaggtcaggagttcaagaccagcctgcccaacttgatgaaaccctgtctctactaaaaatacaaaaattacccggatgcggtggtgtgcacctgtaatcccagctatttgggagtctgaggcaggagaattgcttgaaccctggaggcggaggttgcagtgagctgagatcacgccattgcactctaggctgggcaacagagtgagactccatctcaaaaaaaaaaaacaaaaaaaaccgtaatgttaaattttatgacatttaaatagctaacattataaaataatacaatacaatggatttaattttgatattatggaattttaactagaaacttatagcttagccaacaacgtgaatgaaggctatagggttctaatacttgtctacagcggtgtaacattttccctcccatctctccctctggatttttccacttttaaaatggattctatatctcaatgtagctttctgtttggaaaca

SEQ ID NO: 33414 - DNA, 2300 bp, Homo sapien
catatctttgtactctttgaactacatacttgactatattagtcaagtaatttttttttttttttgagacggagtctcgctctgtcacccaggctggagtgcagtggcgcaatctctgctcactgcaagctccgcctccggggttcacgccattctcctgcctcagcctcccgagtagctgggactacaggggcccgccaccacgcccggctaattttttgtatttttagtagagacggggtttcaccgtgttagccaggatggtctcgatctcctgacctcctgatccgtccgccttggccttccaaagtgctaggattacaggcgtgagccaacgcgcccagccaattttttttttttttttttgagacagggtcttgctctgtctctcaggctggtgtgcagtggcacgatcaccctcatggcagcctcaaattctgggctcaagcggttctcctgcctcagcctcccgaagacctgggactacagatgtgggccactactcctgattaacttttttcacataataaattaattacatttattttacaaagaaatatttcaagctacaacatttggtaaaatcagaaaagatgaagaaaaaaggtccaaagagggtgtgggctggcgcggtggctcacgcctgtaatcccagcactttgggaggccaaggccggcggatcacgaggtcaggtgatcgagaccatcctggctaacacggtgaaaccccgtctccactaaaaatacaaaaaattagccaggcgtggtggcgggcgcctgtagtccagctactcaggaggctgaggcaggagaatggcgtgaacccgggaggcagagcttgcagtgagccgagattgtgccactgcaccccagcctgggcaacagagcaagactccgtctcaaaaaaaaaaaaaaaaaaaaaaaaaagagggtgtgaatgggagaaattggttgaggtgaaatcgaccttcaccaagacaggtgggaaaaagggaaggtctacttggtgtgccccctggaccctctcttcccttcatttagcactgtcactttccagggcatgggatggtaggcagcagcagttctggataatggatttgtggaagagaagaatccatctaaagcactctttagccacagcccatgatcactttttttaaaaaatttttattttttgctttgctgttgttccactctgtccatacattgtttaatacaggatggcacacaataccattcctggttaaatgtttcacttaacaagcgccaccctctactcctccaactcctgtctcaggtttgacagctatttttttaacctaatttgcgcacgccaagaggatttcacctagtaactacacggagagacatccgatgcgtacaaagacgtggcatgaaacgctgcaggtttattgtctctataaaaagatcgttaaggtcgagcgtgctaacgtgtgcggtactaactgtactcactacgccctggtcactttatagcacaagtccgaggcaaggaaagaagttttacaaacaaaactggtcaactgttctatcttcttactcctggaaaacaataaaggtccactttcaaaccatttggacgcacttgctccttctaaagggttagggagtcccggcagatagcgtacccctccccgcccagcagcagagagcaaagtccttcctgccgatcctgcagaccccggagtccaaatgggaccccgtccacacgaccgcggagtcgcctccgaagacggcggtgtctggggcgtggagggcacggctggaggctgagtggggtccaccttcgcgtggcccaggctcttccattcacggggggccccgccaggttcaggctccagccctgggtagtgaaggggaaacggggaacggaaggagggagggcacgtcacgggagcaggactgcaggaccgcgggtcagggggcgcaggaacgccaaagaaaagacaagcaccgagggccgggaagggtgtaggctgcagtggcagcggatccccggccgccgcttccggcgcctcccggcccagctctcccgcgccgactctgccacatcctccggtgacgtcagccggggccgccatattggaaaggcgccgccgccgcctccgccttggagctcggggtgtttcggggactgcggccacaggcaggaaggcgctcctctcctgccccgccgacgcccggccagcccgcttcgccctgacctgtttcctcatgactgcccccggccctgctgccgacggacgtcgccccggcgtccggatttaacacggaaaccc

SEQ ID NO: 33415 - DNA, 2300 bp, Homo sapien
acttgggatttcgaatgagacaaacccgggttgaaatcccagctctctcagtgactagttgtgagacctgggcaaattacttgcatctctgttttgtcacctggaaactgggataaggaaactcagaggcggctgcagcacagctataccaaatattggcttacaggtggcaatctagctggaaacggagctgcaggacttgcgttgaaactatgtttgcaaaagcaagcacatttgttttcactaagattttatatttacttggagtgtatttgggaagggggagcacatggagattaagagggtaaaaatcaaggtcaccaatgagagtacttagcacagtgcctgacgcctaaaaaattaactgcaaatatttatgtttttttccactagattgaatttcttaagagctggattctatcttatttatctgcaactaacaacgcttggcaccaaatgtagaactgaaatgaattttctttgcaatcttgactaaaaaatgagggttttatcaataacttcgtagagtaaatagaagtctcttaagggctcttgatattcttcctgttggaaacacaaagaagggaaaggtttggaaaaatgaagttgacaaagtcttttattatcaaacgctcaaacttattcctcactgccttgttaacacttgatttgacacttttttttttctgtttgagacacagtcttgctctgccacccaggctggagtgcagtggcgcgatcctggctcactgcaaccttggttcaagcgattctcgtgcctcagcctcccgagtagctgggattacaggcgcccgccaccacaccaggctaatttttgtatttttagtagagatagggtttctccatgttggccaggctggtctcaaactcctgacttcagatgatccacccgcctcggcctcccaaagtgctgggattagaggcgtgagtcatcgtttgtctcatttttgtttacatttaaaataataaaccttgaggtcgggcgcggtggctcacgcctgtaatcccagcacttcgggaggccgaagcgggtggatcatctgaagtcaggagtttgagaccagcctggccaacatggtgaaacccccgtctccattaaaaatacaaaaattagcggcatggcgcggtggctcatgcctctaatcccaacactttgggaggctgaggcgggcggatcacgaggttaggggtttgagactagcctggccaacatggtgaaaccccgtctctactaaaaatacaaaaattagccgggtgtgatggcaggcgcctataatcccagctactcgggaggctgaggcaggagaatcgcttgaacctgggaggcagaggttgcagtgagcctatactacgccattgcactcaagcctgggcgacagaacgacacacacacacacacacacacacacacacaaaattagctggatatagtggcgggcgcctgtaatcccagctactcaggaggctgaggcaagagaatcgcttgaacctgggagacggaggttgcaatgagcagagatcgcgccattgcactccagcctgggcgacaagagcaaaactccgtctcaaaagtaaataataataaaataaaaaaccttgaacgtcatcgctgtaagttgggaactcctatagcaagattccatacatcccatttttggacgttttattccaaagacacaagcaaacggaagaaaacgactgccgtgaacccctgctaacgacaacttggtgactgcaggatcattggacgacggttttatcctcgccatccaatcgttggaaagtccggagagaacgctctctggattggttggaggaaacatctctccaagtgcactcaagaatgggttgggagcggggttcggccggcagcgcctcgggccaatcagagaaagcatgagggcgggctctgccgcaggaaggtggtgaatctcggcgggtcaaactctcctgacgtgatgggggggcgtggcctccagttgcggtctcccggctctctgggcccgcgcacgggatgggcggggcccacgggcctgggcggggcgagcggtgtcagcggcggagccggatgcgggcggcatcgcggcggtcgcggccttggggatgggcggagccccagccgctagtgctggtggccgccgctgctgccccagctggagcccgagccgccgcctctgcgtccgcgcgtcgctgcttcccagggcggcggtatgctggggaaaggagtagtcggcggtggcggcggcaccaaggcccccaagccctccttcgtgtcgtac

SEQ ID NO: 33416 - DNA, 2300 bp, Homo sapien
cacttgtagtctcagctactggggaaactgaggtatgattacttgagcccaggagttcaagctcggctgcagtgtgctatgatcgtgcctgcgaataactactgcactccatcctggcaacatagcgagggcctgtctgtaaaaaaaaaaaaaaaaattaaaaaatcttttaaagcaaatattacaatccttgatttttttaatcatttaatatggggagctttttccatctccagttataataattcttaataagttattctcttatataattatagcctccaagaccctttacatcaaaacctgaagtgttgtaatccttaatttgattctatttatttttgatattatctttttacttttgaattatattcttctattttcattgctcttttaactgtagacatgtgcttggagaatagctatgttctttagaaaattaatatgttttaattgcttagttcacagtaaatggtgtcagaggtagttgattagttttattgtgtgtgtttaagtgtattgacttttttgtgttccataaataattgatttctttcttgacttttaattaatttctgcttttacctgctggtataaatcagaaatgcctgattcttaaagccaatcaataaacagattttgaaaaagctttgagttacttgaaacacatttttatgtcttgacgtacctgaactgtagctgattacttaatgctcacttttctcataacatttgctaaaagtactcagtaaaaatttgaggcatttatcgaaagttacgtattttatgacttcaattttgtgttttaatcacaacatcaatattttgctaattattactcttggtttattttatcactgaattgtcaggattattctcacattctttccaaaatcattccatgtcatcatttactaagtatttacaaaattctggctacttgtactaggcaagtgggttcaagatgagtaacactgaccttatcctcaagggtctcaagtcttttcgcatcttaaaatattccatacacatgcatattccatacatacacatagagttttctagatgactgaagcttgtcccttaaaatattaaaacttaactttaaaatgaaaatccgtaaaaaatgaaaaatgtcttgaggggctgttgctgtgatgcctgtaatcccaaggctttgggaggccaaggcagttggtttacatgagtccaggagttcaaaaccagcctggacagcatagtgagaccccatctctacaaaaattagccaggcatggtggctgcgcctgttgtcccagtcgtacagcggcacgaccacagctcactgcaacctcaagctcttgggctcaagtgatcctgagctgaggtgggaggatcacttgagcccaagagcttgaggctgcagtgagccatggtcatgccactgcattctagcctgggtgacagaacaagaccctttctcaaaataaaaaagaatcttgaacatcttcctgcattcttcaacggaataaactgagctgtcttaatttttttaattgtgacttacatttatcactattaatattcattattttcaggttttttccaatcgtgctggaagctatcatttatttttcatagttgttaatgtgcgctatttctttaaattctcatctcttaaaatgtaaagagattctgagaaatggccttggagtgaataggttgacgcagtttttacttctgataaataagtccatgagcttttttagtgtatagccaaaagtatggattctcactaatgtcttttcagctttcattatcatcttaaggatttcatagtggttccaaactagtttctttgaattgctgttggtagtctcatttaaacttttaagtaaaagctacaacatggataagccttaaatattatgctaagtgagagaagtcaaacacagagccacgtattacatgattccatttgtataaaacgtccatagtaggcaaatctgtagaaactggaagtgatttaggggttgccaagggctaaaagaaagggagaatggagaatgactactagtggctatgtggtttcttttggagatcatgaaaatgttctggaattaggtaatggtgattattgaacaactttgtgaatatactaaaaactactgaattgtacagtttaaaagggtgaatcttacatgtgaattatatctcaatttttaaaaatctaaatacaaatttttatcatgagacccttcaaaacaccactccctgcattgggtttttgttttgttttttttgtttttttgtttgtgaag

SEQ ID NO: 33417 - DNA, 2300 bp, Homo sapien
tgcatatcggaggaaataaaattgtgaattaacattagaaatttagaaacattttagagattgcacattgtcacctatttgcattctagctttagcaaatgtaagtaaataagggacatagaaagaggttctttagcatgttataatactgctttggggaagtcagctttttcttttttgtgtgtgtgaggggtttggttttgttttgctttgtttttgagacagtcactctgtcacccaggctggagtgcagcagcacaatctcggctcactgcaacctccacctcccaggttcaagcaattctcatgcctcagcctcccaagtagctgaggagctgggaccacaggcatgtgccacgacacccagctaatttttgtatttttgagtaggaatggagtttcaccatgttggccgggctggtctcgaactccctacctcagatgatccacctgcctcagcctcccaaagtgctaggattacaggcatgagccactgcacctggcccttttttcttttttaaaacttcatagttagctgtctcttgtgtcccttttctttatctattcctgacagaatagttcatttcttatgttcaggttatttctaggttcaatagttggtcttataagttttgagagaactaatatttttgtcttgataacttctttttagcaccaaattcctcttttagtatttattctcaaaatgtcacacagttttccttgattatctgtctttcctctaaatgtgtcttctgaagaatctgtgtccatctgattactcgaggagtaaaaaactaagaaaaagaaaccttagagaatagaattctctatcagtttcaaaatatgttttttatatgtcatctactcaaaataagaacaagttatcctttaagatatctgaatgcttatgagatatgagtaacttgaccagaactgcagctagtactcttaagataattaactttttcatacttttatcatgtattttttcgtccatattcattttatatattcgattattaaactgtattctaaatgccccataatttccaaaggactattatatttaatagattatataatttttctatattgagaaaatattcatactatttaaatcactgagagctgtgaattagattggaataattgccatttgcttactaatagcttgattagcagatttgctgttaatatacacattttacagatgtttagatggatataaagatagccctttgtctacttttatgaatgatatattaatgtaaagttaacttcttgtcctggtttagtttcatatattctcaagttttgtgtagctcatttatgttttaatcagcttaaagaccctacacatctatcgtcacaggatcagcatcttttccactcttaattctgtttaaccatactagttcctattcgctgttctgcttgcctattgtttctcttttatcattttttgaaatactttatgggaactttaaattttaaagggcatttcatactctctgataactaaaattttcatgcggaagggagagcattaaacttttagaaatgcctgttttgggccgggcgcagtggctcacgcctgtaatcctagcactttgggaggccgaggcgggtgtatcacttgaggtcaggagttaaaaaccagcctggccaacatggtgaaacttcgtctctactaaaaatacaaaaaattagcctggtgtggtggtgcacacctgtaatcccagctacttgggaggctgagacaggagaatcgcttgaacccaggaggccgaggttgcagtgatctgagatcgtgcactccagcctgggggacagagtgacactccgtctcaaaaaaaaaaaaaaaaaaaaaagaaatgcctgttttgggttcttcatttttttcctataactgtaactatattgagcattctatatttatcatcagttctttgttatattagctccagaataacttacgaccatttagagtactgaacaaactcagtagtttattgtacatactcattaaggtggatttttgtgttccctcttgtcttgttgtctttgtgctagtgcactgtgtccagtaatctttccttcggatttcgttttggtgggtagggtttatatttccagaaattgtttattatattactaaattaataagttaaccttttgttcctcatattggattatgtaaatttattgaaaataactccgtggatatattaaagtgccaacaagctctcaaatggctcatgtgacactgatgctaccttaaggaagtgtcttgctca

SEQ ID NO: 33418 - DNA, 2300 bp, Homo sapien
taagaaactgaggtttctgatgcctgttctttttactttttcctcaggctgaaattttctgcttttcatgctcttttctctttcatttacttcgcaatgaaagcaaacatggaaaatcagatacatttgggaagaaattttagctaggctgatgttggtggggttttttattgctttttatgtcactattgatgcaagttcttgggctgtatttttcctcatatgcttataatgtcattctttatgtttcagacgttatgaagaggacatgtactggaggagaatggaggaagaacaacatcattgggatgatcgccgccgaatgccagatggaggttatcctcatggtcctccaggcccattaggccttctgggagtccgaccaggcatgcctcctcagcctcaggggcctgcagtgagtgtccacgttggtgatacaaggggtgaaagtttgactggttcagcattagaagaaaacaattttggaggggctaatgtttagacttaataatcttgtaatcttggtagtttttttgagacagagtcttgctctgtcgcccaggctggagtgcagtggcgtgatctcggctcactgcacgtaacgtgcgcttcccaggttcaagcaattctcctgcctcagctttccaagtaactgggattacaggtgctcaccaacacacttggctaatttttgtattattagtagagatagagtttcgccacgttggccaggctggtcttgaactcctgacttcaggagatccgtccgcctgggcctcccaaaatgctgggattataggcatgagccacctcacccagcttgatacaagtttttaatctgatttagaatctttcctccattttttataggaagggaatatgtttcctgtgtcttctgtataaggacctcatagaatttctgggaatctttcttattttcggtatatgctaaacgggaacggagctttttatgccaactgttctttcacatgagactcttgcctttggttttccttacatgagcaggaacaactaattttttttcttgtttcttttcttatttttcctttggagtgcagtggcatgatcatagctcaccgaagcctcagcttcccgagtagccggtacacaggcatgagcctctatacctgtcagaaacaactgatgttgaaggcaactgctttgtatttagatttattcttactggtctgggtgcagtggctcatgcctataatcccagtactttaggaagaccaaggtgaaaggatggcttggtgctagaagttcaagactagcctgggcaacatggtgagacccagtgtctataaaaatttttttttaatagaaagaaatttattcttatttttccattaccagtggcttagaatcttttttccttcttccagttttgaccatccaaaacctactacttctaaattgagtgaaagataaggggtagataaaatggttttaagataagccccagagttgatgtgttattaagactataggaaaaatctgcatcttgagagatgcagaagctgggtaaaagggacatcttgtgtaagttcagtctaccaaaaacaagatttgtttctctatagagcagttacaagaaaaaagtagacttctcttccttaacctgttctctcatttatctttgctcagagggttggcagttgtaagacttgaattactgaaagcaaagaaagtttcagaatcactggtttctaaggttgagtaaagagcattttcatagctttaggtttatatgtattagaaatgttacttgttttgaggcaaagtgggtgtacatgcatgcatgcatgcatacatacatatagtcttgatggtataactttccatagtttgcattttcgtttttactgaaatggaaaaaagaagataaaggctttcttattgaaaagatacaacaaatatgtatagttgaaaaatataatttgcttttgctcaggaaacttttttttaaattgagcaactttgtttctctgtagcccttacgtcgtcctgactcatctgatgaccgttatgtaatgacaaaacatgccaccatttatccaactgaagaggagttacaggcagttcagaaaattgtttctattactgaacgtgctttaaaactcgtttcagacagtttgtctgaacatgagaagaacaagaacaaagagggagatgataagaaagagggaggtaaagacaggtgtgttttgaaagttatttaccatgtgtaattttggtttttcttatgtggacttcttacatttgaaatatagcttatg

SEQ ID NO: 33419 - DNA, 2300 bp, Homo sapien
gtacgaaatgatgaaggaaaagtaattcggttccattgtaaattatgcgagtgcagctttaatgatcccaatgctaaggagatgcacttaaaagggcgaagacacagacttcaatataaagtgagtaaaatttcagctattaccttctttaaaacaaaaaacaaaaacaaaaacacccagagcattctttatgtaaaagaaagcatctaaacacagcttgccaagtccatgatgtcccattctaagattagcatgtcatgttggtagactcagatggatgtttggtttttatttatccatttttaaaataaagaagaataacattctcatcagttttagtaattgtggcaaaaactgaagcattgcctggaccaagcaatcatgtaaagataattaattcacataaaatgtttgaaaaaagtctcaactatttatccaccttctttatctggtagaattcccaccaaaatgaactttgagatgagttgatatgttggaaaatcccttcacttatcttagcgtaggaattcttcactgaatacacttcaaatgttaagataaatcagatattgtatttgaagtttttttttttaatgagatggagtctcgctctgtagccaaggctggagtgcagtggcatgatctcggctcactgcagcctctgcttcctgggtccctgttcaggcatttctcctgtctccgcctcccgagtagctgggattacaggcatgcacccccatgcccagctaatttttgtatttttagtagagatggggtttcaccatgttggccaggttggcctgaactcctgacctcatgatccgccctccttggcctcccaaagtgctgggattacatgcgtgagccaccgtgcctggcctgtatttgaagtttttaactaggctagattgatgtactagatccatgttttctgttttaaacacggaggaggtgaaaattaaaacagtgtaaaagggtagtacttaaatatgtaaagaaactttttaaccccaacatagacatttagagtcatctgtttataaacagttacagttgacccttgaacaacatggaggtcaggggcccctcacgcagtcaaaaatttgcctgccttttttttttttttgagatagggccttgctctgttgcccaggctggagtacgatgacatgaacatggctcactgcaacctcccgggctccagtgatcctcccaccgcagcctcccaagtaactgggactacaggcatgtgccaccatgcctggctagcttttgtatttttctagagaacgtttcaccatgttggccgggctagtctgaaactcctggcctcaagtgatctgccttccttggcctcccaaagtgctgggactccaggctgcttataacttttgactccctaaaaacttctaaaagcctactaatgaccagaagccttactgataacataaacagttatttttatgttaacacatttttggtatgtcatgtatctcatatatactgtattcttagaataaagtaagctagagaagagaaaatattattgagaaaatatgaaaatcaaaatatttactattcattaagtggaagtgggtcatcatataaaggtcttcatcctcatcatcttcaagttgagtaggctgaggaagaagaggaggggttggtcttactctctcaggggtggcagagggagaagaaactcagcagcatagatgtaagtgtattcatatacttcaaacccctgttgttcaagggtcaaatgtaaagtaaaattaaatatccattagtttttctaaggatttcatgactttttgttggtcagcactaagttacatactttttacataatttttattaatgtattttgaatcttttctctgatttaccttaattatattgattttactctctagtgggaaacttgcaactaaaagcctccgtgattaaagaataagtgtaattgtatgattaaaaatacatgtagattgttttggggctgctgttttttaaatgtcttatttatattaatagaaaaaagtaaatccagatttgcaagtagaagtaaagcctagtattcgagcaagaaagattcaagaagagaaaatgaggaagcaaatgcagaaggaggagtactggcgaagacgagaagaagaggagcgttggagaatggaaatgaggtaatatctttaacttttaatagcctggtaagtggttcagcctttcttaaaaacttagccattctgagcatgtgactcccattcaaagcaatccagatttatttacttccaattttcact

SEQ ID NO: 33420 - DNA, 2300 bp, Homo sapien
ttctccaacgctcctcttcttctcgtcttcgccagtactcctccttctgcatttgcttcctcattttctcttcttgaatctttcttgctcgaatactaggctttacttctacttgcaaatctggatttacttttttctattaatataaataagacatttaaaaaacagcagccccaaaacaatctacatgtatttttaatcatacaattacacttattctttaatcacggaggcttttagttgcaagtttcccactagagagtaaaatcaatataattaaggtaaatcagagaaaagattcaaaatacattaataaaaattatgtaaaaagtatgtaacttagtgctgaccaacaaaaagtcatgaaatccttagaaaaactaatggatatttaattttactttacatttgacccttgaacaacaggggtttgaagtatatgaatacacttacatctatgctgctgagtttcttctccctctgccacccctgagagagtaagaccaacccctcctcttcttcctcagcctactcaacttgaagatgatgaggatgaagacctttatatgatgacccacttccacttaatgaatagtaaatattttgattttcatattttctcaataatattttctcttctctagcttactttattctaagaatacagtatatatgagatacatgacataccaaaaatgtgttaacataaaaataactgtttatgttatcagtaaggcttctggtcattagtaggcttttagaagtttttagggagtcaaaagttataagcagcctggagtcccagcactttgggaggccaaggaaggcagatcacttgaggccaggagtttcagactagcccggccaacatggtgaaacgttctctagaaaaatacaaaagctagccaggcatggtggcacatgcctgtagtcccagttacttgggaggctgcggtgggaggatcactggagcccgggaggttgcagtgagccatgttcatgtcatcgtactccagcctgggcaacagagcaaggccctatctcaaaaaaaaaaaaaaggcaggcaaatttttgactgcgtgaggggcccctgacctccatgttgttcaagggtcaactgtaactgtttataaacagatgactctaaatgtctatgttggggttaaaaagtttctttacatatttaagtactacccttttacactgttttaattttcacctcctccgtgtttaaaacagaaaacatggatctagtacatcaatctagcctagttaaaaacttcaaatacaggccaggcacggtggctcacgcatgtaatcccagcactttgggaggccaaggagggcggatcatgaggtcaggagttcaggccaacctggccaacatggtgaaaccccatctctactaaaaatacaaaaattagctgggcatgggggtgcatgcctgtaatcccagctactcgggaggcggagacaggagaaatgcctgaacagggacccaggaagcagaggctgcagtgagccgagatcatgccactgcactccagccttggctacagagcgagactccatctcattaaaaaaaaaaacttcaaatacaatatctgatttatcttaacatttgaagtgtattcagtgaagaattcctacgctaagataagtgaagggattttccaacatatcaactcatctcaaagttcattttggtgggaattctaccagataaagaaggtggataaatagttgagacttttttcaaacattttatgtgaattaattatctttacatgattgcttggtccaggcaatgcttcagtttttgccacaattactaaaactgatgagaatgttattcttctttattttaaaaatggataaataaaaaccaaacatccatctgagtctaccaacatgacatgctaatcttagaatgggacatcatggacttggcaagctgtgtttagatgctttcttttacataaagaatgctctgggtgtttttgtttttgttttttgttttaaagaaggtaatagctgaaattttactcactttatattgaagtctgtgtcttcgcccttttaagtgcatctccttagcattgggatcattaaagctgcactcgcataatttacaatggaaccgaattacttttccttcatcatttcgtaccttggtgtggaaaaaaaattcaagaatcatcatagttgaagattatatcattcataaacccccacatattatttgatgaagttgtacacagttagaaagaagtggcaatgtctattacattttttttttc

SEQ ID NO: 33421 - DNA, 2300 bp, Homo sapien
aaaatatcattgagattgagttagagttctagatgcgtacataagaaggaaaagagtaagttgattcagcttttgggggccaagattgcagtcctggctctgccactagctatataaccttgggcaatttagagaccttaacttctttgggcttttatttcctcacttttctataacaggacttgccctaaataattgaggctcagactgcttggtggagctatttcaggccactgcagataatgaaaggaaagtcccatccagctctgaattgtatgatgaacatataattgtatgctaattatttgtcagtttacaactgtcttttaagaggcagtttttaaaaagagagtttgagaccagcctgggcaacatggccaaatcccatctttaccaaaaatatgaaaaatgagctacgcatggtggcaggcacctgtggtcccagctactcaggagtctaaggtgggaggatcacatgagcctgggaggtggagattgcggtgacccaagattgtgccaccgcactgaagcctgggtaacagagtgagacccatctcaaaaaaagagtaacagaggaaccatttggtcctactcacaaaactgtccagttgttcttactaatatcctctcgtattaattaacagccttcctcaatcatgtgcattcacaatgatttttaatatgtaatttcactatttattggctaatgtaactataatactatttttgcttgcaagtatataccatattggccctcatgtattttaaataagcattcatttaagggccatggattctaatacagattctatgtcaaaatgtattctgaattagaaaagtcagttttataaacatagctgtttgtaaagaatcttgttccaccatacagtaactttttctttcttctaatggtataggcacatctcccccgcctcatcttaaccctgtaactaaatataatttctttatggaatgatcactgtctattattctctgtccaacatttatataagcaacaaaagataaaatttttaaaactgaaagccattgccttatattatggctatatatgaaagtactttgtaactcagtgttagataatattcttgataaacaagatacagagaaccatagatatgtcacatatgtaacgaatgccacatgccctttttcaacttaaaaagtttgttttggtctcatttttagatgagtattagagatttcttgagaattgaataatcttaatgtgtaaagaaaattagtgaagcaaaatgtttcctttttatttgaaacagacttataaagaacatttagaaggacagaaacataaaaaaaaagaagctgcattgaaagcctcacaaaataccagcagcagcaacagttctactcgtgggactcaaaatcagctacgttgtgagctctgcgatgtgtcttgtacaggagcagatgcgtatgctgcccacattcgtggtgctaagcatcagaaagtaggtgtttttttcccacacacccttatgccttgattctgttatcttttactttttcaaagggggttaggtaaaggtaacttcaaagttcgaaaacttttaagtgcattataagccttgcttatgtgctaataatacataaaggtgacatcaaataatcattgctaaaagagggaaagactggagacctgtctttaaattgaactaaaccatttatttcactaactgggaattgtcatgtgatcatttttaatgtagccaagtctgttcatctttctctacctcagtttcctcacctaatagtagatggaatatgtatgcatatttgcttcacagagattatcttgaaagtaatgagttttgtatatgtgtgtatatacaaaaacatatagcagaaaaaatacaacaaagaaaagcatggtttagattttcattttataatgttccaggcagacttttcaaaatctatttgagtttcctgacaaataagtgtgcttttgttttataggtggttaagttacacacaaaacttggtaaacccattccatcaacagaaccaaatgttgttagccaagctacttcttcaacagctgtatctgcttcaaagccgactgcctctccttcaagcattgcagcaaacaattgtactgtgaatacgtcatcagttgcaacgtcttcaatgaagggtcttacgactacaggaaactcgtctcttaatagcacatctaacactaaagtatcagcagtgcctacaaatatggctgccaagaaaacatctacccccaaaataaattttgttggcaagtactgata

SEQ ID NO: 33422 - DNA, 2300 bp, Homo sapien
cacgccggcctccaaaggcctgccaagcaaacaagcataaaactggcctacacagactctttttaggcaagtaatcaacacctgtcttttctcctccagttttattcaaatagcctagtaactaatagagccggttcatcaaagcagttacagtcagtgtcttgaagcttgactgctcaatgaagttcaaggcaaaatacctttaaaatacagttctaatgtcctatgtgtaggaggtatttcttcctagcaacatccttggggcacaaataacttttgcctgggaaaacatcagtattctcaaaaataatgacacttaacttttctccaaggttctacattttctctttctgaaatgagtaacaggacaaatcagacaggttctgagagcctgtacttttgtaggaggcgtggggagcaaggttggcacaaaaaagaattgaggcattgtttctgctctggcacaagaaagtaggacaaagccctgaatttcatgggtgggttctgattcaccctttgcatttcttttttttcctttcctttttttttttttttttaagacggagtctcgctctgtcgctcaggctggagtccaggggcgcgatctcggctcactgcaacctctgcttccagggttcaagcgattctcctgcctcagccttctgagtggctgggactacaggcgcccgccaccacgcccggctttttttttttttctttttttttgagacggggtttcaccatgttggccactgacctcacctcgtgatccacccgcctcggccgcccaaagtgttgggattacaggcgtgagccaccgcgcccggccagcatttccttttaatgttcatatccaacaatgaggagagatgaggagcagggagtctgggggatgggcatggagaaggtaaggaagaggtgaaatgcaggcagtacatatgtacttgatggaagacacgaaacataaggccagagaaactagacgatcagaagagggactggaagaggaaagagaatggttgaaaacgaactgagaaactaaagggaagaaagcgaggaaacagagggaaagaggaaatgcttacatgggggcaagtactgttctgtccttaccactaaagatctggcacgtgatctggtctccctctcacttgactccagccagactgatcttcttgctcttgaacattcattccttcatctggacccttccacttgctgctcttcctgcaggcatctcccaggcctgtccttccttccttcaagtggtctccctaaccacactctacatgaaatagcacctcccttacccttattttccttactctgctttatttatgcttgaagctccagtcaccatcagacagaatttctgtgttttggctaccggctgttggctgacatatacccgctcctagaacgtaaactccacgggaacagggactttgttttgttctctgccgtatctccagcacctacaacactgcctgacaccctgctgggtgaccgatatacgccggatggctcagggagtgggtgcaggtcgaggaaagggtatagcaagaggtatgtccgggagggatgtttagggtgtgcttttagtccaacagaaaagcactctccatcctttttctatttctctcctctccttctccctccctccgcacttcagaggttggggaaaagctgcgggaaagcaggaaataaggaaaaatcctaaattgcccagctcgaattccaatgaaaaattaatgagcgaggaagacagggaggcagggaataagtgcacatgcaaaagttaaggaagccagtggaaagcaaagaaaaaggcgaacagacgtcactctctctggtcacgctccccgactccccagaggacaggcgaggcgcttctggcacacgcccccgtcgccccgcggccgcgcggcgtcaccaccacttcggagaaggccaggcccctcttcccccgcgggcttccccgcgcccgcaccgccgaggccccggcacgcgcccgggggagccgcgaagacggcggggactacagctcccaggatgccgagcacaggcgcgcctgcgcagtgcggtcggaggcggcggtctgttctccgctgaggaggagcggggcagaggagggaggcagcgggtgagagttcagagttcagcagcagcagcccgagcccatgattcccatatgccctgtagtttctttcacctatggtgagtctaatgtggcccgcgaggcctctgcccggccccctccctggccccgggcagcggggagccgcgggggttggggcagg

SEQ ID NO: 33423 - DNA, 2300 bp, Homo sapien
tggtctcaaacccctaacctcaggtgatccacccgcctcagcctcccaaaatgctgggattacaggcataagccaccacgcctggcccctattttgtttaaaataaaaaagtttccttcctctttcatctatgtaaaaaattatttttgtttattttcttgagttatgtttaccttttaaaaatgggcaacgcttaggatcaaggattttcgattagttttacaaagtaccacacccaggaaaattgagccaacaaatttgcatgcaaagtttcaggtctccctacttctaaaaatgcatacctccttaacagctctccacctccgacgcttagagaaccgaaacccaaacctacagcaggcacactgcccaggttccctcagtgacacagaaactgaatgaaaacttgttaaagcaggaagggttgcagatggaggggataccatattagtttaagtgtacgtggtttaccttgaatattaagcatttctttagctaggtgtggagctgcgcagtgtcccatgacaatgcataatgtcagtgtttcttttctttttttttttgagacggagtttcactctgtcatccaggctggagtgcagtagtacaatttcagctcactgcaacctccacttcccaggttcatatgattctcctgtcttaccctcctgagtagctgggcacacgccaccacgcccgcctaatttttgtgtttttagtagagacggggtttcaccatatttgtcaggctggtctcgaactcctgacctcaggcgatccacccgcctcggcctcccaaagtgctcggattacaggggtgagccaccgcgcctgatgtcagtgtttattttcatggcttcttttatttcattatgatggagagtttcacaacaaactaagggattagtttgtatttttgtcagcatttaatcctttaaaagtcaggtaattctagaaagggacgtgtgggggatgctttcacgtttagtgttcagactttgattccatccgctgtgttctttgcgtctcaaccccattacacattccgctcccagctttaatgtttgcagggaatatataactctcttctcctataagggtgggatgggtgggaaccacaggtctaactgctccatatgtagatccaaacactcctccctttctgcaacccactgcccttccttagcctctgtggcatctccgatgtgcaattctgagcttcgacaggattccatcctctactttgtaaaatcccataccattcctctacctgaggcaggaaaatagggtctggagggagagaacataaggacaattcacgcttcagctgtaacaggaaatatcctctccatagggcgttaactttggtttcctcgtctataaaatggagagaacagtcatttctgctttggaacatgcttgttaggatgagtaatgtaaattgcctcctgcagcgtctgacacgtagtgggtgcttgataaatctttgttaatagatatgcctttatattgattcttagctgtaggaagtattcattcaaatacatattcaaataatcttttagctatattcctgcttgtatatggattcctcttgccttctgtgaactcccttacatctccaggacttcaatacaggaataaggagtactccaaagatttcttgcactttctggaattaaacgctgtgactttagcttccttcctttggattttaggaggcagaggcatgtattgaggtgggtgaagtggggtaggaagaccatttctgggaaaatgggccagagtattgatctttttcattatgaccccttcgcttcattagagtaaacatttattgaacaaacgcaaagcttggcgcttgtcactcatgttttattggcgttttccttttttttaatttttttttaagctatctcctacaggaaggatattagctctttcattctctcaagggtcagatgtaatcttccaacatctgactttcgcgtcacccatttaggaagagacgcggtccctttaaggccctggaaagggtctaagtgttggtttctgtggggaggccacgccccatcacgtgaccgcagccccagcgcggcggggccggcgtctcctggctgccgtcacttccggttctctgtcagtcgcgagcgaacgaccaagagggtgttcgactgctagagccgagcgaagcgtgagtgcgcgggaccccctacccctactcctcggggcccccaccctcccagccgggccgtgagctgccttcggccctccactcctctcgccggcaatggccgcgg

SEQ ID NO: 33424 - DNA, 2300 bp, Homo sapien
acttcttggctcttgtgaataatgctgctatgaacatgggtgtgcagatgtctcttggagtctgtgctttcaattttttgggatatatattcagaagtaggattgctggatcatatgatagtttaaacagcaatttcctttggttgcagttttgatactgagagtagtacagttgacccttgaacaatgcagggtcaaaatgcaaggcaccaacccctgtgcagttgaaaatctggttataacttttgactttgtcaaaactgctaagtatagcctactgttgactggtagccttaacagtaacataaacagttaacatatatttgtatgttatatgtattatatactgtattcttacaataaagtaagctagagaaaagaaaatattactaagaaaatcataagggagaaaaattacattttactgtactgtatggtgtttatcaataacattagtttacgttgtctgtttataagatatgtcatctgttaataaaatatgtcatctgttagaaattgtaggcaaccacagctgcagatttcagtccgtggtacatatcaagcaattcaacttttttatttttatttttatttttatttttttgcattttaaaattaaagacaggatcttgctgtgttgcccagattggattcaagctcctgggctcaagtgatcctccggcctcagcctcctgagtagctgggatcataggcatgcaccactgcttctggcagtttttttcttgtgatgtcatgccttctctctgcttcttgggagcactttcagcatcactaggggcactttgtataggactcatggtgttatttaaagtttatggtattgcagtaatcatgatgaaaaataatgtgaaaaccgtgagagatcactttttactgcaatacgcaatttgttggagacatgaactgctcagcagagatgattagcatcacatggtgttttacacaaggtgttttaagcagatacttgtaacatttgagtacactgagataacaggaagtggctatgaagttaacactagtacactactgtagttaattttatgcagttatgaattaatactccatctttgtttacatttctctctaacttcatataatagatttgtatgttttatgatagtaagtgataaaataacctcatatctaggtatgttttatgcattcatgacatacctaactttttcttaatgttttcgttatttctaggctatgcagttgttctgtgagttttttcaaattgtcaagtctgcaaaaatttttccagtatatttattgaaaaaaatatgcatataagtgggacctgcacagttcagagccatgttgttcaagggtcagcagtagtcattttcatgattagatgtagagtgagcatgcagcaagttgtgaatatgaatacaattgaaacagataccactcttgaaaggagcacctctttttatgtttgtttcttttgcagattgggaaaatgaggtacgttagtgttcgcgattttaaaggcaaagtgctaattgatattagagaatattggatggatcctgaaggtgaaatgaaaccaggaagaaaaggtgaggtctaattacttgaattttattacagtgttaggactaaacgacaacttttctgagtagcttacttgaaatgttggcaggacacacggggcaaggaagagtcttactcaattgattctctatcttctgtagttattttggacatgatacttaacatttttttaatgagatgtcttaatacagcttttgggaataaaacccagaaaagtaacacccctaatatcacttcagttggctgctaatttacttgaacaatttttaaaaaggtttatgcaattctgaagcagattaggcactatctgggaacttgtaaaatcaggaatggaaaatcttggtttacaatgcttccttttgattcagctcctaaaagctattctttagggcattactcttcaagcggatctctgctttccttccatttgtgcttcatccagtcccaagcctcttagcattgtagaaacatattttgtataattcaccaaacagctagagaaggtgagccaacctaaatttgtatatttggattgctgctctaggttgaccctcagctaaagaaaaatgcttccttatttagttttattctgcctgcctgttagtttgaaaggtaccacttgtttgcttcatgcagtttttttttttttggttaaactcagcctctatatgtgtttatatgctttcatattttcttcaagtcacttctggattggtaat

SEQ ID NO: 33425 - DNA, 2300 bp, Homo sapien
ctggcaaccagtttcgaaatccattaagacccttggaattcatgatttagttcttgttttgttgttgttctttttctttttttttttttttaatctgtgctgccataaacgcctgcccttctgcaaattcaggaaagatttaattgctgtggagcactaaatctcaatttccagtgtgtgtggattaccctgtttgtggaattaaattttatacagatgtctcttttgctcctggttagtggctctaattaaataaatggaaattctcgcaggaattagaagctcctacttaacagtgaagatttcgggatcacagtgcataatctgaatataaatgacccagaagctgaaacattacccataatcacattgacggttccagaaagagcgataaggagagtgctgttaagggaggcgagcgctgacgccagaagttgccatatccccagaaaccccagtttgccttttcaccgtcgcaagtgagaaccagagcgcgttaaaggcctcggagtaaaaaacgcagcgtctgggactgcggcacccgggttgagtcgggtgcaagtttctgccgaaagagggcgtcggtctgagactaaaagaaatttgtggacacggacgcctagtcaaatgaaagaccattttaacacattttcaatgtatttaaatgtgcgggacttaattgtcagaattctcccgcccagtgtagcccgttcacattgcaaatgacttggctgcagtaggcacagaaggtccagttccattttgacccgccccgccgcgcggcggactcccgcgatgctcctctggtcacggacttctccagagccgcttccctccggtctccaccgctgctgtggctatggccagtgggaggactgggtctccgaggcaggacctttcttggagtcgcggaaccccagcacagtgcctcgagcgctccagagaaggagcggttggatctttgagcactcaggttggaggggagcgtgtgtcgtacccgggggacctaccgggaacgttttgggaaagacagtccctttatttaggtacctggtttagcaaacaaagccccgaggacgctttggggatgctttccaagctttgtgacacctccagaagttgaaccattccctcgcctttgggagcaacaagtttcactttcctgctctcagtgcgctgacagagggtccgtgagctgggacactgtgacctcggcaccgctgcgattccagcgcaaacctgcgtggcccagggggagggggctggcgcggggctgaggaaggcggggtgtaggtgacgcccgggccagccgggcacaccaggtccgcgatggagccatctgcactgggaccttggtccttgttccctgaccttgcgccgagggaccaggaaggtcaggtgctcgccccgcgtcggtgcttcaggagggaatgtggccagaacgagaaaggtgagagcaagcggcacctaaggatttttgcaccgaaaccacaatttctagaaccatccctttcccccagtcctggtttttttttttttttgcacggtgtgtgtgtgtatatgtgtgtgtgtgtgtgtgtgtgtatgtgtgcgtgcgcgcgcgcatttctctactttaaagcacgtttccttttttgaagccaggagctggagagcgtggaaagggagaggcggtgatcgcacaggcacgcggcgtggtgggggctcttgccggtgcagacgtgggcgatttcagctttaaggaaaaggcagagggcctgcggggagtggtggttagggacaggggcgcgatgggtagtgaaggggtgcagggaggagccctgatgtaagaatgttaatgagagactcccccagcccagcccccacatctccccacccccacccaccccacccgctggaaacacaagcccggcctcggcgcgccatgtgtggtaacacgctcagccgctgccacgctatttaaacgcgggctatggatccaggaaccggcgcgaatcaatgagatcaaatgcgagggagatgcaccgtcaattacaaacacttggacaagtctaactttttttttcttctacaaaaacgctttcaaaagcaaccttagcaacgcccaaataagaagccacctctaagcaaaatagtatatgtataaacggagggcgaatatatacaagtatatatatatgtatattacagacgcacaggtttacacccggtgaactttttctttttctttttcttttttttttaagaaaaactagtgacattgcagagaaggacgcttcctctctatcttttggcgcatt

SEQ ID NO: 33426 - DNA, 2300 bp, Homo sapien
tacagcattcttggaaagaatttaacacccaaaaaggggaaaatgtaatgaaaaatctcaaggttggaaatacagccttactctctctagagctggaggacaggtttgtggttgaggacttctctgtccgatgtctacattcaggttctgacttcatatcttgaaaaaggatttcctccctgtctttttcagtgtctcataaacgctactctggattgttgtaaatattagtgagatgggaggatttacagaagaaaagcaagtcaaaaatatttcctttttgatgtaaaaaaaaaaagccctatttcgcactaacattttattttacaagtattttaatcttatattttggtattagaaaaatttgtctattttttcattttgaagattaaatgttgcttacattttaaaagcatgggtgaagtgtacaacaaaccaataatgataaaaaatacttctctttttctccctgtttccctttttcccttggccacagccaaatgctaattgctgctttaattacagagatgtgtaaatgtattcagattacaaactctacaggaatacatcaacattttaactcttttgcgtttttactgtttaactgttttaaatgcaagttattttagggtgacactccttccagttctggccagatcatgagtttcaagatcaagagtaaaaagttattagaattaaacagttttataaagggaggcagcccttttccctcaagaacaactttgttgagagttactacttgacagcaagcacagaaatgacaaatttaaaacttttacacatggcatttaccaaaattcccagtgattattttgtttaaaagagggaacctaaatatctactctattccctttcagttaactccacagaactttgtaggcatccatgaatacctgtaatagtgggttaggtgtggagataaggaatttggacaaagttgagtaagtttttactgggtatctgctttgcacccagtagtctgcaacatgagtttaaactcaggttactactttcacttatactttatggagaagatagacagtgagggaggaatgggaagctgtcatgagagtgcaccgtcttggaattacataactggggtctttcctcaataacattttgagcatctgaaaaatagtttaaaaaattgtcttaatatctattaaaaggcatgtctagtgaggaaacaggagagtctgagcaatcccttggtggcgatgaaggtggtagttcacacaagtaacagtggaggcaaaggtaagcgcaagctgcctgtcccagatgctggcccatgtgtgagtgcttccctggagaagtccgcttctgttgctcccacctgagtcacagttaacagattatttctgtgtgaggcacatttcccttctgttgtttaagaaatgggagctgggaggcagctgagagggcgtgataaaagaattaagtgtgatcaactgaaacaactatgttgtagttctccatgctggatgcaaaggaaaaagtgtcgaattccaaaaaggatggaagaagaaggcaagaagggcaaactccagaagttctagtgcaggaagagagtttgagaagtaaaatccaggcaagcaaagcgttgtaccacttgggactccccaaagtgaaacagcaaggaaggattgtgtccatcttacttacttgaattggagagcttgtttctctctcatttttatttttcaatgatgttttctttatattttagagatattcattttctcttatcttgtgcttgtaaaaagcatttacatttcaagtctatgtgcttattacaggggaaaaataatctacctggttgcagtctttgagtataaacatttctaacctttttaaaacttctatagcagcccattaacactaacatttttagagcaaatatattctattttaacttcaggtagaggaatagtcctaaacttaatatgatagctctagataagatcttagagataagtgagcatttagtattctaaaagtggcagaacaaatcatgaggtttctggatgctataccaatttaaaatcaattcttatgttaatattgattgcttatttacatgtcagtcatctactttttttctttgaaatctgcatatgggttacaaaaactctgttaggttttgaaaattccattaagttggaaaccttggttaaaaatgtaggtgcctggcccatggttaccctggattcaggtctctcatgattatatttggggatttacgttcctaactgctaagcaacatctttgacaactag

SEQ ID NO: 33427 - DNA, 2300 bp, Homo sapien
atttttacagtgtcttttctcattataacttcagttcaagtcttgttttttcttcctcaacctctgtttttttctgggggaaagggtggttgtgttcctcatgtgtgaatgcgtgcacatgtatgattgtgtgtatgcatacacacatagtagaagttctttctttctttttttttttagacggagtttcgctcttgtcacccaggctggagtgcaatggcacaatctcggctcaccacaacctctgcctcccaggttcaagtgattctcctgcctcagcctcccaagtagctgggactacaggcgtgtgccaccacgcctggctaatttttgtatttttagtagagacggggtttcaccatcttggccaggctggtctcgaactcctgacctaatgatccacccaccttggcctcccaaagtgctgggattacaggcgtgagccaccacacccggccctacacatagtagaagttctttcttctttttttttttgatttattttattttaatttaattttattatgattatgctttaagatttaggatacatgtgcacaatgtgcaggtttgttacatatgtatacatgtgccatgttggtgtgctgcacccatcaactcgtcatttagcattaggtatatctcccagtgctatccctcccccctccccccaccccacaacagtccccgaagtgtgatgttccccttcctgtatccatgtgttctcattgttcaattcccacctatgagtcagaacatgcggtgtttggtctcttgtccttgcgatagtttgctgagaatgatggtttccagtttcatccgtgtccctacaaaggacatgaactctagtagaagttctttctaattgaggatcctaaaaagatgcaaagactgactctctgaataatgtttacctgacaaaaaaaatgtttgcaccattacttttcctaatttttcccacctggtgagattatcctgaattgtggtataaatttggtcatgttctaccctggaaaaatatgaactctaaagaatgtacaaattaaataatgattatgtgatgttaggtatatatactcttaattatttaaagagccatttggtagcaagtatcattttagtatttctaacaggcacactaattttatcctgagagatatcaaaatataatgaagatctgggtgaacatgttcatcctcagtttaagtttaaggttagattccacctttatgttgtatcttaaagcaacattttaggtacccttggagagtagccagaataaaggacccccaaagctgtctggtctgtgtcttaatcccccgaatctgtgattatgttaggatacatggcaaataagcattaagcttgcagatggtattaagatctctaattaagatgacctttaagaccgggagattatgctagatcagcccgatgagccccgtgtaatcacaagaccattcacgtggccaaggaaagtggaagagtcagtgtcagagtgatgtgatataaaaaagatgtgactggccatcgatggctttgaagatgggaagaggcaacgagccaagaaatgtgggcagcctctaggaaggctgggaaagggaggaaaacagattctcctctagagcctccagaaaggacatctgaattttagcttagtgagagccatgttggacttctgacttgcagaactgcaagataataaatttgtgtgattttaagccaccaagtttgtggcaattcgttacagcatccacaaaaaagtaacatatcttctaactcaggctatgcctacagaatactaacaaaaagccacttaaaaataacaatgtcggccaggcgcagtggctcacgcctgtaatcccagcactttgggaggccgaggagggtggatcatgagattaggagatcgagaccatcctggctaacacagtgaaaccctgtctctactgaaaatacaaaaaatttagccgggcatggtggcaggcgcctatagtcccagcaactcaggaggctgaggcaggagaatggcgtgaacccgggaggtagagcttgcagtgagccgagactgtgccactgcactccagcctgggcgacaaagcgagactccatctgaataaacaaaaaaaaaccccaaaaaacaaaaaaacaatgtcatggtattagttaaggcaagtgatattcgctaccataacaaaaatctctaaaaatcttatggcttaatataattagaatgtactatttgccccggagaattcagacagatgtttgtttctgctctagtcactttccatatagtc

SEQ ID NO: 33428 - DNA, 2300 bp, Homo sapien
tcataaaaatagaaaagatcatgcctctttagtacaaaagaattaatataattactgtttaataaaatcttgtctttcctcattagctttgactttaataaacaaaactcacttttaaggatatagctctgttgcagcttggctatgtaactgcaatttaaaaactggcttaaatatcaattttaagtctatatgcaatattacagataacttatttatttataagaagaaaattattctaaacatcaataaaagaatgaccttatatgaaaaggaggatgatcagagtaattcagtaaatcattattctagaaagagtaagatttgctccttaaaaccctcttgagagtcttattaccaataattaccttggaggtgtctagattctactacaactgtgactgaggtatttatagctcactgaatggccatgtgcttcctacattaccagtgccattgctgttaggtgggaacacatgatgagttcttctcaatgaactgtgaatagtaatgacctttcatacttctaagacagaataagagaaggcttgagttctccattctcttccctcctttgatgtagaaattatggagtttttaaaattggcaacgtttttgaatcattcatgtacaataaattgtgtataaagtagacaatctggtgactgttgtatatacctgtgaaaatatcatcacaatcaaaatagtgaacatacccatcactccctagagctacctcctgtccctttgtaatccattcctctcttaatctccaaatctaaatccatagggaacaaattatggtctttctgtcaccatagaatggtttgtctttttctagaattttacatgattagaattataaattggcttagatttctgagttatttcactcagtgacatttttgaaattcagccatattgctcagtggttccattatataaccataccacaatttgtttacccattcactgattgatgggcatttgggttgtttccaggtttgggctattgcaaataaaacatgatcattcatgtacaagtctttgtgagcacaaatgctttcatttctttcgagtaaatgtgtaacgttacaatggctagatgatatggtagatgtatgtctaacttgttttaatgtcaggaagaattaaaaccacaaagagttgctactgaatacccacaaagatagctataattttaaaaagggaatataacaagtattgagaatttcttttggggttatgaaaatgttttggaactacataggagtggtgcttgcacaacattgtaaatgtactaaatgccactgaaatgtacactttaaaagcattatgtcatgtgcataacacctcaaaaaaagacattctaaatgaaagctatttaaaattactacttagactatttaaaattacatactttaatgaccatttaaaattactaatattggtgaatgagaatttcagctgttttacatcatcaccaacccttggtatattcagtcttgttaatgttagatattcagtggaaatatagtggtatgtcattgtggttttgttttacatgtccctaacgaccaataatgttcaacatctgttcttatgcttactttctatatgcgtgtcttcttgttaaagtgtcttttcaaatcttttgctcaattttcagtgattttttatttttttttttgagacaaggtctcgccctgtctcccaggctgggatgcagtggctcaatcttggctcactgaaacctccacctcccaggttcaggtaaccttcctgcctcagactctgaaatagctaggactacaggcatgcaccaccacacccggctaattttttgtatgttttgtaaagatgaggtttcaccatgttgcccaggctggtctcaaactgcagaactcaagcgatctgcctgtctcagcctccaaaagtgctgggattataggcgagagctaccacacccagccttgattattttgaggtcttctaattgttaagttgtaagaatttcttgtgtattctagatacaattcctttattgaatacagtctccaatttaagattttggcttaagatttttttgggcggtttctctttccagccagcgccgagcgatgggcatctctcgggacaactggcaccagcgccgcaaaaccgggggcaagagaaagccctaccacaagaagcggaagtatgagttggagcgcccagctgccaacaccaagattggcccccgccgcatccacacagtccgtgtgcagggaagtaacaagaaataccgtgccctgaggttg

SEQ ID NO: 33429 - DNA, 2300 bp, Homo sapien
taatattgcataactctgttctcctagcaccttttcaagttacccttagcctttgtcaggacctcgctagactagattctttacctagaaggatagcccaaaccttccttccttccttgtctttgttgggttcccagagttttccaacagcgaaacattagacaaggaagtactaaaaaaggtctcagtgaatctcctgggttcttgacaaaattctcctttatgtagaagaaacccgcttgtccccttgtaatcaggatcaatcactctggacagaaaaacaacccccaattctgcctgtgagtgtagcagtacgtgaagccccacatagggtgtactcttaggccaactgatcagaaccattactgtgcatatatatatatataatatatgtatatacatatacgtatgtgtatatgtgtgtgtgtgtgtatatatatatatatatacacatatatagtaaacttgcttagctctaaatacacacatagtgaaagaacaagttgaaccggtaagttctaccaagaaccacatgaaactaccagcagacactattgtaagcgccaaggggacctttctccttggccctctgaggtttggctgaaaatcactaacatgaggaacattaatagaaaaaacatacaaatttacttaacgtgtatacacaggaagaatcacagcgtgattacccacccctcagagggcttcagaagcttgtggatacaatcccagcgacacaggttatgatagggagaagaggaattctgttgagggattacaaaggagaatgaatgtatcaggaacacattaatttgtacaacatcttgtgaaagggtctgctcaggtgtgattactacattcttggtcttacagggaggcaacaaaaacaattatgttccttgtgatgtgtctaaactttatcctttgctttggcagagatggcgtggggatttaggggagtgggaccttgaggcttcttcagttcagatgtcaaaacgccattatttgggggtatgtttctgcgcctccaacactgtttaacagggaggcttgtttcatccagtaagggagtcaagaaatggttccccgaagaaaacgattcttgaaatctgacaataaatgaggtgtcaaacaggcaaaaagtgtgtcggaatgagcacggatgagggtagggtggaaaaatcttggtacttagtctgtgggaagacctgaggaaaaaaagccactacagtttatagttcagtgtatggtgggcgaacgagatgaagccgaaaacttggacaatcagggattgtccaagagcaagggaaagccaccaaagatttttcagcagattgccgtgatcatatttgtatttgaagactacaacgatgctgtatgaaaaatggatgcacaaagccgaattgggaagctattgttcctggaaagtataaccctgaaggcggagagttgtagagaacagaactgatgtttaaaaagaaaaatccacaaaacgtggtggtggagcacgtacctgaagttatgcctattgcgcttctgatttcaaataagtaattgttttaaattgcctactaacataaaaaagcccagtcgattccaaacactggcacccaggcgtgagaatccatggttatttccttgggtgagctttattgtatttttgcgggcgctatggaaatgctcctccaggcagtacagatcagcagcggctcgtagtgaagaacgttcaaggaagagtttgtcccggatcaacaggacatggggcttgggaagcctggactgccatgaggaaggtcgattcaccactacagacagggagcctgaggcctgggtggtgccgacaagtcggcagtcacgccaggtcaggaagcgccgaagccgcgggaaaccctggactccatcccgggatttgtccccgtgtcgaagatggtatccaggtcgccgaaaacttcccggaagtttagaccaagacctacttattatctacggtgtccgggaaggtccatgattgttccacataaagtcagaagggaggaaaggcgcacgcgcattggggacttgactctggaaagcgtccagaccaaggtcagcggagagtaggcatgtagcttctgcagttgctcctcctcaccctccgcgacctgatttcctagaagggctctgtcacccgaaaagattttccactggcttagaggagggagggcccgccttcccccgttatccattggctgctcgttccgccgcaagttgggggcggggttagggcgcctttcgattgcatcagctggtccagccgaggc

SEQ ID NO: 33430 - DNA, 2300 bp, Homo sapien
gagttaaactctggagatggagctttctatggcccaaaggtgagcactaaagtacatttgggtaatatgattttcacttgtggatgaagaagatacgacttcgaaaaaagttggaaaaaagaaaatcagccctaatccaactattgagctccactttagtatcactggcattttataataacccagtctttgcttcttagattgacatacagattaaagatgcgattgggcggtaccaccagtgtgcaaccatccagctggatttccagttgcccatcagatttaatcttacttatgtaaggtgagtttctggtgtctgctctgaatattctccagggatatataagagaaaatatatataataagacaaaacaattttttttttctttatagccatgatggtgatgataagaaaaggccagtgattgttcatcgagccatcttgggatcagtggaaagaatgattgctatcctcacagaaaactatgggggcaaatggtaatttttgtcactgtcttttttttctgattagtataaattggctacaagaaatgtctacttttcgatttaattatcagatggaaagggagaatgattccaatcggttgcttctaactaacgacaagtgttcattaaaaaataaggaatcacaatctaaacacaaactttttagcattaagaacaattgctaatagtaattactttaattccagaacttgatttgtttggatgttgtgtaatactttctaattaggaattagtattctgtaagaagtatacttactgttttggatgcttttctagtaactttgttttgggatttagatggctttgctggttttacatagataaatgaggaggcttatggctttcttcgttcagccttgctaatcataacaagcaggtatttggacatgttttaaaagccaagcattttttaaaacagatgccaaaccgatcaacatttgtgattcatttctgtgaggttaagtaagtttttgtttccaagatacatggccacataactttcatcttaattcttaagcagttttttctggacccacagtgcatttgaaagcagcacagggttataaaagcacccgtgtgtagagccttccatattaatcatattgatttaaaacttttgtaaaatgacgtacattggtttaatcttacacattactgtcatttcagttttatttgaacttggttacttcagaaattaggacagtttctcattctgatcaatgatacaagataatctctagatttctcaaagtcagataaaatgtgagacacattctctgcaaggtatttcaagaattaagggagtcctcagctaattgctctgctaaacctgttttaggtggggaaaagtccatgattagggtagaatttagtgcctactttagccttttgcctgatacaacagaacaactgaaaatagaggaatgatggagaaaaacattagcctgatgtttgcagcatcagaagcatttgacacttgtattgcttcaaagggagaattggatgggcttattttttaataagtagtgaaaactctgatttttaccaagtgccataaccagttattatcaattacaatttgctgaatgatacaaaatggatgttgagtaaactgagggcactgtgtccccgtgaagaataagtaataaaatgaacaattaatcactacatgcagttattaaatcatttgttacctcctctcacagccaatacacagtgttttgtgatgtattaaagtgtgaggcctagtcctatcctcaatttgctttgctatctacttagcaagacaaattgtagttacaggctttccttacgtagggttagttttcttctcctgcatctcctcgccttaatctttattggataggtcttttcattttggggttttttaaagccaagttttaaaagtagtcgttacatgttccaggaaaagatactgaagagtagagtaagaaatatgctgtccctgtttagtgaatatgcccacatctacactgaatatttttattctcttccaaaggcccttttggctgtcccctcgccaggtaatggtagttccagtgggaccaacctgtgatgaatatgcccaaaaggtaagccttagatatgaattttctttcaatttaacatctgttgttcagcttttcaaatcacataagccctgtattcttggtgaatcgagctgttgtgataaagagaaatgttactatttttaatctttgttaagcctgaatagattatattacttctttaatgcttttctccatgattcc

SEQ ID NO: 33431 - DNA, 2300 bp, Homo sapien
gatgctgattattagaaaaccaaagatggggagatcaaggaactagaagttcctactaggctgaagatccgaggtactgggtataaaggtttggaagggctggcagaatacaaagtgttggtgggattttataattttaatatttcagtcttggttgacttatggataatagatattcctggttatggtcttgagagtagatgggagaaagaataagggaaatgccattagagttgaagaggctaaactgtgaagccagagtgttcagtgtatcatccctgatattggtggaactcagcagttctccagagttcttcaggtttctgcctgagagacaaatctcttctccaggacctgggagctaggagtgatcttgccctttggacaagatcttgcttgctattaaaaggagcagcaggagaaaaaaaggtggaagaagaagagtgacagaagagtacaaggaggagagagaaacaaggaaagggtgaagggaagcaaagaagaaggggaagaggaagaaaagaaaagaagcaaaaagaattctagcccaaagttgttcttcaatgcccttgcaaatgcaggtcatcatgcctgtgttatctgaatgtcttttaactccagttgtgatcctgcttcctaatgtttacgtaacagaaaaaaggctcagagtagttcttttacttgcttgtgacaacaaaacatgttctgttacacgtaaaggggatttaaggttgcagatggaattaaggttgctaatcagctgattaggagagtgtcctggttaaccaggatgagtctaatgtaatcgcaagggtccttataagtggaaaagggaggaagaagagtgatgtgatgtgagaaagactcaaagggccattgctagctttgatgggggaagagggccatgagctgaggaattcaggcagcctctagaagttggaaaaggcaagacaacagattctcccctagagtcttcagaaatgaatgcagctgtgctaactccttgattttagcccagtgagaccagtttcagatcagaactgtcacataagaaatttgagttgtttcaagccactgaatttatggtaacttgtaacaccaaaaataggaaactagcatatacctctcaaagtcttggtgcccatgtgttccacatctgagaggaccaccttgctttcagaccactgagtttgccttggaggctctgtccctatacaaggttgagtaagctggtatcccagaactcttgattaacacatgtggttggctggcagccagggaaaagtcaatattgggggccgaattcttcctgaatggagtaaggaggcctgtttcagctcagaggtgaaaaatcttggctggattagcccagtaaattctcaagatgcctggcaagcgtcctggattgtggcattctctgaccgatgtaaaagcttgagcctctgaatgaatggacgccctctccagggtagccagttcagggaaactggggagataccttaacaccttcctgggttgacttaattcctggtttccttttgagtgaatggaggtgggctaggaaagatggggttctagaatcagaagagccgcacagagatctgcagactcagaggggcccacaggcatttgcagcagtcacctcattgcacagctgagggggcttgtctgaggtcacattagcagattagcgcagcccatttccctttgtgtgacttggcaaagagaaaaatcgcctattagtttttccagtggaagagaatcccagagcggtccgagtgggtgaggagtcttgatagagcgatgttgggaaaagttcaggaacttggaggagaacagcaggggagggggcagcgctgagcgcggaaggatggagggagtggggcccccctctgcctcaactctgttctcctcattttgagcttgtatttaagcacgccggggggctggcctgggggcctctcactcgcagcttcctccagtgcctcccagggcggctctcccgggtctcccctatttggccggctcggccagctgggcctggcgttcggggcggggccggaggagcgcgggggtgggagtccgggaggaagatgcaccgagcgggcgggctgcgaggccgcggggcatgcgggaggcggaggggtggggaccggggtgggctgcgccctcccgctctggcccattccacaccccgccgaaagcggacactgtcagctgaatcactccccttttaggaggagggaggggaaaaaggtgtctagctcctttctgcttaaaaaagcacagggagatcgcgg

SEQ ID NO: 33432 - DNA, 2300 bp, Homo sapien
aaactaaacaaaaaatatagttttagacactagtagattgcacactcatctagattaagaattccagagacgctcaaaatagaggacttatgtctttcagcctatctcagtgcctggcaagagtaagtggccaatgaatgtgagatgaattgaatcaggcccctataattttttcataaagtatgaatatgtacatgtgatttggagcagaccaagtagatatattcctgggtgtgcctagaagcactgagaagctgtgtatgtgttagatggaggtcattggtgtgaacataccaaaaatttaacagcagagagctttcagggtatgccccagcttttcttgtgtttcaacagccccttgaaatattagaaaagagaaatagagacatagatgaagagagagagaaaattgatggagaaataaccagttaaaaataaagtcaaaactgagtgtgaaagtgaggctactaaaaccaggataatagtcatccatagaaataacctgtgctttgggaggaatcctcagggcaggggtgatctccaggtaagaactgatcaaaggagatgtttgtgtttggctaggtttttactaaagcccttactccctctagtgggaagacggagctgtgcagcatccgtagcaaggtgtgtgctcttcagggctaaaagtcctttggaatcaagattgtttcttgtttctttttttttcttttttcctttttctctttcttttcttttctttctttctttctttctttctttctttctttctttctttctttttcgtttttctctttctttctttttctgtttcttatctcctcagcttgaaggttgcatcctctttatctccttaagtaaagctgggagttctgtagtactccaggagtgaggacaattatgcttaagaaactttggtttcagtttagtcccagaccaagaggaaaacatttcaaaattttaaagtaaatcctaaaagtgtaatttacaccagagcgattgacctggcatttatgtagactgaagcttgagaagtaattcaagtggtttccactcattcccttggaagagtccttagaatgtacttccattggtctgaaaaacgcctgaaaaagagtcctgatgctaacagtaatggaaataggagggctggtggttcacgatcagcccagtggtatcctctattctatttgcatctaggtaaagagactgtggcctgtatgtgatcaaacaatttgttgaagcgctttgggcttagggcatttaatttctgtgaagtaggaccatcagttgtttgctctgtttttgtgtcacctctcagaatacattaaagtaggggcaacccttgagcccagacttctgccatgtgaagaccctttgaaaatcctgacaaacacaggtactgcgtaagtggtcagctaattaaagaggggaggtggagctgtcctttgtgtatccaataagtacccattatctcatttgagcatgaaaagaggccactgttattactttcaagaaggaaagtaagcaggatagctcatatttttagaacaattcctcaccaaatggaataattccggtgaaaagtgggagtgaggaagaaagaaaaaaaaaacttctaatcataatgtttgggaataagaaaggaagaagaaactcacgtcaaagccgactttctcctgcagctgtaaaataaactcttaagacccttcctgctgaaactctggagaggaaaactggagtggcgggtgggctttgcctgcagctcaactctccctcgcggcgcgggcgcggctgggttcagcacctcggaaagcgcccctcgcggcgccccgggattacgcatgctccttggggcccgccgccttggccgtgcaagtgccaccgtaactggtgagagccgctggcaacccacccggagttgacaaccgcggagagacgcagacacccactgacctccaggaagctgagcgtggtggatggaactctacgatctctttctctccaaggacggaaacctcatccaagcagtcccagaggaaacggataaaggtatttgaaagggagcgagcggccccaaatcgcacaattgagcggctgggggagttatgcgccagtgccccagtgaccgcgggacacggagaggggaagtctgcgttgtacataaggacctagggactccgagcttggcctgagaacccttggacgccgagtgcttgccttacgggctgcactcctcaactctgctccaaagcagccgctgagctcaactcctgcgtccagggcgttcgctgcgcgcc

SEQ ID NO: 33433 - DNA, 2300 bp, Homo sapien
acccagaagccaaagttgctgcacccaccttggagacatagacactggcagtaatacctcagggagaagaaagaaatctagggaaatatcctggcttctttccttctctctctcccctagtcttcctaccagtgtctcccattagccaaatctacctagaagccagaaaacaagggaaccctggaaatgtagccccataagataaagagcaccaaaggaaatagatctgagcagacaggcagcacaaaatgcagtgtgtatggtttattcactcagtaattcctttagcaaatgtttattgaggatctactaggtgccaggtatcatgatacttgctggggataccataatgaacaaaacagacctgttctccgctcttgaggaaatcaaagacaaacacaggatatggaataaacccagaattatctcattgtaaaatgtgttaagtaccacgaggagaaatatcagggcgatctgacacagctaatgatttgaagaagggtgtgacctgccaccattttaaatctagttatttcactcctgagctgtgtgtgtggaaaacttgtagtaaaaaatagaatgtctatatttataaaaagtttatgaaaagatatcaatttatttacattttgacaaactctatgtaataaggctttattacctcacggccatgtgtgtgatcatgtgtaatagcatgtgtgtatgagagagagaagccatatgtaattatgtgtaataacgtctgtgagagagaagccatgtgtgtgatcatgtaaaataacgtgtgtgagagaagccatgtgtgtgatcgtgtaaaataacgtgtgtgagaagccgtgtgtgatgtgtaataacacgtgtgtgagagagaagctatgtgtgcaatcatgtgtaatagcatgtgtgtgtgagagaagccatgagtccgatcatgtgtaataacgagaaaagccccatgtgtgatcatgtgtaatagtgtgtgtgagagaaaagccatgtgtgtggtcatgtgtaataatgtgtatgagagagaagccgtgtgtgatcgttgtgtaataacgtgtgtgagagagaaaccatgtgtgatcatgtgcaatagcatgtgtgtgtgagagaagccatgtgtgatcatgtgcaatagtgtgtgagagagaagctgtcatgtgtaataatgtgtgagagaagccatgtatgatcatgtgtaataacgtgagagaagccatgtgtgaccatgtgtaataacgtgtgtgagagaagccatgtgtgtggtcatgtgtaataaaatgcatgagaagccatgtgtgatcatgtgtaatagcatgtgagagagaagccatgtatgatcatgtgtaataacgcatgtgagagaagccatgtgtgaccatgtgtaatgtgtgtgagagaagccatgtgtgatcatgtgtaatagcatgtgtgtgagaagccatgtgtatgatcatgtgtaataacatgcatgagagaagccgtgtgtgatcatgtgtaatagcatgtatgtgagaaaccatgtgtgatcatgtgtaatgtgtgtgagagaagccatgtgtgtgatcatgtgtaatagcatgtgtgtgagaagccgtgtgtgatcatgtgtaatagcatgtgtgtgtgagaagccaggtgtgatcacgtttaatagcgtgtgtgtgagagaagccatgtgtgtgatcatgtgtaataatgtgtgtgtgagagaagccacgtgtgtgatcatgtgtaatagcatgtgtgtgtgagagagaaaccatgtgtgtgatcatgtgtaatactgtctgagagagcccatgtgtgtgatcacgtgtaataacgtgtgtgtgagagggagagaagccatgtgtgtgatcacgtgtaattgtgtgtgtgtgtgagagagagagaaagagagagggaacagtacaaaggaggatccctttagaaaagtattccaacgtcttatggagccagagggctgattcacagctgctaatctctgtcatgctttccagcaccaccccctccctctcatcataacttgtgatcttagaggcaggaaagaatttgagcccctcccccagcctgaccatctctgttggttgctcggccaggctccacgtcaaatccagtttgaaacacagaccctaggaccacgcaggaggtggtgggctcgcaggaaggttcctctcccagtggccatgggtagcaacagtgggcaggctggccgccacatctataaatccctagctgatgatggcccctttgactctgtggagccgcctaaaagacccaccagcagactcatc

SEQ ID NO: 33434 - DNA, 2300 bp, Homo sapien
acctaccaatatgtgatgtcacccctggtggcccagctgtaaaattcttctctttgtactctttccctttatttctcagactggccgacacttagggaaaatagaaagaacctatgttgaaatattgggggcgggttcccccgatacttttggacatatatccagtagtgggactgctggatcatatagaagttctatttttagttttctcacaaacctccatactgttttccataatggctaaactaatttacattcctaccaacagtatatataagttcctcttctctgcgtctttgccagcatttgttattttttgtctttttgataatagccagtctaactgaagtaagatgatatctcattgtggttttgatttgcatttccctgatgattagtgatgttgagcattttttcatatacctgttggccatttgtatgccttttgagaaatgtctgttcagatcctgtgcccactttttaatgagattatttcattttttgctgttgagttgtttgagtttcttgtatagtctgcatattagtcacttgttggatgaataatttgcaaaatattttcttctattcaataagttgtttattctgttgtttcttctgttgtgcagaagatttttagtttaatatagtcccatttgcctattttttgtttttgttgcctatgcttttgaagtcttagtcataaaatctgtgcctaggtcaatgtcctgaagtgttttatctgttttcttatagtagttttatagttttgggttgtatgtcttaagttttttaatccattctgagttgatttttgtgtatggtgagggataggggtctagtttcattcttctgcatatggatttccagtttttccagcactacttattgaatagaatgtccttaatatatgttcttggtgtttttattgataatcagctggctgtaaatatatggatttattttggggttctttattctgttccattggtctttgtgtctattttatgccaatagaatgctgttttggttactacaccttggtagtataatttgaattctggtagtgtgttgcttcctgctttgttctttttgttcagtgttgctttggctattcaggaccttttgtggttttatacaatttttttttctatttctatgaagagaaagccacagagtcctaaaataattctaaaactcatcatgactttcttgcctaaaagatcttgatttcaatcgtgcctagttttgctttaatcacttgcttgagaaatacataaatccccacttaagattagtgcaggcatatctctggcacccatttctggttctattaaaattcctagagatgtcaaaaattacattaggccacctgacaggctatacctagaagagaaaaaatgatttgtaaaagcagtggggctatttgcgattgctttttttttttcttaaatatcacctattaggttgaaaacctgaaattgcagctttctgtagaaatggcggaagacaaactaacatttttaaagcgctctcatttagctctgatgagtactacacccctgatattcttctgatactaaaataattttcctagtgtagtctaaacttttttaaaaagacatgtaatccgcggagtttgtaactcaaaacgagtgcatctaggaggtatcgcaagccgtttctggattaaattcccagctagctagctagctaagcaggggcggtgaagaagacaatctgcagcctagggaagaaaacgctttcgcattgttcttacgtgtttacgttattttatttccctagagcaaggcaggagtagggactcgaatggtacagttgggctggggatcgccctggtacaataaaagcgtccagagaggacggtaacaggcaggagctccaaaggtcagtccctgcaatttaagactcaggaatttaggttgcacaaaaaggaaagcaacctactgcatttggcactggcggtcccgggaggccgggggtggggaagcgcccagtgcgcagactccgcgggcttgcgcaggcccgcaaaagagggacgggggtggtgcctttggggcgcggcgccgcggctgggggcgtggcgccggggattgggagggcttcttgcaggctgctgggctggggctaagggctgctcagtttccttcagcggggcactgggaagcgccatggcactgcagggcatctcggtcgtggagctgtccggcctggccccgggcccgttctgtgctatggtcctggctgacttcggggcgcgtgtggtacgcgtggaccggccc

SEQ ID NO: 33435 - DNA, 2300 bp, Homo sapien
cttgccttcaggagactttttttttctttcttttcttttcttttctttttttttttttttttgctggcagattttgagattggccactgcaggtcctctttccacatcctacactgtatctagcaaccatcaccccaaacacagccttgcttccgctcagccctgttcacagggacttgttttcagcattgctcttccacgtggccctcactatcagggagtgcatttctcctggcactgtgtgacacctgctgccacctggcctcctcagagcctggcccaacctcgtgttatctccacatgactctgtccaccctcaggggcatttggcagcacttacaggtatttttgaagttcattgattttcttccagtctcctagcgttgcagaacgtggatatttatttggtttttgtttttcaattctactcatttctctatatggtatccagaattaaaaggaagcaacttctgatggaggcagtggccctgtcagattttcacaaatgcttttaagtgcaccttgatttattttttctactcagtttaagtcagaaatgaactgagatatgaaatgatagaagcaatctttcatcacactttaatgtcatgaaaatcatctttaaatgttcttgtgtgattttctgctctgaaggtttatgtcataattttcttacaactattctgttaaatgctatctatgccacagattacattaatgcctagaaatacctagtccacatttccatggaattaaatggctttataattgaagcctaagtaaggatttaattttttagagctctcttgggccagacgttcagcttctagtgataccaactgtcatttgactctcacagttttctgtttcagtctccatttttgcaatagattgcaaaaagaccattttgtccttttcaactttgggagtgaagagacggagaaggctggtttttgaaattacagcaacacaaagacctccaaaccgtagtgcaaatgtgtctcctctggtttcagtaccttcccttgcaggaaagccacatgtgggtataatacatactcacttcggtatttccaactccaggcatttcatttattcaccatctggtgttttagtctcctctttctaacatgtttttgcaacctatttttaatagtagtcatcattttgtaagaaaaactagtatattttcctgtcattttgatttcagctttatcttcttgaggcattgaaaattatgtgtgtgtatgtgtctaataggaaattttgtaaaatgtgaaaaactaaacacatataaactattttccttgaggcttttaatttttatctgcctttacttttcctctgtgggccaatctctaggcatatgaataggcatgataaacttttaggccatttcctttgttcccagaacattgaatatgcattcctggcactagacaaagcatcatcatacttctttgtttaatttgacttagaatcaggtgaattgacatggcacccttacaactttcatcttacttgattgccctttgagaaagaaatagaactatcttctattaaagctatttctgggttattgtcttgaaaggccattagtttaaaatgtaacatggaaatcagtaagagtttgatgacttatgttcattcacctttccaaaatgcacaccaaaatcccatatcatttagagtttgaaaaattttccttttgtcttgtctgtgtgctattggattcttcttaatcattcagtgaaagtatcttgtgtgctggcatttagagtatattaggtcatattatattgctttcaattaggagccctaggctcttattaaaaaactcaaatcttttaaaatatatgttggtcttttccaaatgaagaggatacagacttttagtgacaaggtcctgttgctgagtctaagttgggtctttctgtttattgtacataatttcaccaacatacaaggtatagcatgagaaattaccagaaccatttctttagaactcataaacatttgttctgtgctccaggatttcctcatctttggctaatccctttggtgagtttaatcatctgttatattgtaatagttgctcattttcttaagtcatggagcatcgttgttcaaccacaaacatctctgcaccttggtaacacgagttctgtggtacatgaggatgatcgctaacctatgcccaggaacaacgcctactttgccctaagcactttgtcagggtacaaggcagtgagatacagttaaaatgaggtaggctccttcccttaaagacttttaagtct

SEQ ID NO: 33436 - DNA, 2300 bp, Homo sapien
ttcttttctttttttttaacttttattctaagttcaggggtacatgtgcaggttttttacatagttaaacttgtgtcgtggggatttgttgtacagattattttatcaccagatattaagcctagtacccattggttatttttcctgattctctccctcctcccaccttccatcctcccataggccccagtgtgtgttgttcccctctatatgtccatgtgttcttatcatttagctcccacatatacatgagaacatgcagtgtttggttttctgttcctgcattagtttgctaaggataatggcctcccgttccatccatgttcctgcaagggacatgatgtcattcttttttatggctgcacagtattccatggtgtatatgtagcacactttctttatccagtctatcatcaatgggaatttagattgattccatgtctttgctattgtgaatagtgacaaaagttttcttgacaggcggaattgtctcaaggcttttaaaattattgttaacattttgtattttgaacttcaaccctgtctttggatattagtagtatagaggtggcaacaatagtagtagtggtggcaagaggaggaagagtactaccccattctccacttaggggatatagaaatttgaggcccaattactaattactcaattgccaagtgacagaattaagagaggtggaccttaatctcatatctttggacccaaatagacagccttattcccaaactcatagagcctcttggttgccaccgtgagcaggtttctcaagttaattctctttgctgatcttttactgattaagcagaggctttcaaagtcccttaaaagattacacataaagtatttgtaaccattcccagaaatgggtgttgaccattaaatgacttcttggattctcccatctctaaactttacagttccaagatgacattttttcatccaaaatcatgctgagaaatttttgctgttctaatattcaaaaagattgctaattttagtaaaccatttttctatattttagataactgcaaacactcctttttaccttttcaaggttatttacgtaatatcttttcactgttaaaaaaaattagaaaagttctgggccaaaaataataaaacatgccaagagatgattactgttaacatacagttatgtaacttttcagatttatgcatacttatatacatgttacttttaaatatgatgggaacatatatacatattattactttatttcatgaatgacaatctatcctaaatgtctgttcatataaataaatacaatcctatagctttaaaattagtatcttttttctgaatataaaattaatacatgctaacttgaaaattataagtgtaatgaagaaaggaaaactttcccatgaaacttctaccaagaaagacctgctattaataatttcaagaatattcttgcagatatttttctgaattgcccacacaatgactccatccacacagacacagttaataaaggctggtatcagataataatgatcttgtgttgtctactttttgggtaaacagtgtattgaagatattttctccttttatacagatgcacatttagatcagcatcaagaattctcaaagtgtattcaaagaattaatttcattagaaattaataggctaggcaccatggctcacgcctataatcccagcactttgggaggccgaggaaggtggatctcttgagcctaggagtttgagaccagcctaggcaacatagtgagacctcgtctctataaagaaaaaaaaaaaaagaaattaataggtatcttttcgggaaaaaataatgcagggttaccaaaattaaaatgtttggctatagggtttctcaggtccttgaatttgctaatgtgcatttctcggctataagtggaaaatttcatataaaattttctggtattatttgataacagaattttagtatttcaaaaatcatttgaaagacaaataatctttgaaacctatgttcagaactgttgatagacattgtcaatctaatggctgcatagcattcaaatgttggaattaccataatttatttgtttctctctccatagattgatgtttattcccaatcttgctgttatgtataatgtttaacaaactaatctgcataaaaacttgacttctttaagataaattgcctatttattgaccaataattctttccttagattgcattcatggcttctctggcaacccacttcagcaatcagaacagtgggattatcttcagcagtgttgagacc

SEQ ID NO: 33437 - DNA, 2300 bp, Homo sapien
ttggtttaatatgcagccagggttgagaaccactagaatagatgacaggattgaaaacacgaatggaaagtctcaatgcggtagaaagtcagaggctgatttatagttacttagcagtatggcccacttcgtgggggatgcatgatggtgagagccagagacagctcttggaaaacctgtgaattgggtgacctagatttcagagccactgcttgctttgtggtctccctgtgacattttctctgggcctccctgaggagggaacacccccactgagacactgctctgggctttccttcccacagcaaaagcccatccacttgctcaccctccaaacacaggcgccatcctttccccagctccagctccaggtctgggaagaaaatcctcagttactaagaataacagtttgacacacttcccttcccagggacatctaccttttaatggtggacatgacagaactcaaggaatcctccagtgaggaaggtttagatgctcaagggtagacttgtagcacagagatggctgaatttttatgccctactaggtgggaactgactgcttggactgaacatgactcccaaggcccctgaactgtggcctggagagcttttagttcacagagtaactctctccctccgtccccagcaccaaaccctttccatgtataagtgtggactctggaagcggctgttctggtagctgcaggaggggccaggctagttttgacagttctggccacttccagagatggctcttggttctcaggcccttggctgagcaatgggggcagctgtcaacagctctctctcctctcccctttccccagctgctctgactcttcatcagcaggctgagcttctccaagcctcagtttcccacagtgcctcctcgcccccttctcatcagacgcttgccacccatgctatttacggtcctgggtctctccagttttcatgagagaaggccagtaacattttcttaagcgagtgaatgagtaatataaataaaatcatatgtaaatagaagcaatttttgatgacaaaactgtttaaattctcttaatttattatcctgaagcaattaggaatgtccattttctttttggctgaattaataaaagtatagcaactaaagcaaagacatgagaatcctcttaatctggatacgctgtgtttgaaataacgtgtttggtgctttccacttcttcagttttgttatttatttattttttaagtagagacagggtctcactaagttgcccaggctggcctcgaatttctgggctcaagggatctacctgtcttgggctctcaaggtgctgggattacaggcatgagccactgtgcccggccccgtttctattttaatcaagaatatgtcaaaagaaagaggagccagagacagccttctcttaacacaaagcagggtgttgtatcttcatctgacaataagtgacttagttaactttgatttaattttggcttttgggaagtcatggggaaaagaagtaaagctgagggtggcgaaatacctttgctaaacccagagacactgcacctgaatcctgctcagtgttttgtaggcaaccaactgccttctgccactggtatccggaaggggaaatgagttaccttaagtgggccaaagtggggaaatactaacagtacagctagaaaccaagagctgtcgtgaaagccctgaatgggttcccactgctatttcagacaaaactgatgcagttaagcctgaatttcctggcaagcacaagggtagatttttccaaaaggctttttagactgcaaatacacagcctttccatgtctaatcacaaaagcaaactgctggacacatgctctctgttcccagctggttgtgtatgttttcttcacacttcaacagaaacgtgccaaggtgtgacatttatgaatttcgccaactgggaactgtgcacacaaatcgttcttgcttgtggtgtgggaaaatgatgaatgggggctgttctgcctggggaggagggctgctgtcactctggcatgcctacagccttatttattacacaccaaagtataaaaccactccgccgctgcagctctcagctccagtcctggcatctgcccgaggagaccacgctcctggagctctgctgtcttctcagggagactctgaggctctgttgagaatcatgctttggaggcagctcatctattggcaactgctggctttgtttttcctccctttttgcctgtgtcaagatgaatacatggaggtgagcggaagaactaataaagtggtgg

SEQ ID NO: 33438 - DNA, 2300 bp, Homo sapien
catcatgctgatttcatgtattttagacatacactcagaaatcagattgctggatcatatggtaatttaatttttagcttcttaaggaacctccatgcagttttctgtagtggttgtactattttacagtttcacacacaaaatacaagctttcccttttctccacatcctccctaatacttgtaatctgcattttgtatatttttaattttctgagttaaataaaatgtatttaatgcagtaaatatatatttggatcagatgatcacttcagagctattgccaccaaggttcttatgcaagactcttcttgataaggtagattgcagaagtaacaaaagaggtttcaataaacataactttggctgtgtgtacttcctattactccagcaatgcataatggaggtaaatattaggacttcatgtggataatttatagaatgtaaatttgatgtatgtatatccaatccatttctaagtatgagatattataggcaaacatttactttctgtctgagtagaacatttctcgctgacaagggagatgatttttatgttgttatttgcatttgcaaaagaacactatcttttctttatcaagatgttcttgatcctgtgtgaaatattttcagaaaaattaaagagaaattaaacttagacaattccctcttatacacctgaagcaagccccttgacactcaaatagtcacataataattctttcctctttttgtggaaaaagcctataataaaagctaaataaatttagtattgactattaaagtcaagaaagtcacaacaaatattgtgtttaccattttcaacaaaacctattttatttattacaatataagaaatatgaaatgcatatatctctcgtgtgaaataatttttaaatttttctgttgaatatttcatgtcattaatagacgtgaaaccttttaaaaatatataaaaggatgtaatcactgttccttcgttttgattcatgaatgtttagaaatgtgcagacaatgtgctgtacttttgcagaacacagtaggtcacatgcaaaaccagtggtcacttgccctccaacagtgaggttctgaaactcctcacaactctacataagaaaatttccccagaaaaatgtgaaactcagtgtgttaagatacaatatgatgcaattttttgaataggaaatagataagcattgtaataattcaatgtttgatctcttagttttataaaatgtatactttgttaattattttaaaatactaaaaaatagaagttacctctgcttttggcaggtacctcatataacttattgttgaagatatgagaagtaaatggagaaatattataaaatttccttagcttatatgcatggacccttgggttatattcctgagagcttgctggagctgtggaggttacgtatacaacatttagtgagagtgatgcttagcaatttgtcatctggccaacccactcatcacccatctcattttgctgatgaagatagctgaattccaccttttgtggctttaaaaatgactcaaaggtagagaagttttgtcatgcttgccttctctttcctttctttcctctctccatcacctcttggagtcagaaaggatagaggtgaggctgagagatttgagtccatttcctccccttccttgccttgtaatggagagggccaacctgagagtggcgtataggagatatcaaatctctatagcataaacccatttttaggaatcatgaaactataacaatttagtggagaatcaatcacttttgtagaagaacttctcatttctttccccaaaataggtcagattacttaaaacaaaaactatttgaggaagtcttcctcacttgtccttgaatataaagactgcttaagacaaaacaaaaatcctaatctggtgatataatttggatatgtgacctcacccaaatctcatgttgaactgtaatccccaatgttggaggtggagtgtgatgggaggtgattggatcatgggggtggatccctcatgaataccatccccttagtgctgttcttgtgatagtgagtgaattctcacaagatctcattgtttacaggtgagtagtgcctcctcccatctctcttgctcctggtctcatcgtgacgggcctggtcctgcctcactttctgccatgactaagagctccctgaggcctctccagaagcaggtatcactatgcttcctacacagcctgcagaaccgtgagccaattaaatatctcttcttataagttacctagtctcaggtatttcttta

SEQ ID NO: 33439 - DNA, 2300 bp, Homo sapien
caaatgtctccagggcatgttagagaccctcacagcagaccctcccatcacaggccaggaggcttagaaggaaaaatgctcttgtgagtccagaaccccctgctgtgtgcagcctaggaacctggtgccctgcatcccagctgctcctgccacaggtaaaaggggccaaggtacacctcaggccatggcttcagagggtgcaagttccaagcctttcaggttctaggtggtgttaagcctgcagatgcaccgaagaattaacgttcatgaacctccgcctagatttcagaagatgtatgaaaatgcctggaaatccaggcaagtttgctgtgcacgggagcggggggccctcatggataacctctgctagggcagtgtcaaagggaaatatggggttggagcccccacacagagtccccactggggtactgccaagcagagctgtcacaaaggggccaccatcctccagaccccggaatggtagatccactgacagcttgcactgtgtgcctggaaaagctgcagacactcaatgcagccagaagggggggccgtaccctgcaaagccacaggggcggggctgcccaagaccctgggaacccacttcttgcatcacctagatgtgacacatggagtcaaaggaggtcattttggagctctaagatttgcctgctgggttttggacttgcatggggcctgtagctctttcgctttggccaatttctcccatttgaaacgagtgtatttacccaatgcctgtatccctgtgtatctagaaaataactaacttgcttttggttttacaggctcacaggtggaagggacttgccttgtctcagatgagactttggactatggaattttgagttaatgctgaaataagagtttgggggacttaggggaaggcacgattgcttttgaaatatgaggacatgagatttgggaggggccggggaagaattatatggtttggctctgtccccacccaaatctcatcttgaattgtaacaattcccatgtgtcaagggtggggccaggtggagataactgaatcatggaggcagtttcccccatgctgttctcatggtagtgaataagtctcatgaggtctgatggttttataaatggatgttcccctgcacatgctctctcctgcccaccatgtctgactaaattttgtatttttactagagacggggtttcactatgttggccaggctggcctccaactcctgatctcgtgatccgtccaccccgacctcccaaagtgctaggattataggcataagccaccacacccggcctcttttttttctttttctttttttttatctggagactgagttttgcactcgttgcccaggctggagtgcaatggtgcgatctcagctcactgcagtctccacctcagcaggagagcaggaatcttcagtgatccacgggcagatctgcagccattgtgggcacctgttcctcccgcgacctttgtgcccacgtctctccctccagtacctattgcacgaccccccacgtccgcctcctgccattgccagcaagtgccttgcgcgggtacctggctgcgcttattaatccattatggtcgctctgtcactggtgccattatgtgctcacgtgcccactccctcaggtttagaagtcgcgtcgcccggcaacagaacaatctgctggcttagcctttggccaagttggcagctggacgaggacgctcagagcccagctctcgagagttcaagtatccgacagttccccactgctcccaggagcggttacccgggcactctgtgcccctcattcctgtttgggccaaggccgaggacctgcgagtagggctcagttgcctggagccccttcagcccatcgcccagttcactttgcttgtgggatctccccgttgctcctgcccctggactgagtggcaggccatcctacaaacacccggacactcgacatcagtggtgtcaagacaactctaagaaggttttccgtgatcctgcaagacctgtgttccatcctggtgattctctcttcaatttcactgcacaggtaccacagtaagccagtgctgtgtgctccgaattccagggcatcccccagctcagccactacactcagcacaaggactctgtggggcccaggagcaggtagtcacccctttgggctcctcaacacccggctgtccccagacttgtgtccagggaagatagtgttgagggccctcaaggagagcagggcagggatgcctgagcaggacaaggaccccagagtccaagaaaatcctg

SEQ ID NO: 33440 - DNA, 2300 bp, Homo sapien
agctctaagggaggtggcatcatcaaaggctcccctcgcctgcttggcagcaggggaatcttgcgtctacggggcctagaggcctgggatctgggggagccacccctgggggcgagtgtctgccctggtgctgtatctgccgccttttcacaccgtgtgtgacccgaagagacagcctgaggcctgtcctcactcactgtctttgagtaactgagggtcagctggcagcgggatgaggctggtcccctcctctgctttagccccggcaagcctcccgtggagctgtaggagctggagatagcatttcgtttggtgctcgagctcgtccaggatgtctgggatgtctggttatatctgatttctgagctctgggcatggaggtctgtctgcagaggcccgggcctgggcacaaagggagagaggcctccattgtcccgcaggggccaaaatgcagaccgtgcatccccggtgacctcggggaccgttctgtgatcatcaggattttcttggactctggggtccttgtcctgctcaggcatccctgccctgctctccttgagggccctcaacactatcttccctggacacaagtctggggacagccgggtgttgaggagcccaaaggggtgactacctgctcctgggccccacagagtccttgtgctgagtgtagtggctgagctgggggatgccctggaattcggagcacacagcactggcttactgtggtacctgtgcagtgaaattgaagagagaatcaccaggatggaacacaggtcttgcaggatcacggaaaaccttcttagagttgtcttgacaccactgatgtcgagtgtccgggtgtttgtaggatggcctgccactcagtccaggggcaggagcaacggggagatcccacaagcaaagtgaactgggcgatgggctgaaggggctccaggcaactgagccctactcgcaggtcctcggccttggcccaaacaggaatgaggggcacagagtgcccgggtaaccgctcctgggagcagtggggaactgtcggatacttgaactctcgagagctgggctctgagcgtcctcgtccagctgccaacttggccaaaggctaagccagcagattgttctgttgccgggcgacgcgacttctaaacctgagggagtgggcacgtgagcacataatggcaccagtgacagagcgaccataatggattaataagcgcagccaggtacccgcgcaaggcacttgctggcaatggcaggaggcggacgtggggggtcgtgcaataggtactggagggagagacgtgggcacaaaggtcgcgggaggaacaggtgcccacaatggctgcagatctgcccgtggatcactgaagattcctgctctcctgctgaggtggagactgcagtgagctgagatcgcaccattgcactccagcctgggcaacgagtgcaaaactcagtctccagataaaaaaaaagaaaaagaaaaaaaagaggccgggtgtggtggcttatgcctataatcctagcactttgggaggtcggggtggacggatcacgagatcaggagttggaggccagcctggccaacatagtgaaaccccgtctctagtaaaaatacaaaatttagtcagacatggtgggcaggagagagcatgtgcaggggaacatccatttataaaaccatcagacctcatgagacttattcactaccatgagaacagcatgggggaaactgcctccatgattcagttatctccacctggccccacccttgacacatgggaattgttacaattcaagatgagatttgggtggggacagagccaaaccatataattcttccccggcccctcccaaatctcatgtcctcatatttcaaaagcaatcgtgccttcccctaagtcccccaaactcttatttcagcattaactcaaaattccatagtccaaagtctcatctgagacaaggcaagtcccttccacctgtgagcctgtaaaaccaaaagcaagttagttattttctagatacacagggatacaggcattgggtaaatacactcgtttcaaatgggagaaattggccaaagcgaaagagctacaggccccatgcaagtccaaaacccagcaggcaaatcttagagctccaaaatgacctcctttgactccatgtgtcacatctaggtgatgcaagaagtgggttcccagggtcttgggcagccccgcccctgtggctttgcagggtacggcccccccttctggctgcattgagtgtctgcagcttttccaggcacacagtgcaag

SEQ ID NO: 33441 - DNA, 2300 bp, Homo sapien
ggcctatcatatgaattttgagggaacacaaacatgcagtctgtagcagatggtaataggctgatatattacacttgttgatgtaaatctgataggtttctttctctccaacgacagctttttaaatatttaacagtatcaataatttttcagtttctgtgagaattttataatttgtaatttgcagattaatgtataatctattttgtcctaacaattacaaatatattttttatttcagattatatatattcctaccagatggagatgattacagctttaaaaatttttattttttcattttatttcacatattgacattaaatttttatggacacataataattgtacatatatatggggtacaatgtgatgttttaatacatgtactcaatgtgtaatgatcaaatcagggtaatttgcataatgatttttctgtagggagaaaattcaaaatctactcttctggctattttcaaatatataatatgttattgttaactatactcatcctactatgcaataggacaccagaacttattcctgggttctacatctgttaagccaaccaaggattggaaatattggaaaaaaaaattgcgtctgtactgaacatgtaaagacttttttcttgtccttattccttacacaatatagtacaataactatttgcatgacatttacatcggatattatgagtgatctagagttgatatgaagtatatgggaggatgtgcaaaggtgatgtgcaaatactatgtcattttatatcagggacttgagtatcctttgttatcctcaggagatcctgaaactagtcccccatggatactgagggctgactgtatattcctatcctcacggaactttcattctaatgggggaagactgactataaacaaaatatatgtaataggtggtggtaagtaccgtggagaagtaacaaatggggcaaagtgagttatacagctccattcttagaaaccttggagtacttttcttagtttatactcgtggtggtttccttttgtctcctttattacatgggactctgacatgtgcccatagctagggtggcagtaggatctacccgaaaagcgtcctgctgatacaggaccaaagcatcctgttgttctcgagcctataaaaagagctaatggtcttgcttctcttaactgtggcctcctacactgtgttttggatgattggtgatgtcttggatattctgtttctttggaactttgaatatacaacactttactagggaattagcaatggaagcagagcaaagatgtacagaggaaacaatgcataactctgatggaattgaagtcatgaggcagcagagagcttaaattagagctttaaaaatttttattttttagagggaatttaattgggagtaacagcagtaatagttaacggagccagaatgcttgagtcatataattgcaaagcagagttgggagcaacagatgctaaagagtagttgctgtagttcctctttgggtcgtaggagcagttgtcatgttactatacagctactgaatgaagaagagttcttagtgaggcctgggtgaacagctcttcttagtattctgtgtgaccccattcgaccttttaacaaatccctaagtaaataaatagcccctaaggtaaactaagtttttctctgctgtttttttgcttgagagagctataactgtaatagacttatatttctgaacattttagtgcttgccaatatttggtaatatttatgtttcctatatttgtaatgaacattcttcttcaggtacattttttgttaaattattgtttcatgcataaaagttcaccttttattgtataaaattgactcagattaatttatacacattgacaatgggtaaatagagtttttcagattattaaaagctgaaggatgcccatgtaagcaaaaaaaaaagagaaaaaaccaacaaaaataaacccaaacccctcaaacaatttcgaacacaaaacattcttctcacgccggcatccctgcttgcaggtgtgaagggggcaggaatcagcgaggtgtcctgggctgagtccccggagtgggaagaggtggccggaaggggatctgaggaggagaacaggggtcctggtggtctgtgcttcttcccagacacgggagctgtagaggagacctctgcagcagatgctaggggggccactaggcccaggcagtcttgggacttgggtctgtcctgctgtgcatccatagtgggtgctttagaaacgggaggcccacccgaagcccctgttgcaag

SEQ ID NO: 33442 - DNA, 2300 bp, Homo sapien
gctattgaacctcttacttccccactaatccccctgcagttggcagaacttagctgccatgctcagtctacagactacaaagttgctttgagtttcaaaagtggggatctggaaaaggatcttggcacagcccaaaaaaataagaatactttcacaacgatccctcatccagagttagacttgctgactttagagggtgggagtgtaaactaaggagaatcatatacaaaccacctatgggaatctaagaggtgataggctggtaggctctttggaggtggctgggacagagaaaaaagaagagggacaggacctctgtgaatcaaagtcagatgtgcctgccttagacaatcattgtttaatgttgtctaatattttaactccttcaaaatgtcaactgttcctacagaatacacacatgtcaaatttccaagacagcatcatctacctgtaccatgctccaaatcccatcctcccagctgcccctacttgaaccagactgacctgcaaaaatagagcagaaaactcacaggcagtaatgttccccttaaataccctacaatatgtcattaacaagaatcacgatgaaacactattgtagaaattgccagcattaaaccaaaagaatgttggtcagttcatgtttcttttacagtgtgactttgtttgagagggataaaggacaggaagaggagtgtacatcttgctttagctgttcctcacttggctaaggaacttttgctgtaggaagtgaagaccctgcacctagttacaaggcttttgatgcttgtttgtcaagttcaactgttaaaggggagataggctcttccctagtagggagagggaggaaggaaagggggatggggcggggggagggaacaggtaatatctgccatataaatattagtatgtagctgacacgttataaactgagctgttagggtgaatttcaattttgttggaatcgaccttttttccctcttaagttcaattgacttacagtagatcccagaaagaactcaatacgttatttattctagaaagctttcttccctgagcaaaggaggcagagctaacgaggagaagggaggagcttaggtgaacagaactgaagtcacagctggttagcatgactagaatgcatggaaaagccagcccaaattagatgagtgggtagatagagagctttgaaatccttggaattaatggtggagtccatcgtaattgaaaggtcgggccttagtgggctgggatagggagagaagctgtcggggacctggggcagtgagcctgtaccccgtggcttctcacacactattttgaaggcgttcccatgcgcaatctcgcctgtcagttcaggctgtaggtttctcctttctaactcctgagcagaacaacactgaacggtggtagtcttgccttgccacccaatgagtgctagaaaacagtcacttcaaccaattggttcagtccggagaacgtgagcacattctactttactttctgttcaatgattttggaaaacaaccttttagattctggtcagaaggggcttggatccgtgactttgaaacactcgccactaccacaaacgactttggaagttaatcagaaataaacagtatctgggatctcatccgtcctaaacccaggggtcagagcgtggggggcttccactaacttcaggttaagaggatgaaacagatccgcggagaagggtcccacgatccctggagactaaaagcaagccacgaacagccgggacgcgcgggccggggagatgcgccgggggctggagggcggagagcaccccccgcaggtcccggccagagcccggggccgggtcacctgactcgcggaatttggggccgcgaggggtggaatgggaggggaatggttagcgcctcccttcccgctcccactggatccaggtcggcgggggccggcgcccggcggccacgtggtggtgctgccgctgcccccgccccgccggcctagcccgggagctcggcgcccactgacccccgcagcgggggaggaggagggactgcggcgcaggaagccgagcaggaagcgagcccggcggccgcgttttcctggggaagcggcgggcggggtggagcagccagctgggtccggggagcgccgccgccgcctcgatggggtgagtgcgcggcacggagttgggaggctcccggcgcggggtcccgggctcgtgtccccgcctttgtgtctggagctcgggcgcgggaggcgctggggacggcgcccgggcggagcggctgagcgggctgcagccg

SEQ ID NO: 33443 - DNA, 2300 bp, Homo sapien
tttttgtttgtgataaagctgtacaggctaatatcaaggttttaaaattcaggctaggattgggagttaaattatttttttaaagggaaaatgaactgataataaacaatgttacatccagtctttcaaatgagatggaaacaagcatgtacatctctgctttgctccatcctcatttatcaacgtaacatccattctgtgatgagtggtggccagtgatgattggtggccagtgatggatgccatatttcagggacttattttgaattaaatgggtaataaactgactaatatttctgctcagtgggtaggtgtgctttattctgtttgaaatgggagaacttagttcagagaactttttccatagatgcatgatcctttttggtacatactcgaattaggctgttgtgcagctaattcagctttgctgtatttcttttgaagtaagcatcctgatttaatggcttttccaaggactgcctttagtgtggccttgctaacctgatagatgtcactttactcaacataggttgtagctcagcctgggctttagaagtttgggattgaaaatgagactgtaagatcccagttggcccaaggaaggcgagtccgtttactcatgattcatcttgaggaagaagagatgctgagacagctggcacctggcgttattccaggggccacattactttccgccagccatggcttccaggtgttagatcctttcatgaataccaggaaagcagtgatctattaataactttaccccagctacagttcatgcttctagagttaccattgtgtggatttccagaacttcttttcctttgacacttatctttatcattgtggaattatgcccatgggccacccagctctcacacacccaaagccacggactctaggaagacactcagtttggcggttaatcccttcccttgggaacttttggaattatcactttatttatctaatcctcttcaaataagagtttgtatacttttcactgcatgcttaaaaaaaaaaaagaaaagccaaagacaaatacacagaaaaactaacacaacacccacgaaacccccatgacctcaaacaaaaatcttacccactgttgcctaagactttgtgctctctgaatatgtgaacgaaggaatgctttgagtggctctgctgtggggaactgcacagttttgggttatccaatatatggccttcttttctccctttcctgctggactgatttgtcctgtttccttagttattagtacttccacaagaagggggaaggaattaaatttgaagggcgattcccacctttttttttttttgagatggagtctcactctgtcgcccagggtggagtgcagtggcgcgatatcggctcactgcaagctccgcctcccgggttcacgccattctcctgccttagcctcccgagtggctgggactacaggcgcccgccatcacgcccggctaattttttgtatttttagcagagacggggtttcaccgtgttagccaggatgatctcgatttcctgaccttgtgttccgccggcctcggcctcccaaagtgctgggattacaggcgtgagccaccgtgcccggccggcgatttccactttctagcaacagttggcgtagaaaccctggcccagccagcgacagttagccagcgacagttggggaatatctgtttatcgttatttctactttgattcctcaaaaggtgattctgttttgacgtgaaaaaaacaacccaactttggtttatgaaccagcccaactctgacaagtgtgttcctgttccgcctacatcagttctaggttctctaacttcagtgtgcagaagattcaaccaaggaagttcctgggctctaccccttgagattcagttttaataggacaggggctaaaagattgcatttagtccccaggtccttctgatgtggattaactaggggctgactttgagaaacactgccctggaatgtgcacttgctattcaggtaccagcccagccttttctgtgactaaatgcttggcagttaacaatgtataattatggtgtgtgtcgtttccaaggcaacatgcatctgtcactcccgctgaggctgggaagattgaaaggggccatggagaggctgcagtcacaatgaggcctccagattcatgtcatcaaagtgcttcatgatgactggattttcacaccatttatccaagggccctagtcaatggcagcagcaagaatgaaagtagacacattggaagctagagagtcactgggtgacttttggaggt

SEQ ID NO: 33444 - DNA, 2300 bp, Homo sapien
caattctgagttgagctgaatcttaagcaatcacttcatttaacatgggtctgtggtcccctggaaatggaatgtaattatcttttagcaagtatacatttacatttttcagggaggaaggttctgagttttcactggattctacaaggtagttgccacccttcaaaagtcaagattgctcatctagtctaagtgcctcatttcacagaagtagcaacagagcctcagacaagtttagaaacttgcctgagtcacaaagcctattcatgatgagattcagaaccagaccctaaggcctgactagtggctgaatgttttcactgccctatatagtttttttttttttaatttcaatagtttggggggtataggtagttttttgatacatgaatttcttagcaatgaattctgagattttaatgcaaccaatatgttgtcttttatccctcacctctctcccaacctagtcctgacagtccattgtatcactctgtatgtttttgcatccttataacttagctcccacttacaagtgagaacatacggtatttggttttccattcctgagttacttcacttggaataacggcctccagttccatccagcaatgccctatacagttttacaactaaaaccaaaaagccaaatcctgtgctaaaacatgtatagactttatcttttttttttttccttttttgtggcgaatggggtctcactatattgcccaggcaggtcacgaattcctgggctcaagctatcctctggcctctccctccctaaaagctgggattacaggcatgagccactgtgcccagcaaacatgtacagactctacctttttcattaaatttggaaatgtacaagatgtgaaaacttcgcatgtagctaaaaaaaaatgaaaatacacttaggtcaaaaaggcaagataatctatgtgaaagtttccatcacatagtaagtgctaaataaatgtcacgtcaagcccactgcaagtgagaacaggtgacctttaacagcaccatcccagaggagaactgaggaatagcaggcacacgtttaccacagttaaccactgttttcagaagccttgccaggtcctctcacattcccccacatcctaattattctaaacaaaactgacttgagaggatgggtggggagtgcaagccactgaatgccttcttcatgagcttgttgctacctccaaaagtcacccagtgactctctagcttccaatgtgtctactttcattcttgctgctgccattgactagggcccttggataaatggtgtgaaaatccagtcatcatgaagcactttgatgacatgaatctggaggcctcattgtgactgcagcctctccatggcccctttcaatcttcccagcctcagcgggagtgacagatgcatgttgccttggaaacgacacacaccataattatacattgttaactgccaagcatttagtcacagaaaaggctgggctggtacctgaatagcaagtgcacattccagggcagtgtttctcaaagtcagcccctagttaatccacatcagaaggacctggggactaaatgcaatcttttagcccctgtcctattaaaactgaatctcaaggggtagagcccaggaacttccttggttgaatcttctgcacactgaagttagagaacctagaactgatgtaggcggaacaggaacacacttgtcagagttgggctggttcataaaccaaagttgggttgtttttttcacgtcaaaacagaatcaccttttgaggaatcaaagtagaaataacgataaacagatattccccaactgtcgctggctaactgtcgctggctgggccagggtttctacgccaactgttgctagaaagtggaaatcgccggccgggcacggtggctcacgcctgtaatcccagcactttgggaggccgaggccggcggaacacaaggtcaggaaatcgagatcatcctggctaacacggtgaaaccccgtctctgctaaaaatacaaaaaattagccgggcgtgatggcgggcgcctgtagtcccagccactcgggaggctaaggcaggagaatggcgtgaacccgggaggcggagcttgcagtgagccgatatcgcgccactgcactccaccctgggcgacagagtgagactccatctcaaaaaaaaaaaaaggtgggaatcgcccttcaaatttaattccttcccccttcttgtggaagtactaataactaaggaaacaggacaaatcagtccagcaggaaagggagaaaagaaggccatatattg

SEQ ID NO: 33445 - DNA, 2300 bp, Homo sapien
ggagagaggtgagggataaaagacaacatattggttgcattaaaatctcagaattcattgctaagaaattcatgtatcaaaaaactacctataccccccaaactattgaaattaaaaaaaaaaaaactatatagggcagtgaaaacattcagccactagtcaggccttagggtctggttctgaatctcatcatgaataggctttgtgactcaggcaagtttctaaacttgtctgaggctctgttgctacttctgtgaaatgaggcacttagactagatgagcaatcttgacttttgaagggtggcaactaccttgtagaatccagtgaaaactcagaaccttcctccctgaaaaatgtaaatgtatacttgctaaaagataattacattccatttccaggggaccacagacccatgttaaatgaagtgattgcttaagattcagctcaactcagaattgctgagtcccacaagaccctgagagtcttgcattgtttagagaggccccctgaggaatgagctatttgatgagggaggttttgttgttcctggcatttttcactaactgccctgtgcattctggggaggggagacgggaacaaacactgagaaaaataaatagggaatgagtggcatctggaatatgaactgttttcctcatcacttttcacaaggaggtggatggcatgattgcagcacagaagatatgttgaggaatgacttgaacatagagatacagcattttgtacagtgacagttaagcagtaacttagacttgctctacttttaatgtttgagaactcactgatatagaaatctaagaaggtccagttcagagaagcagagaacagaatggaagttaccaggagcaggggtggggatgtgggagtggggggttgggggaggtggatggggagatgttggtcaaaggatgcagcgtttcagttaagaggaatagatgaagagatctattgtacaacatggtaattatagttagtgtattgtatacttgaaaaattcctgagagtagatttagagtgttctcatcacagtgaaataataagtatgtgaggcaatgcatatgttaattagctcaatttagccattctacaatatatgcatatttcaaaagtcatgttttacaccataaaagtatatacaatttttatttgtcaattaaaataaatattaataagaaggaaaaaattaaggttttggttaatttgaaaatgtcagaagcttctaggaagtatatcgtaagtggaaatatgttatttaccactcctcagctgttaactgaccaccttcccaacgcaaccctgctctgtctccttcccatgacccaagttgtaatccaatcaggagagaataccttatttggaaacctacatatgtcctttttttctctgcttaggtgttgaaaagtctcctctagagctttggaaggctgaatgcactaaacatgaagagcttgaaagcgaagttcaggaagagtgacgtgagtatgcggtgactcacagtctggctgttccttcttctccatggagctgcagaaacgctcctccccaccttgataaggcgctgttgggttaataaactacagacactcaagtgctcttggccccagctcagggtagcttctgtagatggcatgctctaggttccttgctgtttgtgtgcatagctttcaaaaacaatgtttttttatttttatttttaattttggggatctgtgccttgtagagaaaggaaccgtcacattaaacatcttcaaaggaagaatcagtaaaaacctcaacatttctaaagttgccagaaatcctgattcagaatgtcgtttttagaagaagctagtctctctcatgcgggtggtttaggaatgacatattagcatggttcatctttggctttaggaaacgtgttcaactctctgttaagggttttgtggtaaaatggtatctactgctgcccgtacctttcctccccccgaattccagggactcgtactcatttgttatctaaccaatccataaaagactctggattggaggaagcagttatgatgtcagagttatgaaataaagtctcccccaggagaagagggagaaaaacatagcagaggggttgtacacgataatatttttttaaaaggtcaccccataaacccttctatgatcccagtcttgtattagctgcattccagatactttgagcagagttgtggagtgggagaaattaatggaagggaattagatggaagccaaggtatgtcactctcaaaatgggcttgttcagctatca

SEQ ID NO: 33446 - DNA, 2300 bp, Homo sapien
attgcaagcaaaagttgcttcccttaccttacacaataaggagttacaagataaattacaggtatataaatagattgctatcatggactattctgtagagtcaagctcttggtcttttcagtagtcagatgtattttgttttaaatgtgtacattagtttctttttaaatattagctttaagcatcttatagtttcagattatttgtttcatgagagtgttattcattaactctttctgtaaattattcaactggtaaattataaataattatacacatagtatgatcagtattaaatattctatatgtttaataaattatataaataaaacaaaatttatagaaaaaattctatataaaatatactatatgcatagaatgatgcataatatataattttatattttgattttatatatattaaaattttacgttttaaattatatatgtatgtgtgtatgtatatatatatatatatatatataaaatattatccatttagtaaagttgatcatttaacaggtttaagtacttgataagaaatggctgtaccaaaaaataagaagaagaaatagctgtactatatatccattacccctcttggcaagtagaatgatataagaaataaaggaaatttttgaattggaggctttgtagagaaaacaattttagtgttttcaaagtgacacaaatcgtctgtcccaatagaacccaaagcaagctttgtgtcattagtcccactcatgtcccagactgtcttttttcatggcatgagaatacacaggcaaagtgatcatgctactctcccgtaccaaagttgcggatttactcctctcattctagttgcttgcttagctaaccacgcctttggtatctttttttttttttttttttttttttttttttttttttgagacggagtcttgctctgtcgcccaggctggagtgcagtggcgcgatctcggctcactgcaagctccgcctcccgggttcacgccattctcttgcctcagcctcccgagtagctgggatcacaggcgcccgccaccacgcccggctaattttttgtatttttttttagtagagacggggtttcaccgtgttagccaggatggtctcaatctcctgacctttgatatcatttaattcttgcttttttttcctaggccaaatcacccaaggaggcggaagcagacctaagctttgactcataccattccacccaaactgacttgggcccatccctgggaaaacctggtgaaacctctcccccagactccaaatcatctccatctgtcttaatacattctttaggtaaatccactactgacaatgatgtcagaattcagcaactgcaagagattttgcaagatctacagaagagattagagagctctgaagcagagagaaaacagctacaggtcgaactccaatcccgaagggcagaactggtatgcttaaacaacactgagatttcagagaacagctctgacctcagccagaaacttaaagaaactcagagcaaatacgaggaggctatgaaagaagtccttagtgtgcagaagcagatgaaactcggtcttgtctcacctgaaagcatggataattattcacatttccacgagctgagggtcacggaagaggaaataaatgtgctaaagcaggatctgcagaatgcattagaagaaagtgaaagaaataaagagaaagtgagagagttagaggaaaaactggtagagagggagaaaggtacagtgattaagccacctgtggaagagtacgaggaaatgaaaagttcatattgctctgttattgagaatatgaataaggagaaagcatttttgtttgagaaataccaagaagcccaagaagaaatcatgaaattaaaagacacactaaaaagtcagatgacacaggaagccagtgatgaagctgaggacatgaaagaagccatgaataggatgatagatgaactcaataaacaggtgagcgagctgtcacagctgtacaaagaagcccaggctgagctggaggattacaggaagaggaaatctctagaggatgtcacagctgaatatatccataaagcagagcatgagaaactgatgcaattgacaaacgtgtccagggctaaagcagaagatgcactgtctgaaatgaagtctcagtattcaaaagtgttgaatgagttgacccagctcaaacaactggtggatgcacaaaaagagaactctgtctctatcacagaacatttgcaagtgataaccacgctgcggactgcagcaaaagagatggaagaa

SEQ ID NO: 33447 - DNA, 2300 bp, Homo sapien
tcaggggagggaatgtgaatacacacggtggaaacgcactatccacttagattagtgggatgccattctagagttagtgaacaaacctaaaagtgtatatactacaactaaagcttacatttgggggacagggttaacatgacaaggaaagaaataccaaaaaacttcaagagtcctcaaagttctggctggacggtggctcacacctgtaatcccggcactttgggaggctgaggcaggcagatcacctgaggtcaggagttcgagactagcctggccaacacagtgaaaccctgtctctactaaaaatacaaaaactagacagacagtagtggcacacatctgtaatcccagctactcgggaggctgaggcagcagaattgcttgaacccgggaggcggaggttgcactgagccaagatcacaccactgcactccaacctgggccacagagtgagactctgtctcaaaaaaagaaaaaaaatagtcgccaaagttattttattttgatttataatttttacagatgcaggcaacatgcttccggtcagagctaatgaaatggaggccgaattagagcgttggctttaggaatgggaattcagtgcctgttctggttcttctctccacaattatcagcaaaagcaaaggtttagaaaagagacattacctttaatatacttagaaacaatctcacagccatttcctagaatgaaagaacattaaaacctttcaatttgatgaccaacttaacaaggggtaaaagaaataaatgttggagaacaggaaacaggttcttcctttttactcccatacatgttaaatactgttcatagagtcacaaaaatcgtttaccccttacagaaacctggaaccagaaggcgcttcagaaagcaagtggtacaaaaactttcaccgtataggcaagaaaattgggacccactggccgtgactcggcccaggctacagagtcaaaaccagaaccttgacattctgaaatcaggttcattgctgtcatcattgttccatgctgagagttttcttaggaaaaagaataaagtgggggaatctttccaaaattgtgactatggagctcgaaagtacagatttaaatcttgagttaacagaccatacaggttttacttaagagatattcaagcaaactcatttaaataactcctccaacctaactccaaaaaggctttcttggcagtcttggatcaatggcaattaaacttccagcctagagctggaaataacaaacaccaaacgtaaacaccatctttcacattctcaatgttctccttgtctctctacctagtctgctcttttctgaaaacaactgggacacattcactccaacttgacttgccataggcctagtctatgatagggttcataataacatccttcaacatagcgttgcaagagctggcgctgtttctttgggtatggccacaattgcctctgcaccttgtgtgtattacacacactgtattccatgccaacgaaagggtaagatatggctgcattatttagggctaagtgctaaataaataatgaacagctaaccattagcagatctagtagtcgatttcttaccctactctcttcctgcaatcagctttcctaaccatgcctagctccaatcttactgggtaacacagacggtgccagcacagtcaacagccatatctaagcctttcctctggggtccataaaaacaaaactcccgaggagctgtgggggtgcaccgtggccaggatcgtcgccgaatacagcccgcacacgtcgcagctttaaataagtagggccgtggggcccggcgctcccttccatccttggacggaatgtatcttctcttcctacgccttcacctccgaggggtaaggtctcgtgagatacaatatgcagaggccagttttggggcgagccggaggccgggcgcgtctaacctgcggggaagggaaagcggagggtaaggcaagggctgctgtaggcgccagacaacagggactctccgaaccggaagtgccccgcgtcgccatggctacaggcgctcccagcagaacccgtagcgttccgttcccatggcaacggtattgtctccttggccggacctgggctgcggaaggtaactggggacgtcgcaggctgtgcagctttcgcgaggcaccgctttggcgcccggaccgaggtgcgccagggtcaggaggccgacgcagcgggaggaagccgcgccgtcgggctcagggagctgggaggctggttccggggcgtggtttctccgccttgagccag

SEQ ID NO: 33448 - DNA, 2300 bp, Homo sapien
gaaaagtcattttcagagtaggattagggtaatgaaattaaagtgtcccctacccttttccttttacaattgattttcttcaaacccattgattagttgtcctgaactccagtgggagctttattatggtacttgttatcgtgtgttataagcatttgtgtacatgtctgtttcacccactagtatgaatttcttaaggaagtgttttctttatttggatcctaatgtggtttatttttggatgaatgaataaatgaggtaatcattttctataggttatctacttttggaaatgcaggaagttcccaccttgactatcccaaagattctgatttgatggaagcatttcattgtaatcagacccaagtcaacaggtcagttcttaatatagaggttgtcattggtgataaagaggaggttaaataccagatttctgttaaataaaaacactttcaatctgttaattaaaatgcacagcattttataaaaatgaatagtagagtgctggacttactaggggatgtagggttctaacagtgaatgaattttaaaacagaaaatattagcaaattggataagtacttgattttattcttagatttgctactttttatcctttacttgggagttctgagcagtgttcactgtgttgatataacagcgttttattttttcttctacagatacaagatttccttactgaaaccctctacaaaggcattagtcctatcttgtaaggtatctattcggacagataacagaggcttcctttcattacagtatatgattagaaatgaagatggacaaatatgttttgtggaatattactgctgccctgatgaagaagttcctgaatctgagtcttgagtatgacaattcactgatatttatgtgtacatttatgatagatgaagttcttattctgagtacagtactctttgtcatttcatattggattttctatagagaagaagcacaatggggaagataggagcaaggtcatgtaccctaatagttactatgttttgtaaatccattttgtagagggcatgtaaataaatgttttcctgtagtcatagattattcaggactgtcctttagttctgtcttttgaactcatgggaataattgtgagtcagcgtaacatttcaagagtctaaaggtggccgggtgtggtggctttaatcccagcactttgggaagccgaggtgggcggatcacctgaggtcaggagttcgagaccagcctgaccaacgtggagaaaccccatctctactaaaaatacaaaaaattagccggacgtggtggcacatgcctgtaatgccagctactcgggaggctgaggcaggagaattgcttgaacccgggaggcggaggttgtggtgagctgagatgacgccattgcactccagcctaggcaataagagcaaaactctgcctcaaaaaaaaaaaaaaaaaaagtctaaaggcttaaagtttgatgcagctacctgaaatgatcttttatttatttattattagaaaaagcaaaggcatatgggcattgcttattagtttgaattctagagactagatcttaaagtagtggttctcaaagtgttgtgcccgcaccaacatcagaatggcctgcaaacttgtagcaaactctggggaggaggccagcattctgtattttaacaagcttccctcaggagattctgatgcctgctaaattttgggaaccactgttttaaaggaaactttttttttctttaatagcatttaattgtatgagatgattgcttttacatgtgatttccttgcaaatgttctgaagttgaggcatcaccaaacaagtctgaacaattctttatgtgatttatttttaaagtagaccttttgaagagatctatgaatgggatataaagcaattttcagtgttacaggttttcttcttcttctcaaaactgtttgctgtaagtaactgcaatcagtacttactactttccatttgcttatgagtttcttgacaaatcaaggtgtagaaaaccagttattaagtgattttgtactttcctggtagttgtcactaaaataatttttgtggcatataaatatatttaataaaatgcaaaaattatcttcctgtctagtagaaaaaattacatgagtaaagtgaagcttctgtctttgttactgtaccaggtgacaacagctgagtgtccctccatggacagtcactattggccttttgagtgagacagttctttaggataaaaacctgtcatcccattgcaggattcatttagcctttctggccc

SEQ ID NO: 33449 - DNA, 2300 bp, Homo sapien
cttttacaaatatgaaaagaattataaacacacttgcaattaacattgtgaaatgttagaacccatgactgtggccactgaaaaatgaattggcattagctttctgaaccaatgtttatgttccaaataacttcctgtatttttctgaccactatgtataacacttttatgtctttatactgatcatagtttacctggcataggacttgatccaaaaatagataaacagtctaaaaggacagttaaattaattcgaaaagtaacagactcttcctgaactttaaactcctgaaatattccagcctatgaaaagagtaaaaatgaaaattgttacataaaagaataaaaactaataatataaggtcctagatttcactttatacgtttaaaaaatacaatactgtgctaatcccatgagaataatttctgattagcaatcaaaacatcttagagacatcctttgaagcatccttatctccattcctggatctaaaactatccctctgtgactctcccttgtctcgtttttgtgcctatcactactgctaaggtcacttggaaaatagacgaatgacttgataatgcatgagcaacattagtttcaacttttattatgattttttattgatacgggggtctcactatgattacccaggctggtctttaatgcctgagctcaagcgatcttcgtgcttcagcctcggtctcctgagcagctggaaatacaggtgtgagccaccataccatgcccctgcatgaggacaagaaccgtgtcttatttacctctctatccctgagatcatgctgtgcacttacgtgttaaaaaacgcttagttgaacttgcaatcctatctgaaccacacaaatattactttggaagaacaaaaattctattacaaccagtaaaggaaaaaaatactctttagtaatagcatatcgcagtggaaaaaagagcatatattctggaaacaaatattcagcgttcttatcccaattcagccacttaccagctgtgggactgttggcaaatcacttaaaattgtgcctcgtttccacatatataaaacgggaataataacagaacctaccttacaggactattgttaagattaaataagttaaacaataagaagactgtagcctagccaatagcctagtttaataaactttagtcattactaaccattatctctgtaaaacaagatgggaaaagaatttgttaccgggagagaaaaaaaattcaagtaatgacgttttgttctctaacttaagactattatttatttattaagttatttattatgactattgacaagttattatgactattaagttattttgtctactgaaaccttccgatttcattaaattacatttagagtatctatggcacaggcttaaaggcgcctacttccatacctgaataaaagcatttgcttgcacacactttgcattttccactgttactttgataccatttttagttgcgaaacacgtggcatgttctcggaaatgaatagctttcaagatagtggagagattcctaacgttgtcaaggctggccacaaggctgtactgatcatcctcgtcttggatctgttgggtcagaaggggcatcgtccactgcgcattcggccccgagggatgctcctggggccaacaacttctcggcggatcgccaaacacctgaagggattagacagtaaaactcccatcagtgctggcgaggtccggcgagctccacctgcgctgagaggtggaaaggggctgggaggctgaacacggctgaccaggccgaaccccacctatgtcacttaactatctttgtaattctggaggaaaattatctaagctacggtttcctcgtctccgtaagaggacaataacgtgaaaagttgtgaagaatgaagacacgcaactgacacggtatctcccggccaaacaggagctacaaatccgcggggagtcggttttgtgcagcccgcgccaccagccccgcctccaacaaaacaggcgatggcggggcgggcccggagtgtccagataatcctccaagagtcccagacaaccccattcaccagcccgcccgcgggacagcatcgcttactagtctcggggtccccgagtgcggaaaccctacctttgcggtggggtctggacgcccgagagcccttctcagcaaagtccctgaagaggagcgaggcggctccgaggaaccgcggaggaagtgaagccagtcccgccactcttcagaccggccctccacctcggccaccgtcaccacagagctgaaggaggcc

SEQ ID NO: 33450 - DNA, 2300 bp, Homo sapien
tattcacactgcacttacttagagtcttatattaactgcaaaactcctaaatggctaaccttcccagacatgagcacctccaatagatatggttgactagctttttcaacagtttactttttttgtttgtttgtttgagatggagtctcactctgtcacccaggctggagtgcagtggcgcgatctcggctcactgcaacctccacctcccgggttcaagcgattctcctgcctcagactcccgagtagctgggattacaggtgcccgccactgcacctggctgatttttttttttttgtagtgttagtagagacggggtttcaccatcttggccaggctggtcttgaactcctgacctagtgatccacccgcctcggcctcccaaagtgctgggattacaggcgtgagccaccacgctggaccatttttaaagtaatacttccatcacatccttacttcccagagttttctaaacaaagttcaaatgacatagctttgacactgaattttaaaatagattttcacgtctacatcattattgccccaaatgaagcctaatgcaatccaatctggctctattttttacatttttcagcatttccctacttcaaagtctttcatcggtttttttttctcccttggagtgttccctctcattttttgaatgtcaaaattctacacttcctctgatatgcagcttacgggctaaatccttcatgattctttatcttattatactagggtaaaaataatctatatctcctgcacttccatagaatgtatcgaagtatggctcagattatagatactacctagctcaagggaagagtgagaacactaacatttactggaagtgtacaagtccagcttatttttcataaaaagtaaatattccctccccctgccccccaatctgcaggtcagaaaagagcacagaatgttgctgttaataacggggctagaatttacacttatctttcattccacagagctcacttctttcttagagcttgccatcacaccacacggggtcatttacttatcacctactccgcgctagagtactatgctaagtgcggaggacgcaaaaattaatgtcaaagataatccttgttcacagtattctgtctagcttaagaagagttcttagttgaatgaaagctaattctaacaacttgtgtgcacttcttttgaataaaaaccatcaacttatttgaattcttaagtttcctcctaaactccaacatttcaggaggaagaggtcacattctagtcatctttgcaatctcaaacccaaaggaagcctaacttggtacagtgcatggcacattcaatgtctgttgaatacaagtaaagctcatactacctagtctatttttcagtatctcttgagttaatgacctggttaacaagtcagagtcacagtcccaagggcaacaactttttaaaggctcccctaacgtacttcaggatccctgactgagagtggctgactatggcagtatatgggcatactaatcactggagaaataatagcgagaaataaccaaggaaaagcactactctccaaaaacattaaaaaaaaaaaacaactgaacaactagtaagaaagaacgctggatctgagcaccctgtaagtcgcttccccgtgggccgggtaaaggttttaaaacccgccgcctccaggaagacggccacgtgcacaaggattagctgcaaactccgtgcccagtctggccgggagaattgctaaaaccgacctaccgttaacacccgggctactctgaaattaagcaaggctgtagtcaagtaagtaacccaagaaaaggcgcacagagccgccgccgcaggtgtagcccggggacatcccctcctaccttgcaaacggggcctgggatccggtccctctcttcttcctccacctcctctgctgtggcgtgccgcttagctggcggctccgcatctatttcgtttctttttggcttcttcgcctgaactgcaaagcctccacgccgtttcctcttggttgccgccatcttgcctcgccgcccgcgctcttggcctcctttccggcgctgccgctcgctcctatttccgatctctatggttcggcggctctaagcgctcagctccgcggtcgtcctccaggtctgtgccgcctccttccggtctcggtggcgcggcacgcgcggctctctaggcctccttcagctctgtggtgacggtggccgaggtggagggccggtctgaagagtggcgggactggcttcacttcctccgcggttcctcggagccgcct

SEQ ID NO: 33451 - DNA, 2300 bp, Homo sapien
tatcccaggtccatttttcaataaaaacagttaaaaaaaaaaaaaaaaaggcccaaaaagcaacatgtggcagtccttagcacttaggacaaaccatcccacctatctcaggaccttcagaagcattacagtgaaggcattcctggaccttcaagaaatgtttcaataatattaggacacctgttttaaaaagtaaagaatctacctaatgaaatctaaagaatttcttacgaaatgttaactggaaaaattgtggcacttgaaaggataaaaggcattgtgtttttttcgtgagaacactgaacaaatgaagaatatataaaataagtgaaaacataaaaataggtaagtttatagatagaaatttctaaagtatatgatataaaggcacctgctttagaatgaggcatcaacattctcaagtcctgcattaaatgtcttgttctaaaatttattcctctggaagaaaagatgagaatccgttccttatttttccactttccctaaagaaaaagaaaatgttaaaagattttaaaatcttatactgaactgatcttgttttgtgacagggtctcacactgttgcccaggctgaagtgctcacggctcactgcagtttcaagttcctgggctcaagtaagtgatcctcccaccccagcatctacagtagctggagactacaggcatgtgccaccatgtccagctagttttttttttttttttttttgtagagatgggagtctccctatgttgcccaggctggtctccaacacctgggctcaagtggcttggcctcccaaagcgctgggattataggtaagaaccaccgcacctggccctgtttgttttttatgagcttccaagtagctcataaccaagtcaaaccatcctgactcctttaatttcatctctcaccaacattcactgaccacatctgccacccagaaatgccctccttggtttctttgtttttcaacttcaatctctccaattcctccttccaaccctaaaagttctttcttagccctcttatttctgtgctctccatgacagatgtctcataataatttcccacaactcttaatcctttcttattcacactgcacttacttagagtcttatattaactgcaaaactcctaaatggctaaccttcccagacatgagcacctccaatagatatggttgactagctttttcaacagtttactttttttgtttgtttgtttgagatggagtctcactctgtcacccaggctggagtgcagtggcgcgatctcggctcactgcaacctccacctcccgggttcaagcgattctcctgcctcagactcccgagtagctgggattacaggtgcccgccactgcacctggctgatttttttttttttgtagtgttagtagagacggggtttcaccatcttggccaggctggtcttgaactcctgacctagtgatccacccgcctcggcctcccaaagtgctgggattacaggcgtgagccaccacgctggaccatttttaaagtaatacttccatcacatccttacttcccagagttttctaaacaaagttcaaatgacatagctttgacactgaattttaaaatagattttcacgtctacatcattattgccccaaatgaagcctaatgcaatccaatctggctctattttttacatttttcagcatttccctacttcaaagtctttcatcggtttttttttctcccttggagtgttccctctcattttttgaatgtcaaaattctacacttcctctgatatgcagcttacgggctaaatccttcatgattctttatcttattatactagggtaaaaataatctatatctcctgcacttccatagaatgtatcgaagtatggctcagattatagatactacctagctcaagggaagagtgagaacactaacatttactggaagtgtacaagtccagcttatttttcataaaaagtaaatattccctccccctgccccccaatctgcaggtcagaaaagagcacagaatgttgctgttaataacggggctagaatttacacttatctttcattccacagagctcacttctttcttagagcttgccatcacaccacacggggtcatttacttatcacctactccgcgctagagtactatgctaagtgcggaggacgcaaaaattaatgtcaaagataatccttgttcacagtattctgtctagcttaagaagagttcttagttgaatgaaagctaattctaacaacttgtgtgcacttcttttgaataaaaaccatcaa

SEQ ID NO: 33452 - DNA, 2300 bp, Homo sapien
ccagaggttaaaaaaaatacctaagtgtagtatcttaaacaatactttgaaaatgtaacctattcagtttgtaataccttaatagccagttccacacaaatcacttttaatactggcaaaacactttttaccatgtgggttttatatatatatatgtttaatggacttattttactttatatatgttgactgataattttttgagtacctactatggatttagcataatactagacactacagggttaaaaaatgggacataatccttctcctgaggaaatttcaatatgcttgttcagacaaaacaaacagaaatgaatgaagcactaaactgtgagagataaaaatttggaagaccagttattgaagagttaataaaatgtgtctgaatagtttttacaaaataatttttaaagtcactgaatgacttagttttgaaataagccactgttaacattttaaaaatattttgttgcaattactttccaaaattacctcgttaatcacaaatagcttatccttacgatccattttagtatctagaaaaagaaaaaaaagaaaaagcaagtaaattaaaggtgatttcaaagttatttcaatcaaaccacatatgctatccagaaaataaagtgtttttacactcttcagtttaaaggagattttattactaattttcaaaacaagagctggaaacaatcgctcaaaaatcttgactctttgtaaatgtaaagaaaataagtaaaatatagtctgtaagaattagaaattatagtgtaagcagtgtttctcaatatttaggtattctaggaatccttttcaaaaatgggaaaattctcacaaaccaaagactgtgttaaaggaaaccagtttcaatgaaaatatctttcactttttaatcttaggtgtcaaagaaaactgactttatgcccgtgtaacaaacctgcacatatactccttgaatctaaaataagttaaaattttaaaaataaaaaacaaaaaacaaaaaaaccccaaagcacctctcaacataagcacaacaacagccatatgatggcgctgccactccactgttccaaacttttttttttttttttttttttttttgagacagggtcttgctccttgcccaggctgaaatgtagtggcgcaatcacggctcatgacagccttgaactcctgggctcaagccatcctcctgcttgagactcctgagtagctgggactgcaggcaagtgaccccctcacttggctaatttactttacttttttcatttttttttttttttattttgtagagacagggtttcaccatgttgcccaggatggtctggaactcctggactcaagtgttccacccacctcggcctcccaaagtgctgggattacaggcatgagctaccatgcccggccatactgttcttgcctgtaaaataacccactgcttaaaaataaataaataacctggcatttagaaataggctctgactccaacttaaaaagtgctttgaattctatcccaggtccatttttcaataaaaacagttaaaaaaaaaaaaaaaaaggcccaaaaagcaacatgtggcagtccttagcacttaggacaaaccatcccacctatctcaggaccttcagaagcattacagtgaaggcattcctggaccttcaagaaatgtttcaataatattaggacacctgttttaaaaagtaaagaatctacctaatgaaatctaaagaatttcttacgaaatgttaactggaaaaattgtggcacttgaaaggataaaaggcattgtgtttttttcgtgagaacactgaacaaatgaagaatatataaaataagtgaaaacataaaaataggtaagtttatagatagaaatttctaaagtatatgatataaaggcacctgctttagaatgaggcatcaacattctcaagtcctgcattaaatgtcttgttctaaaatttattcctctggaagaaaagatgagaatccgttccttatttttccactttccctaaagaaaaagaaaatgttaaaagattttaaaatcttatactgaactgatcttgttttgtgacagggtctcacactgttgcccaggctgaagtgctcacggctcactgcagtttcaagttcctgggctcaagtaagtgatcctcccaccccagcatctacagtagctggagactacaggcatgtgccaccatgtccagctagttttttttttttttttttttgtagagatgggagtctccctatgttgcccaggctggtctccaacacctgggctcaagtggct

SEQ ID NO: 33453 - DNA, 2300 bp, Homo sapien
ggaacaagttaattataggttataaactagatcaacaaattgtaagttttagtagagatacaaacttgtacttttgatgtgtgcattgtggagttttggtgtaatttccaatttcacaattttcaattaacagtttccataatagagatatccttatatctcaaattccctttcacaattatatggatatcttatttgagaattcttctggaatggatcatctctaaagtctggtcatttaaagggcaccagtttaataaaagatgttcctttatttattagcggcagggtcttgctctgtcacccagggctgtagtgtggtggtgtggtcatagctcactgcaggctctaactcctgggctcaagtattcctgcctcagcctcctgagtaactaggactacaggcccacgccaccatgcctggcttttttttttttttgtagagacaagttctcgctatgttgcccaggctcgtcttgaactcttgggctgaagggatcctcctgcctcggcttcccaaagtgctgggattacaggcatgagccaccacgcctggtcaagatgttcctttagactgaaatttatatccagcatagttacctttaattatacaatgttacaggcaaaaatccttcttacttcagaaggtaaaagaagtaagtgattcctacaggctgtatccaaaaccaaatcaagttggagggagaaaatactccaaattaagttggagggaaaaaaatactttccctttccgtttttttttttttttttgtccctcccttccccccgcccaccatcccaattctgttctcaggaggggaaaggtttcattctcccccaaactcagacttctcaatccttatccattaccaatttaccaactaactgagactgtgtagaatcttcctctggaaaaaagggaagtgtatgaattctgagtagtgagttggttggtcagtggcgtgtgaagtaacctgatgaagcttagcgtgggttttttattttactgggggcagcatattggggaagagaaggataaccttactaaaccgcttgggtacgccaaccctgtgcaatagatattagcaacatagctaaccatacatggttagtaaatacaacccacacctaactgatgcatgtaaacattccacattacagtgaaatatattggtgtattaatgcattttaataattatggtattattttgatacctttcaaagtgtttggaataattgtgcagatagtcagatcaaccaaaacctaccagttaaatactatcctttaactgctttcttaacctaaaccaatcttggaaaggtaggattagaggccagaaagttaggattaaagtgtgttggatggatagatcagcacaatttcatccatgttggtggtaaggcttttcattaagtgtgttgatgcttcccttttaaattgtttccgcttaaataatctaactgtcctttctcaagcatattggtcaagatgatcaataccagatatcttaagtggcagctgaagagaattaaagagattaaaaaaaaaacctgatattcagtccaaccgaattctgctactgtattagctgaggaggcttgagccaaccacttgaccacttggagtctgaatcgccttatctataaaaacggggatccattgagaaattataatcagatattttccagaatcctctcccatcccagctcctatctcccccttcagccctcaggtcggctgccactcacactgaccgccatctgtgcccctcacaatgacaccagcgtggccctgcctcccttccgcgcggccccgcctctcgccccgccgaggccccgcctctcacaccaaggtcccgccttcctcctgttcttcccggccaaggcctaccttcctcccacgcggcccgcctctttccccgccaagctcccgcctttctcctgcgcggcccgcctctctcctcgccaaggccccgccttccttcctcggggcctcgcctctcaccccgccgaggccccaccccctcccgcgcggccctttccggcacagagcccacccctagcccatgcgaagcggcggccgccggcaccgcccccgccgcgctcccgcttgccgcagcctgcgtcgtctgccgccaccgcgcgccttcactgacctacaccaccgccgccgccgccgccgccgccgggctcgctggctggcccggtgcgggcggcggactcccgccggagaggactgccagcgccgccgccgccgccgcttcggcccgggcccgggccccgaccccgtcccgggcccc

SEQ ID NO: 33454 - DNA, 2300 bp, Homo sapien
agcttggaaatgattgctccaattatctgatatcatagggggtgaaacaaagtttggtgatattatatagttttaattttgatactttaggtgacttctcattaaataccctttggtgtatgatagatttactgatatcagacaggtagaaggttttcgttttttgtttttttttgagacgcagttttgctctgtcacccaggctggagtgcagtggcgcaatctcagctcactgcaacctctgcctcccaggttcaagcgattctcctgcttcagcctcctgagtagctgggactacaggtgtgtgccaccacacacctgtattttttttttttttttagtagagacggggtttcagcatgttggccaggctggtctcaaactcctgacctcaagcaatccacctgccttgacctcccaaagtgctaggattacaagtatgagccactgtgctcaaccaatacagtgttttaatacaagaatggtaatcctcaaaactactttatatgaagaaattgaattaagcttctgcatctgtgacagatattactaatgatggtgtgatcatttaaaataatttccagatgaaaattactatgttgaagttctgagttttcagattctcaattaactttttgctacaaggaaataggttttaagctttgacataactgtgcaagatcctgctcttacaaagagctactgtgcaagtcatctttctgttaaacagtgtacaaccaggtggttgtcaagaaagaaaggctgcaaagaaaattcttacaaaattgtgtttcataagaaactcagagagaggatcctgaacatttctctactcaaggaatttggagatctggtcttagaattgcttttgccttcttcccagaactttgaaattctttcctgacttccttttgcctactctcttctcaagatcttgggttgttttctgatccttgggattcctttgtctttttagtcaaagctcttgcctagtaactctctttttacctggaagcagtaccgtgtagtggctaggagctggtcttcccaatgtaggagacctgcttctgaattcagactttgctggttactggttttattattatggatgacaaattatgtaatatcactgagcttccatttccttttatatcagatggagataataactgcctttacagagttattatgagaagcaattgtgtgtgtgtgaagctcctagattaagttgacataaatttaggaagattcttattccagtgcatcttggtaaatttccaaatcacagatgtgtaatgattctgtgggccagatttcctatgtcctgttttatgtttctttcctgtggaagtacgggactcagagacagtcatggaaattccttggctttttaaattcccctgttcatgtgggctagcattgtataatgtatcagaagttgcaggcctagttataattaacagttctgtgaaagattatgaactcttttcatgttaatatttcattaaaaatttttggttatggattggacatatcaacaaccaaaaatgtacaataataatattcaaaaggagcaagaaatccttttgaattcttacttattcagccttcacaatgatgctaatttttgtttttcaggtatgataatcatagagaggccctacttaaaggtgggtttgatggcgaatatcaagatgacagcttagatttgctacgctatttcaccgttacctgttattctggttatggagatgatgaaaaggtaagataaatgaactcacccttgatttctcatcaagtacttcattaagactcacatacaaagagaattcttaaaactattctgtaatagaaagtgaagcagtgttcattttgaaaactgaagatgcattgccttcatgtttaagctgtcagtgtataaaaacctctagttgaaatctaaatgtattgcagggactgaactttgtcccaaaattcttcaacattaaaatttttcattttgtattttaaaatctttttctgtgatcaggctgcaaaagtattaagaatttgtttttgttactgttttttagggattttacacggtgtatcgtaatgtttttgaaatgattgccaaggaagaactagaatctgtgttagaggaagaggttgatgatttcccaacttttggagactcccagagtgactatgatacggtaaaataaaaatgcattgttctataattagtatttatcactgtgtcatttttaaattttattttactttttgagatggtctcactctgtcacccaggctgcagt

SEQ ID NO: 33455 - DNA, 2300 bp, Homo sapien
tgagaagcaattgtgtgtgtgtgaagctcctagattaagttgacataaatttaggaagattcttattccagtgcatcttggtaaatttccaaatcacagatgtgtaatgattctgtgggccagatttcctatgtcctgttttatgtttctttcctgtggaagtacgggactcagagacagtcatggaaattccttggctttttaaattcccctgttcatgtgggctagcattgtataatgtatcagaagttgcaggcctagttataattaacagttctgtgaaagattatgaactcttttcatgttaatatttcattaaaaatttttggttatggattggacatatcaacaaccaaaaatgtacaataataatattcaaaaggagcaagaaatccttttgaattcttacttattcagccttcacaatgatgctaatttttgtttttcaggtatgataatcatagagaggccctacttaaaggtgggtttgatggcgaatatcaagatgacagcttagatttgctacgctatttcaccgttacctgttattctggttatggagatgatgaaaaggtaagataaatgaactcacccttgatttctcatcaagtacttcattaagactcacatacaaagagaattcttaaaactattctgtaatagaaagtgaagcagtgttcattttgaaaactgaagatgcattgccttcatgtttaagctgtcagtgtataaaaacctctagttgaaatctaaatgtattgcagggactgaactttgtcccaaaattcttcaacattaaaatttttcattttgtattttaaaatctttttctgtgatcaggctgcaaaagtattaagaatttgtttttgttactgttttttagggattttacacggtgtatcgtaatgtttttgaaatgattgccaaggaagaactagaatctgtgttagaggaagaggttgatgatttcccaacttttggagactcccagagtgactatgatacggtaaaataaaaatgcattgttctataattagtatttatcactgtgtcatttttaaattttattttactttttgagatggtctcactctgtcacccaggctgcagtgcagtggtatgatcatatctcacagcagcctcaaactcctgggcttaagcaatcctcctacctcagcctcctgagtagctgggaacacaagtgtgcgccacgacatctagctaatttgtcaattgttttgtagagatggggtcttgctaagtttcccaggctgatcttgaactcctggcctccctccttggcctcccaaaagattgggattacaggcatgagccacagctcccagcttctcatttccttgttttaaaacaattggttctagttctcgaacctatcccatgacctctctttgtctctcttcctttctgaagtagcttttcgatctcttgcaaccttccccctttacttttccctttttattttttattttatttgtttattttttttgagatggcatttcacttctgttgctcaggctggagtgcattggcaccacctcagctcactgcaacctcagcctcccgggttcaagcgattctcctgcctcagcctcccaggtagctgggattacaggctcccaccaccatgctcagctaatttttgtatttttagtagagacaggatttcatcatgttggccaggctggtttcaaactcctgacctcaggtgatccacccacctcagccttccaaagtgctgggattacaggcgtgagccaccatgcctacttttcccttttaatttactaattgtttactgattatttactaatcaccatggtcccatctagtgattagtaaggctatttttattttctcattaagtttattttgaagagtgattttttctggaaagccttaaaagtactgtcttctccagagattattagaagtgttatatacatgaaaaaagaaaggtaaaagatgtttcgcatcagtaatatttactgcttttctaaaaaaaaatcttaaagcgcagaagttaatctgttttctttgtcactaggtagtccatcctttctacgcttattggcagagtttctgcactcaaaagaattttgcatggaaggaagaatatgatacacgacaggcttcaaaccgctgggaaaaacgagccatggaaaaagaaaacaaaaagattcgggacaaagcaaggaaagagaagaatgagcttgtccgtcagctggtagctttcattcgtaaaagagataaaagagtgcaggcgcatcgaaaacttgtgg

SEQ ID NO: 33456 - DNA, 2300 bp, Homo sapien
tggttttagcttgcgtcagtcttttttatgatggttgcagaatgatgcttttccagtgccagtaccccctcaagtttttatcagttagcacttggccttctgctgtaaacaggagccttcccttttatccatttatctattatcagtttgaatttatttctttttttcagtgttttataattcattactgaccttttcatgctcaaatttttccagaattggttagtgagcattccttcaaaccacccttgtgtccttttgacatgtgcttataacttttttggaggacttactttcagacacaggatcttccattatctccagggcagcttggtctcaaggagaattttagtaggaaagaaaaacagcaactaaaactataataccaaaagcctgaacagatgagatgaagtagatagttgacaaagtttcctgctttttagttgatataactcttgtagcttatgttgtcaaccctgttttgttgaatgctttttagttgcctgtaggtgtgctgagacagacattgccagcagggttttgaacacagggatagagatgtgtctgaatgtacgttacggtggtgagagtgagaaaggagacctctcctgagaaggtgaaaagcagctgttgaaaaagcaagaggcagtaaactgctcttgtatttcaagccttcccaccaccatttctctagtccagggggctcttccttttaacattaaaatgtgtgtcttctaatttcccagtgatccctccaagtctgtgggatggcctggaatgtaaaaacacttagcaaatacttagtgattaaaagaaaacaatggcggaagctttaagaattgaaaaatcaaaataataagtagagaatttgtccaaacctccccctgccgacattcccccatccccagaaaggaagaaaatgtatgtagataaaaggacagagaaagacagggaaagctgtggtacggaaagaaagagtgtggccacgagcttccagtatgctcactgccaaggaatcctgacacgttctgtttctctgtataaaatcatgaacaaataaaaaaaaagaaaaaaataaatagaatcagaaacgttttgcttagtgggaaaaaagctaattttatcttggttgcagttatccagcaacattatctggacacgtgaactaattttagcgcagctgctcacgtcagattgctctttcagcatgaagaatcacgagaagtcaaagaagcatcgggaaatggtggccttgctaaaacaacagctggaggaggaagaagaaaatttttcaagacctcaaattgatgaaaatccattagatgacaattctgaggaagaaatggaagatgcaccaaaacaaaagtacttctaaatattaaatgtcactagaaatacttatcacattcagagattgcattaaaaggttttttttgagatggagaatcactctgttgcccaggctggggtgcagtggcgcagtctcagctcactgcaacctccaacttgtgggttcaagtgattctcctccctcagcctcccaagtagctgggactacaggcacacaccaccacgcccagctaatttttgtgtttttagttgagacagagtttcaccatgttggctaggctggtcttgaactcctgatctcaggtaattcacctgcctcagcctcccagagtgctggggttacaggtgtgagccactgcgcccggccttaaaggctgttttatcccaaggaagttattctaactagaaaagattgtctccatattttctagttaatggaactttatagtgttgaagtggatacagacgtcaactataatatttatagaacatattatcactatattaaaagcagtttttatacctggcagttgataagctaattactatccattgaactacagccttgtgttattctctaaaatgacaatgtgaatactttattttccttttaatgctttaagatattaaatatttttaatcttttacttctgttttactactttatcactagtgtttcaacttttttttttttccacttactcttcacagagtcaagtatttgacatttcgatttatatttgctcttaggctttctaaaaaacagaagaaaaagaaacagaaaccagcacaggtatgttagaaaggttttgttaacattaaatgccaacgataaagttgcagtgctcttatttattcagtgtagtctgtgttaaggagagaaacttatactccataattttatgttgattgtaagattgattaaaaaggaattagaaatattttccttt

SEQ ID NO: 33457 - DNA, 2300 bp, Homo sapien
gcttgggcaagtctgctgggcaatcttcccactcatctctagtcctctcccatccacaggatttcatgcctgtgtgtctgtgtggtgaggcttgcagctagtgaagcatggcagaaatgtttctagtatctttaagcaggattagaaagtagacatggttagtgctaagaaaactgagctggatggacagctagtactggtaacatgatagcctgggttttctccagtggaaaacaactaaaaaatcctggataaaatgaaatgcattcccttcaaagcatggatacaagaaagcacgaattctcagaaacgcaaatagatcattacggcactgcagccccctttgaccctgagagaatttcttgaacctggtaaccttgagcttccatgttgatggctctgtggagtgcagggaagagatgacgaagtccagggcccagccaaagtaagggatcttataggaaaccctcccctgccacaaagctggagcccccaagaggccacatcttcatccatgggtcaactagaattaaatacaccaccaagaacatattacccctcacaggccaaagggcctgcaaggattctggtgctgaatggaagtggagggactgggaggagccaccactgaaagtttcacctgcagactggccctccaaggctttgcattgtgaacgctcacttcctcaagctcataatttaaaggactcttagactctaatgccctacgcacttggaagctgcaaactcagataggctctggagggatctacctcattctgggcctcaaagaattctcacaaatgaaattccaaggaaaataaactgccccttgtcaaaaataaatatacaatacacaaaactccgcaatcaagaaaaagatcagcaaggatttcaaataacagaattatcagataggctataaaatgaatatgtttaatacatttaaagaaaatcaaatataagcttgaaaatatgcgaaagggataggacactgtgaagaataagaaagcaagttttaaaagcaaatatgccttctagtaatataaaagtgattattgaaatttaaaactcagcatgtgggtttatcagcagtaagatgcagccaaaaggagaagtaatgaattaaagacagatcacttcaacaaggacactttactgcttttccccattagaaagatctccaaaaagaaagaaagaaagaaaggccttcaagcaaaattgctcaatgtctcactccagccatgatttctactatttgttaatattttcttcttaatgcgttaaacatttactgagcaccacctacagtgtaccaaacagcttgcctggccacagagattttagaaatgaacaaagtatagtccctgcccacaaaaacctcctgattaatcggagaaagtcctgttaaaaacaagcacaggaccaagtgccaagggctgcgatggatggaagccacctagctctcgaacatttctctttagactgaattctaattgttctacaagcatatttactaactctaaagacaaagacactttgtagctttaaaacggtacatcagattaaatggcaatgaaaggtaaatagagttattttcaaataaattaaatcgctctaattacatttgaattagatccacctgtttgagaggacgggcatccttaggtgaaacagctatctataccagctcaatgacactttgggacgtttcttccccagatggaaagaactgaagtggtttgtttatgcctttatggctatcttaatctccctccttgaaccaaagtacaagttgttcagagagaacattcccccttcagaaatgcatatcctcaccccagtttaccgtattctgaagtccctgattaacttaccctgtctggttgttttttttttttcctgtttttccccatgtttctaaatatcaggctcacattttcaaatgctgtggtttgttttgttttgttgtttgctttttgcagactgctgccaagctaaagatcagtatattgagcaattcaaagatacgctgagcacatctgtggccaagtcaattgctggatttttcgcagaacctattcaagtgggtatatgaaccttagacattaatggagctgaatcttcaattatcagaaagttttaactcatatattctagagaattccaaatgaattaagtgctcactgtgtccctctctaaattcattctcttggtctccttgaaaaaagaagacgctgactttcaaatgaccttttaaaaaccctctcctccattctcaccagacagatgaaactacc

SEQ ID NO: 33458 - DNA, 2300 bp, Homo sapien
tgtaatcccagctacttgggaggctgaggcaggagaattgcttgaacctgggaggcggaggttgcggtgagccaagatcatgccattgcactccagcctgggcaacaagtgcgaaactctgtctcaaaaaaaaaaaaaaaaaaaaagaatgtagtttcgtgcaatgttagtttagttgaattataaattgatgtcatcttactgagatgcatttaaaatgtacacacattttgacctaggaatccttcttcaaggaacttatctgaagaaaaaaataattagtcaagtacagaaaattctctgtcctaggatgctagagaaaatacagctatccatcaaaaggaacttattaaacaaaaaatatgaagactttcagtttctgaaacagcatgtgtatacacagatagacacatgtagagaaagatttctgaaaggaaatttactgaaatataatggtcaggtttgttgtgatctttttctttcttctttatgcaattctaggcttgagtttgtttaacagaagtacatattatgttatggtaatccgaataatttattttctttttaaataaaagaggtataacctcccactttccctctagaagttattcagaatgtactgtttttcttccccactccaggtgaccccttgatgttgggtgcctctcattacaaaaatctcaaatcttacagaccaagaaaaatctcaagtcaaggaagacttgcggtgttcacaaaggcaacattgaccacagtccagtagagctgaagagcatataccagaattcaggaactcaacattttctcccctctgtccaaccacaggacagactgtgcaccccagggagatgctgtgtgtccactggcctcactgacttggattactcctgcagcacgtgaccagccagctcatatgatcactccctactgcccccaaagcagaattgactgggagctggaaacccacacaaaaagggacaattatattgaatgtaacatactccctctgcttacctagtgccttcacctcctatgggcatttggagtaaaaggttgttatgcaggtgtttgtgaaggatgtggccaagtcagttgtctcccttacagggtgacccaagattaatgatatctacccatccccagtccctcgaccccctagttgcaatcagctttgtcactgtcccccttaggcactgccatgtaaagcacgtggtcccccattctgaagcagtgggaaacctagaagagatgtactcttcgcaacctggttggatcttaaaaacatggttctaactgaaaagaaaaaagacatattacacatatttacataaattaaaactgcattcaccctaaacaatacacattttacaagaatgcgttccaacaaaaggatatatataagcatgctaaatacttgcttatggggattgaaggtaaggggaggctggagtgggataaataggaatttaagaaataatgaaaataaggcacactaactccttagctctcaaccttttgccttcctcagacacataagatgatccacagctgtccagaaccttacctagctatttggtactctcagcttttctttggaatggctccttccccattgttttctcctctctttctctaagacccccaaaaccaatttatttgttcattcacttcatgcatatcttcctttttcctctcttagtcacatacctcgtttcacaatctccgaccccttcaaccatgtcctgatccttctcccacacccagcaccaccctcctgcagagaaaagtgtacccggatgaaactccgatggaatattaaactaacagaacttgtcagatgacctttgctttatctgcctgctttctttcctcttcccttctgttctcttcttttcctttcttttctctcctcttctctctctccttcctattttcattctatctcttttcctcactctctttttctcccccttgaaggcactgttactagaaatagagagctctggggcttgcctgaagccatgggcagtcaccactccaggattccccttttagcgcctcctccccatcttaatctcaaagtccagcaggatagtgagcagttagagcccggcctccaatctgcttccatgggggttggctttctgagtgggagaaatgactctaatctggagacatttgctgagacccttgtgcctggtcacttccgctcccaggatccttgagatgcatcctttcctgagccgtaagtggaaaccagggggacgtgggtcagtagaggatcagcgagagggtaagac

SEQ ID NO: 33459 - DNA, 2300 bp, Homo sapien
tgcagaaatgaactagaggaggacatcagtaaagaagctgtgaagctggagcacatcagtgcatagagagaaggagatagtcaaagaaccactgtggggcagaaaaggaaaatatagtggctcactgcggatttcatcatctcaggaaagctggggcaaggtaactcactgacaatgagtacccgtggctttgtgacagtgcctgtgtgctacacaacagagcagaaagccagccctgcccttcttaccagtgaggtatggattagccacgcaacgaccagtctgtaagccaggagtacagacgagccaagctgcctgcagctgagtgggaaccacaaggaggaaaagccaagtccctgccttctaagagctgacagtctggagttacccagagtgatcttctatttcactaactgttaaaatagtctgattagaacaactattgtagaattgagtgaccctttgctttgcaaaggtcatatagaaatattctgccactgaggatctcatgtcgcccagtggttctgaaaataaatagaagttgcgtaccttcatggacacccatgaatgaaagtaaatataccctaatcatcacaggaagcatgtgcggtctgcacgtgaaagatgcatctcccatcagctaacagaaccaggtggagtctatgttttaataaggacgtgttattgatcaggaagtattaggttattatgcctaggtagttgcttctgggattccagtccaaaaggatcaccaaagcatcatgggattttcaatggcttcctgtggcttggcaaatgctcactgctaactgtgatttcccagttatccagagtagcagtcaaatcaaaggggaaagcctcatgtttcaataacttaaaacaaaacaaaaaaaaaaacggccaggcgcagtggctcacgcctgtaatcccagcacttcaggaggccaaggtgggtggatcatgaggtcaggaaatcaagaccatcctggctaacagggtgaaacctcatctctactaaaaatacaaaaaactagccggacatggtggcacgcgcctgtagtcccacctactcgggaggctgaagcaggacaattgcttgaatccaggaggcagaggttccagtgagccgagatggggtcactgcaatccagcctgagcgacagagcgagactctgtctcaaaaaaacaaacaaaaacaaacaaaaaaaaaaactcagtaaccttggtttaaagtatttccttggtggccctctgggttgtgtaacaatcggatgcattaattattatggcatcaaatgacaccagcaacatacatagtcagaaataactatttgattcaggcaggtgctattatttgtttcagcactgttaaatgtggggtttttgtttttgcaagagaaaaggcggttgtgtgtggtttcaagaagaagaaaagtcagaacaacatgcagcccattagaaaagataaattctttatttgtggaaaacaacagaagtggggctatttaggcaccgccaatgtttattatattcatatggcagagaataaacacagcacactagaagtttgcgctttgggtattaaaaaaaaaaaaaagcaaaaccttcttaggtcactgactatcttcttttgctcctttctatctgactcctcaggcaaggtgcaattcaaatccctggagaacctctcaaatatagctgctgttcaatgttactcagaaataaggaaagaaatttgacacggagacactccacatcttggctgcctggaaaaatatcatctttgaggtcattcaactcactaagtcatttttattattgttttgtctgtctattttctggtacagtctcaatgaaagatatgtggccctaatcatgcaaaaccgatctggggggaatcagttgtttcttcaggtcttcgcaggattccagctcccccaactacctccgtcgccttctaaaactggcaggctctggacgttttgcatgctgaagaaaatcactgttttgcctccagcaaggaacataaatgttgcaacactgactcctcctctcatgaagaaagagtgaacaagtgcaccgagttgagcttcttctcacagagccaccgggctggggaccggggagcggaggctgaaatccccagacgccggttttctgggctgggctttctgccttactcactccttctccctctttctggattttaccgaccgttcgcgaaacagctttccacacaatggagcttcatgtcctcgtgcaggaagtactcatcgactgatgtggcagactttgctccc

SEQ ID NO: 33460 - DNA, 2300 bp, Homo sapien
cttcttggtagtggtataaaaatagactcatagaccaatgtaacagaacagagaacccagaaataaatccacatatttatagccaactgattttcaacagaggcaccaagaactatgttgaaagaaccctctcttcaataaatggtgctggataagttggctatccatatgcagaagagtagagctgaacagtatttctcaccacatacacaaatatcaactcaagatggattaaagacttaaatgttagacctaaacctataaaactactagaagaaaacatagggaaaacacttcaggacattggcctaggcaaaaatgttatgaataagacctcaaaagcacagacaactaaaacaaaaatagacaactgggggctatattaaactaaaaagcttctgtacaatacatgaaacaatcaacggagtgaagagacaacccattgaatggaagaaaatatttgcaaactattaatctgacaagggactcatatccacaacatacaagaaactcaaacaactcaacactaaaaaaacaaacaatcccactaaaaagtgtgcaaaggacacggatagacatttctcaaaagaagaggtacaaatggccaacaggtatatgaaaaaattcatcatctctaattatcaaatgcatatcaaaaccacaataaaataccatcttaccccagttagaatggttattattaaaaagacaaaaaacaacagatgctggagaagatgtggagaaaagggaactcatactgttggtggggatgtaaattagtatgaccactatggaaggcagtatggaggtttctcaaaaaactaaaaacagaactgccataaaatccagcagttccactacagtgtatctatccaaaggaaaagaagtcagtatatcaaagggatacctgcactcacatgtttatcacagaactattcaaaatagccaagatatggaataaatctaagtgtccatcagcgaacaaatggaaaaagaaagaatggtatatatacataacggaataccatttgtccatggaaaagaatgaaaacaggtcatttgcagcaacatggatgaactggaggccattatgttcaatgaaataggccaggcaacagaaagacaaatactgcatgttttactcatatgtggtagctaaaaaagttgatcccctggagatagagaacaaaattatgagtaccagagactggaaaggatgtgagggtgggaaggggaaatgaagagaggttggtgaatgggtacaaacttatagttagatggaagaaatagggtctaatgttagctagcaactggggtgactatagttagcaatgatacattgtatatttcaaaatagctagaagagaagatttgaaatgttaccaacgtatataaatgataaatactcaaggtgatggataccccaaatacccttcttctttttcttcctcttcttttttcttcttcttcctcttctttgatctctccttgttctcctccttctccttgttctccttcttctccttctctttcttcttttcctcctgttcttcctcttctcctcctcctcttcctctccctctccttctccttcttgttattctttcttctttcttcttcttttttgagacagagtctcattttgttgcccaggctggagtgcagtggctcgatctcggttcactgtaaactccgcctcctgggttgatccttccacgtcagcatcctgagctggtgggaccacaggcgcacgccaccacggccgcctaatttcttacagaaaaaaaaacggtttctgctaccttgcccaggctggtcttgaactcccaggctcagtcgagcgccaccccctccacaaagtggtaggattatttgcgtgagccacggagccctgcggagactctggttttactttctgctcacctaagaagctcctgctgtgtccctaagtgttcccgcctcgcctctccccacacccactgctccctaacttctctcacaggcccccaacggcttcctcctgcgctggcgcacgctcaggtcttacccgccagcaggtggcgaaacacgattttctgtcctctgcggctgagccctagcgtcccctcttctctaaggcctttcgcctagttccagcctggatacgcttccatagcaaagggttgcccttggctacaggaggacgcgggctggcaggcttggttcctggcgagtttctaagcccccgcctgcggtctgaggcaccggctgaaccatgtcggagatcctgtgccagtggctcaacaaggagttgaaggtgt

SEQ ID NO: 33461 - DNA, 2300 bp, Homo sapien
tttctaagaagtccctgccacaaagcactcaaccattttcagagctctactgtgcatgcccataaccaagttatacttggaatttctataatttgggggaaggatatttcatttccagcacatcatccatgttgtcttaagttgttcatgatttttaattgctgctattttttgcctttaatggcaaattagtgtttaagttcatgatcaggtgagtttgttgtggttattggattaaccctacagtgtgtgttataatgtacatttttattaacattatttttggcttatgattttccgtcaaccagactttaagatgtggttgtatatgttatggtttaacatgtgtacgcctgtcactacagcacatgtatggacacctatcccccagtttttttacaatgacctttattaccaccaggtctttttccaccaaagaatagaaatatgggactaaatgagccatggagttctctgttttcctgtctcatctgaattgtgtggcccaaagacatccctggataattgacacaagcacagtgatagattttagtagatgaatgttaagggcatgtgaatcgatcacttttttacatttaaaacatatacattgcattgatcagctcaggctgctataataatacactatagactgggtggcttaaacaacagcaatttatttttcatagttctggagactgagaagcccaaggttaaggtgttagccagtttgactccccagtgagatctttcttcctggctcacagaagactgccttcctgctgtgttctcacagggcagagagaaacagagtgagctcttctcttttcgtcttcttttttttttttttttttttggtgtttccaaattctttttattattattattattatattttaagttttagggtgcatgtgcacaatgtgcatgttagttacatatgtatacatgtgccatgttggtgtgctgtacccattaactcgtcatttaacattaggtatatctcctaatgctctccctcccccctcccccgaccccaaaacaggccctcgtgtgtgatgttccccttcctttgtccatgtgttctcattgttcaattcccacctatgagtgagaacatgtggtgtttggttttttatccttgcgatagtttgctgagaatgatggtttacgaaaactaatctcatcatgggagcccctccctcatgacctcatctaaacctgattacattccaaaggcctagcctccaagtaccatcacattggaggttagggcttcaacatatgaatctgggggagacacaaacattcagcccataatatatgcatttattcaggatacttacaaaatgtcacaatatggaaacttactaattaagtataggaacttttaatttcacatgaagttgcttgttttatggcctcttctgtttcttgccaagaagtcttaattttcttgtcttttgactatgaagatgcttctactgatgaacctgagcattaattctaattattcattttaatataaatgtatataattgcattgtgtagtactggagggccctgaaaaatatgatggtttcatcttttattttcagatatggaggaatacagctgacctctaagtggacagagtaagcacttgcttatatgatgaaggctgagatattctctaaggctattattctattgtaaaaattctgcctgtcattgcactcaatgcctcacaatatcattcctttgaattaagacatcagcacttcctaaaatacaaacatttctcaagataggcaataagaatcatgatcagcctccaaaatagaaaggagctgggaaggaagattgatgttgaaagaaatattctcatatcattctagtttagtttttaagagtgtgccatttcatacgtgcaatttcttttctcatttgtttacagtgttacctctaactccctaaattccttcactaatggtaaggctatggcttttgtagactaagcctcattgtatcttggttggttaggattcctttttttttttttttttgagagggagtctcgctctcgctcttgctctgtcgcccaggctgacgtgcagtggcgcaatctcggctggctgcaagctccgcctccctcccagtagccaggactacaggcctacaggcgcccgccaccacacccggctaattttctgtatttttagtagagacaggctttcaacgtgttagccaggattcttatttgtagtaatcaagcacactgattctaacttaacagagcagaacatcaatgtattagtttt

SEQ ID NO: 33462 - DNA, 2300 bp, Homo sapien
atttcatcaagaagcctgaataaagcgggagttaaacacggtagacttagagatgttgagcatgaaaattctcttttattactttaaaatattataaaataaatttaatacttgcataagatagcagagaaatgattactgtcttttatctgcttactggtgataacatcaatttaaatgtcttaatgttcaacctagattacaaaatgcctcaatttatatgctcactttcataagctaagattttttagtttttttctttgcttttatgtagaaagcatttttctgccctgtaatatgaaactattattaatgttattactctttttataatataattaaagtattcattggcttttgttggctataatttggatttacttttaacatttaaatatttcatatacctaaattccacttttcagaatatttctgtttatttgatcgttatttttacagaacatggttggagagtgggccttaccagaagaaatggttgacaatttaccaccctccaacaattgcatactgggccatattcttcacaggctagctgaaaaatctcttcctcctcgagcggaatcaacaacacctgaattaccttcatttgctgttaaaggatgcttattggggaaaacattaagtggaaaaactaccattttaaggtctctacaaaaaggtagaatttcttctcctactctccctgccattaggtcctatttacactgactgtagctgcaaatgtctatgtgtataaaaaacatacaagaagcactgctgatatgttgggaaatctctgtcatcaaaagttttgtaattttccaggctacgattattcagccataaaaatgagtgaaatattgatacatgctacaacatggatgatccttcacaacattatgctaagtgaaaaaagccagacacaaaaggtcacatagtgtatgagcccatttgtatgaaatatccaaaataggcaaatccatagagaaagaagtggaattattggatgccagagtcaggggtaggggaatgaggagtgacagcagttgatttaggatttccttttagggtgattaaaaatttcaggaacaaaataatggtgatggttgcacacattgtgaatgtctaaatgctactgaaatgtatcctttaaatggtggaagtgcttaactttatgttttatgaattttatcacaatttttatctttgttttatttttatttatttatttattttttcgagacagagtctcgctctgttggcccaggatgaagtgcagtggcacaatctcggcccactgcaacctctgcttcccgggttcaagcgattcttctgcctcagcctcctgagtagctgggactacaggtgcgcaccactacacccagctaatttttgtatttttagtagagacagggtttcaccatgttggccaggatggtctcaatctcctgatctcgtgatccacccacctcagcccccaaaaatgctgggattacaagcatgagccaccgtgcccagccttatcacgttttttaaaaagaagcttgatccggctgggtgtggtagctcatgcttgtaatccctgcactttggaaggccgagacgggtggatcacctgaggtcaagagtttgagatcagcctgtccaacatggtgaaaccccatctctactaaaaatacaaaaattagctgggtgtggtggcatgcacctgtaatcccagctactcaggaggctgaggcagtagaattgcttgaacccaggagacggaggttgcagtgagctgagaccatgccactgcactccagcctaggcgacagagcgagactccgtctcaaacaaaacaaaccaaacaaaacaaaaaagaaacttgatccaaaagactgttctagcgggcctgaaagacagtgttataggacaaaaccagcacataaagacaacaatttccatttcccaaatgaaaagctatttataaaattatcttttgtactttagactttcctatacagatactttctattgacactcttgtccaagaagctatccaagcatttcatgacaatgaaaaagtcagtgaggttctaccaattcagaaaaatgatgaagaagatgctctaccagttctgcaagaggagattaaagaaagccaggcaagtgtgattctagttttctcttctgcgcctagtacattagagatttggagctggatggaatttaaaaggtcttctctagaccagaagtttcttctgtacagacccagagagtaaaagtttaggttctgcaaaagtctagaaaataaatat

SEQ ID NO: 33463 - DNA, 2300 bp, Homo sapien
ctgttttgtttcttagtgaggttatttggattttctctcttcttttcttggttaatcttgcgaatggtctatcaattttattttcaaagaaccagctttttgattcatttgtcttttgtattttttttgttccaatttcatttagttctgctccgatcttgcttttttcctttcttctgctgggtttgggtttggtttgttcttgtttttctagttccttgaggtgtgaccttagaatgtcagtttgtgctcttttgatctttttgatgtaggcatttagggctatgaactttcctcttagcactgcctttgctgtatccgaggttttggtaggttgtgtcactgtcattcagttcgaataattttttaatttccatcttgatttcgtttttgatccaatgcttattcaggagcaggttatttaatttctatgtatttgcatagttttgaagattccttttggagttgatttccagttttattccactgtagtctaagagagtgcttgatataatttcaattttcttaaatttattgaggcttgttttatagcctatcatatggtctatcttggagaaagttctatgtgctgttgaatagaatgtgtattctgcagttgctgggtgatgtgttttgtatatatttgttaagtccatttgttccaagcaatagtttaaatccattgtttccttgttgactttctatcttgatgacctgtctaatgctgtcagtagaatattgttgtcccccactattattgtgttgctgtgtatctcatttcttaggtctgttagtgattgttttataaatttgggagctccagtgttaggtgcatatatgtttaggattgtgatattttcctgttgcacaaggccttttaccgttatataatgtccctctttgtctcttttaactggtgttgctttaaagttggttttgtctgatataagaatagctaccctgctcactttttgtgtccatttgcatgaaatgcctttttccacccctttaagtttatgtgagtccttatgtgttaggtgagtctcctgacagcagcagatagttggttggtgagttcttatccattctgcagttctgtatcttttaagtggagcctttaggccatttacattcaatgttagtattgaaatgtgaggtaccattgcattcatcatgctctttgttgcctgtgtacttttggttttttttgtttgttttggcttttttaacttgtatttttgtttaataggtcctgtgtgatttatgcattaaagaggttctgttttgatgtgtttccaggatttgtttcaagatttagagctcctttttcttgtagtggtggcttggtaatggcaaattctctcagcatttgtttgtttgaaaaagactatgtctttccttcatatacgatgcttagttttgcttgatagaaaattcttggctgataattgtttcgtttgaggaggctgaagatagggccctaatcccttctagcttttagggtttctgctgagaaatcagctgttaatttgataggttttcctttataagttacctggtgcttctgtctcacagctctgaaaattctttcctttgtcttaactttggataacctgatggcaatgtgcctaggtgatgtttttttgtgataaatttcccaggtgttctttgtacttcttgtgtttgaatgtttaggtctctagcgaggctggggaagttttcctcaattattcctctaaatatgttttccaagcttttataattctcttcttcctcaggaacaccaattattgttcggtttggtcatttaacataatcccagacttcttggaggctttgctcatattttctttttcttttttcattgtctttgttggattgggttaatttgaggaccttgtctttcagctctgaatttcttgcttctacctgttcaattctattgctgagactttccagaacatttcaggtttctaaaagtgtctacaaagtttcctgaatttttgtttgttttttcttttagctatctatttccttgaatatttctcccttcactccttgtatcattttttggatttccttgcattgggctttgcctttctctggtgcctccctgattagcttaataactaacctcctgaattctttttcagataaatcagggatttcttggtttggatccattgctggtgaactagtgtgattttttcacggtgttaaagagccttgttttgtcatattaccagggctgattttttggttccttctcatttgggtaggctctgcaaagggaaggtcta

SEQ ID NO: 33464 - DNA, 2300 bp, Homo sapien
cttgtgatattttcatttcatgtgcaggctcctcaaggtaacaaaccaaaatgcaaaggtaagaattcaaaaacaaagtattccataaacacaatgtcacagaaataaaattcactgtaggcattaaactgcttgggttcaaattaatttctggctctaccacattgaaattataggcaagaaacttaacctgtctgtgtttcaatggtcttgtcggaagcctacttactgtggggctgtgggggttaggagataatcaatgtaatgcagtggtccccaacctttttggcaccagggaccagtttcgtggaagacaatttttccacagatattggtgagggggatggtttagagataaaactgttccactcagatcatgaggcattagattctcataagaagtacgcagcctacatctctcacatttgtagttcacaatagggttcaggcttctatgagaatctaatgttgctgcggatctgataggaggtggagatcggggagtaatgctcacttgcccaccgctcacctcctgctgtgtggcccagttcctaacaagccatggatgggtaccacctcgcggcccaagggttggggacccctgatgtaatgcacttaacatgatgctcaacacataataaatgtttagtgaattattattattaatttttattgagacagggtctctgtcactcaggctgaggtgcagtggtgaagtcatggctcattgcagccttgaacccttgggctcaagcaatcctcccatcttagcctcctgagtagctgggactacagacatgtgccaccatgaatggctaagtttttattttttaattttttatagaaatgggggttttgccatgttgaccaggctggtcttgaactcctggcctcaaatgatcctcctgcctcagcctctcaaagtgttgggattataagcatgagccactgtgcctggcctcagtgaattattattattgcaaaagctgtcgatttttatttgactgtatatgtttcattaatgggactgaagcctaatatagtagtatatattattcaagaccaccagttcgtattctggctccaccacttaatctttctgtgaccttagaaagtaacttctctgtgactcagtttcctcaattgtaaaatgaaggtaataatactacctagcttaaggatgttgtgaggcattaaatgagccaatacaagtatagtgacttatgttccgacacatagatacacactgaaaggactctatgtgataactatttttattatatttatatgtaaattattaaatatatataatgtattatatattactcatactctactatactataaatcatcatactctaaatgcattgatactgtttattatgtatttatatataaatagtatgttataaattattatgtttatatttatcatcttgattattgcccagtatctggcaagggcaatctctttactgctatctctttaatacaaagcttacttttagatcaccccattaaactcagacaacattttttggtgaacaatatgttccacctgtagtattaattaacaagtttatattaattaattatgttaattaatacagctgcatatttttttccaccaccaattgccatttcccccccaaaattcactgaaagggctttttcaaccaaacacatttttttttaggaaggattaaagcacataaaacatagccattcatgaataaagtaaaatgtagtgggtttttggtagacatagacatatgatgtggtgaggtcctcttcaaacgtaagggactgacagaagagactcaagatgaatattggttgaatgagcacatacaatacaggagtgcaattggtgtaaaatttctttagagacatttttaagagaggcaaaggattttagttttattgcacctaggtgatttgagcagcaatctaaagcatagccaccatgcctgttttttctgttcaggatctgcgagaccgcctgtgggacatttgtgatgcccggaaggaagaggcggagcaggagcggcttgacatcattaatgagagctggttacaggacactcttggaatgacaatgaaccatttcttttccctgatgcaggtaagagcagctggtcacaataacccaggcacttcccttcacagcctcattcctcagtccttcatatgacactttcttgggaatatgagaggtctgttcagggctcattttggtatagcactatgcctggtatgagctccaactcaccaaaaaagctagccgaaataatacattt

SEQ ID NO: 33465 - DNA, 2300 bp, Homo sapien
agccaggctatttcagaagtttaccctagatctagattccaagatgcactacagtttacaataaacatttactgaaaacttagaagttgctacacaaacagtattcaaaaggcaattattcttagaagcaacaattttcatgtaaaaagcagctgttatggttcgttttctctggtccttgtctcatagtgaagttcttttgtaaagtcttcagcctagttgtttagaactattgctccatagtaaaacaaacaaagaaacattaaacagaataaaaaatacaaacacaagcataagtaagcttactgcagtaatgcttaaaatcattttgctactggataaccaagtcagttactcatcagcatcacacagtaataatattcatttctgttctctgcctgctattttgaaatgaaagtctatcttcttcatttttgggactcatggctcccatccatgtggccatccagtgtaaatgcatattttagcagatgtattcatatttctcagatttatattgtatatgtctgccctgtgaatctacagatgctgtcatgaactgtggccacaagaagttaaaacctagaaatgtgatacaaataaataaataaataaataaataaataaataaataaataaataaatagctggcagatccctttgaccttcaaatcctgttcttattttcctggcacttttttccttccgttgttaagattactcttagtaaccttccactaggtggcgcgcatctgttttagtatcctgatgcccagtaaaggtattattctactagtcatgttttacagagtatcgtgccgggctatggttgggtctcaatccacatttggagtccctcctcactcacgtaaactcagcagctatccagtgacctcctctgtccccgagcacgcaaccaccctaaaagcataaactaattggctaacacgtattacatggacacttacaaagacaacattctggagttgaattctagagtatcttttgaaagacagcaactaatgctactttttaaattttcagttatatgttcagtatgtggtatatttggtgcctatgaattatataaaatgagatcaaatatgcatttttctgtgttgctcactttcattgtaatatataaacaagatcctttcttcaatacagcgataatgcacttattcatgtataaaacttctctagcctttaaaataatttttaaaaggtcattaactatacccccagtacagtttaaatctttgccgtatatgagttcacattaataaccataagatagggagtgttgcgttgttgattccattgcaaagacaaggaaattcagagagcccaggatctctggctagagagtgtcctaggatgagaactcagattccagcactctttctaccgcatcatagtggttcccagctgttgctgctttaccatgttatctagctaggaattgttattcttcatgaagatagcaaagcaatttcaatggattatatacaacagaggctattctgacatctttgttttagataacatcaaacttctttgacagaaatagagaaaagccactcttctagaaatacattattgaacttgattcactttataattcatcctaattccaaataaatgtaattctaatagtcatgttttacagagtattatgccatataaccttattctggttcatacttagtatgaaatataacccttgatatagtcttgcttacatagtaaaatatattctaatactaataaaaactatatttaataggttctctttaagttcagttttgtgtaaaatgtgtaactagtagctgtttaataagcatgcattttctatttaatctgcatttatttataccctgcctttttacaaaatagatttggggacaaattgaaatttataagcatgcagatggagttgtctaagagctatataatctgtttacttttgtgtatatgtcttataagcaaactttattaatctaatagtatctttcatggggttaacgctatccattttaccactttcagtacagaaaaattaactgacgtagctcgctatcacattgaaacatctacaaaaattcagaatgaactttatttaagccaagaagacttcttcattaatggcaatataaaagtcttcccagatcctcccccatcaatacgtcctccacctgtagaaaaggaagaagatggtaccctgaccattgaacagcttgacagtcttcgagatcagttcttagatatggcacctaaaggtaggaaaaataattatcatg

SEQ ID NO: 33466 - DNA, 2300 bp, Homo sapien
tcatgggaatctgtaattatagctttcttgaaagggtatttagctcagtgtacaaaacataccaatttttgtgaatcaggcttacaattttctaaccaagctttcaaaacaagattagaaatgagggcataaattattatcgatgcacaaaattgtcactctttatttggcttggaagggttttgaaatgcccagagaaggccctgacaaatggagaagatggaatatgtccccttcagttggattcttgctccgaagtattccttgagcctatactccaaagtgtggcattataactggtgcagacggagtctgtcttaaaactgaaaaggaggatccagagactggtacaaatgtcccacctcctttttttgttacttcgttattgtcaaataattgtaatgatgggacaagctaaatcatgagtcttttaaagtctcttcgatttgctttacacctggggggttgttgcttgtctctgctaattttagccatttcacaggcccatgggagcaattctacctaatgacagtgaatccaacagaagttcataactcactgatcacttagtttctctgcactcctcaccttataactgcagtcttgtggcatttttccaaaagagagccactgtgaatcaagcatagagttttatggcctgaatccaggttagattatttttttcaagaaaaagaaaaaaaaatctaacagttaccaagaagcagtcaggctttacaaatatcaccactttaaccatgaggccatattaggaaggcttttgactggcattcaggtttgggggagtctgaattttctatgccatggtctcagatttctgccccatatacctaggcactaatttagttcatatgtactatgtgtacctgaaaagttgtgtggcaatcaaattttcacaaatagaatcctgttttaaatacactaagaaagtacctactttatcctttaaacaagaggtcagcagactttttctacaaagggtcagatagtaaagattttacaccttttgtacaatacaatctctatctcatctacttagctctgccattgttgcataaaagcagctgtagatgatacacaaatgggtgaggctgtattccaatgaaacgttatttgcaaaaacaggtggtagattaaatttggtcccaaggcttacttgggaaaaaaaaagatcttttgaaaaagaaaaaataaatgaataattttttaaaaaattgttccctaggtcatagtttgccagcccctgccctaaacaaataattcttgaatgcctactgtggtgtgtaagatatgagtaaataccagggatacacagagaacaaaagagaaaaactgctattcttgtgaaacttggaagttggaggtaagctatttaaaataaacccacaataaagtacttcacatagtgcagactgtttctttaaatcaaaactcactccaaacaaccaattgattcactttgtaagtttgaatttttgtcttcagattcttttaaagtgggcccttagtcaggagcggtggctcatgcctgtagtcctagcactttgggaggctgaggcaggcagatcacttgaggtcaggagttcgagacaagcctggccaacatggcgaaaccccgtctccactgaaaacacaaaaattaggctggcatagtggcatttgcctgtagtcctagctactcaggaggctgaggcaggagaattgcttgaacctgggaggtggaaattgcagtgagccgagatcatgctattgtactccagcctgggcaacaaagcaagactctgtctcaaaaaaataaaaattaaaaaaataaagtagcctctagcctaagatagcttgagcctaggtgtgaatctactgccttactctgatgtaagcacagtaagtgtgggggctgcagggaatatccaggaggaacaataatttcagaggctctgtctcttcatgtccttgacctctgcttacagcagcaatacttttactcagacttcctgtttctggaacttgccttcttttttgctgtgtttatacttcccttgtctgtggttagataagtataaagccctagatctaagcttctctgtcttcctccctccctcccttcctcttactctcattcatttcatacacactggctcacacatctactctctctctctatctctctcagaatgacaattctaggtacaacttttggcatggttttttctttacttcaagtcgtttctggagaaagtggctatgctcaaaatggtgagtcatttctaagttttcttatggat

SEQ ID NO: 33467 - DNA, 2300 bp, Homo sapien
ggctgggaatgtcagtgcatgtgacgcccctattctctcctcttccaggtccctagactgcagggagagtggcaagaatgggcctcatgtgtaccaggacctcctgcttagccttgggactacaaacagcacgctgccccctccattttctctccaatctggaatcctgacattgaacccagttgctcagggtcagcccattcttacttccctgggatcaaatcaagaagaagcatatgtcaccatgtccagcttctaccaaaaccagtgaagtgtaagaaacccagactgaacttaccgtgagcgacaaagatgatttaaaagggaagtctagagttcctagtctccctcacagcacagagaagacaaaattagcaaaaccccactacacagtctgcaagattctgaaacattgctttgaccactcttcctgagttcagtggcactcaacatgagtcaagagcatcctgcttctaccatgtggatttggtcacaaggtttaaggtgacccaatgattcagctatttaaaaaaaaaagaggaaagaatgaaagagtaaaggaaatgattgaggagtgaggaaggcaggaagagagcatgagaggaaagaaagaaaggaaaataaaaaatgatagttgccattattaggatttaatatatatccagtgctttgcaagtgctctgcgcaccttgtctcactccatcctgacaataatcctgggaggtgtgtgcaattactacgactactctcttttttatagatcattaaattcagaactaaggagttaagtaacttgtccaagttgttcacacagtgaagggaggggccaagatatgatggctgggagtctaattgcagttccctgagccatgtgcctttctcttcactgaggactgccccattcttgagtgccaaacgtcactagtaacagggtgtgcctagataatttatgatccaaactgagtcagtttggaaagtgaaagggaaacttacatataatccctccgggacaatgagcaaaaactaggactgtccccagacaaatgtgaacatacatatcatcacttaaattaaaatggctatgagaaagaaagagggggagaaacagtcttgcgggtgtgaagtcccatgaccagccatgtcaaaagaaggtaaagaagtcaagaaaaagccatgaagcccatttggtttcatttttctgaaaataggctcaagagggaataaattagaaactcacaatttctcttgtttgttaccaagacagtgattctcttgctgctaccacccaactgcatccgtccatgatctcagaggaaactgtcgctgaccctggacatgggtacgtttgacgagtgagaggaggcatgacccctcccatgtgtatagacactaccccaacctaaattcatccctaaattgtcccaagttctccagcaatagaggctgccacaaacttcagggagaaagagttacaagtacatgcaatgagtgaactgactgtggctacaatcttgaagatatacggaagagacgtattattaatgcttgacatatatcatcttgcctttcttggtctagactgacttctaatgactaactcaaagtcaaggcaactgagtaatgtcagctcagcaaagtgcagcaaacccatctcccacaggcctccaaaccctggctgttcacagaaccacaaagggcagatgctgcacagaaaactagagaaggggtcataggttcatggttttgtttgagatttgttgctactgtttttctgttttgaattttcttctttgttctgtttttactttatttagggggactaggtgtttctgatattttagttttcttgtttgttttgttttgtgttgtctgtgaatggggttttaactgtggatgaatggaccttatctgttggcttaaaggactggtaagatcagaccatcttattcttcaggtgaatgttttactttccaaagtgctctcctctgcaccagcagtaataaatacaatgccataatcccttaggtttgcctagtgcttttgcaattttcaaagcacttccataagcattccttccacctccttgataggcatttatggaaagcctgctacatgtcaatcatactgttaggcacaggggacctaaagacacataaaaggatggcattctgcctcataaattgcaaaacctaatgaaagtgactgcttggtaaacaaattattattatattataaaatgctataaaagagccatattgaaagtgccctgttggagacagggcaaatgccacaaaaatgat

SEQ ID NO: 33468 - DNA, 2300 bp, Homo sapien
atatagatagatatagatatagatagatatagatatagatatagatatagatgatatagttctacaagccaagaggtttggtggaagtaggttctgaggataatcagcagtgtcttccagttaaaatacctcagaggtgctagtacactttcctttgaaaaatcaggatgaaccttctcagacatgaatagcagggttgctcctactggcaaagaagatgcaggagaatttagaggttaagtgtcctcagcttcatcaggatctaccctacaggtttcattccgattttcagaatctcattccttcctaatcaattccctcagtttagcagaagatactttgcctggttgggaattcaatttgcactgtaattctgccactctcaggatgagactccagatttgattttctgaaacctcaggctgatgacaatgggagataagtacgttcctccaggaagacatagaaggtttcagatcatttatgtggagcttgaacttggaatttcaagccctgagttcatcatttttctttactttgtctaccacagttacaagcagtcatcctcattacatttattagtttgactaaaatattttaagctatcatgattacctagagatttgccatttatgaatatttgattaggaatccagtagtaatattttacaaatctttttaccgtattacaccatagactatcattgtcttctttaccactggaaagagtacttatgccttaaaatataatcaatattttatattgattgtcagaaacccaataccacaaacccagatccagttttttgaactggtaaaacccttggaattacaccagttgctagcagtggaaacaagcaaaagcattgcttaagtactccagagattttgttctttttactttatttgacacaacctggaggcagactattgagggcttgcacggtggctccatcatgctgtccgttgtcccaattttcctgtttcttttttatcttttcttaaattattgcaccaaacttactctccagtaggtggctttcaagaaatacttcatatttaaatgcccatgccctcatatttgcttctgcattcacagatgaaattaagtttcttcttaaaagtttcaaatgcgtgatatcttgtgggttaaaccactgaaaagaaaacattagacatctgaggttgccctggaagaaccacagttctaattgcttaattctgggacaattcttcagacaattcagataaaaggatgaaatagctactatgtatactccctgcagatatagcaaaggacccaagcccttgtcaaatccatgaaagaacttgcctagtagtctgcagagctgggtgcctggcatctattccgttttgtgagttcttatactgcaaggatgttgcacacagccaggattatgttatatacagagatgtgtgtgtgtgtgtgtgtgtgtgtgtgtgtgtgtgtgtgtgtgtgtgtcagagagagagagagaaagagagaggtgtaaggtctgaatcaccactaattatacctgcctgctcctgaaagcaggacgtgcaggagtgggaatgacaaggatagggtggatgtcatagatacacaatgaaagagagcatagtgtagatattttcctccaaataagccactagatttcttcttatctggcaaagtaactgctagggaacatgtgaaaaacataagtaaaaagaaacaaaaagagaaaagaagagaagaaaccaaggatgaaaacagcagaaatgacatcctctgcaaatgcagagaaggagggagaaccttgaatcacctataattacccctgcctgctcccaagagttgtggttttaagtatcacctggcaatgaggcaccctagcagtaagctttctggggactacagaaggacaggaaggtgctgcctaaaagaaagaagacaatgtgctgaatactaccttacaaaacatgggagacaagttttgatgctgttctagaaaccaaaccattgccagcaaaacttctggctggcttctctcccagtgcaaatggcttgagctttcacagtcactgagatttcctaggcaacaggagtgtaaacttgagaaaaggcagaaccagagtagagattgacagtgagctgagccaatcaggctgtgaatctgcagcagtgatcccaggtcctccaattaatactaagagagtggaccagggcccctgaggaagacaggtaagagggaggaggctaaggtggcttgggagggaccagttttcctagatgcaggagacagcgtccatagttt

SEQ ID NO: 33469 - DNA, 2300 bp, Homo sapien
cgtcaatagagaaaaatgatgagacaagcctcaatcattttaggagatttatttgccaaagttaaggacgcgcaccaggagataggtctatgcctttctccaaagatgactttgagggttctaaatttaaaggggagagggtgggatattgagaagtacacaattttcatgtaaggggtgggtagggaaaaatagtcattcatgcctttgtctggctcagtgaatctgcatttttttttttttgagacggagtctcgctctgtcaccaggcttgagtgcagtggcgcgatcttggctcactgcaacctccgcctcctgggttccagcgattctcctgcctcagcctctcgagtagctgggattacaggcacgtgctaccacgcccagctaatttttgtatttttaggagagacgggatttcaccatgttggccaggatggtcttaatctcctgaccttgtgatccacccgccttggcctccaaaagtgctgggattacaggcgtgagccaccgtgcctggccaccttgcattttttatataagatgatataaaacaaatggagcagagaaaaaaaatgcagggaatctgcatttttacataagataacatagacaaaattgggcagatatgcatttatgtctggtgggctgggggtgactgcacctgtaaaaataagctatcaatttgcattgccacggtgaaattttaagagctcactaggaatttccttgtgggcaacatatgggggaggtgtgtagctttccatcttgtagccatcttatttaggaaccaaaagggagacgcaggtttgtgtgacccagttccaagcttgacttttccctttggtcaaatgagttttgtgtccccaaatttaatttcctttcataataacataaaattctccaaagcaacagtaactacttaatatcatcaagttttgtgctcatttttctctcatactcctataattttttagaattggtttaaatcatactatttaatatgttaacacttctaatacctgacctttcatatctctttccttgtttgttttctcttggcagcatttctcatgaatatattatgtatttcatttcttattgtgtttagcctctgtctgtccagcaaacatatctggtgtaataattagctgtcagaataattgttgaataaatgaagagcttgaagcttgatagcaagtcctttattttgctaatgcattataaaaggtataagaatagatggactggagtcttgtgaagcctggtaaaccttcccccctccacacttctctttccccttctccctttcgctcccccaacccagtgtgtgtgtgtgtgagtgtatgtgtgtgtatgtttgtgcatctgtctgtctggctctctctctttctcatttcctccctctccacaatgaacatgtctaggtgaaggatgcacaaatgtaatgctttaaataaaatgtaatgctttaaattcagattaaaaatgtaatacctgtagactgaaggcaagaatagtacaagcagaattcaagggcctattacagccggtagatataatccattgaaggatttctctgtctgtctagaattgcactgaaagcctttccgaaagtcttggtttgaggatagagagtacaaaggtgaccatacctggtgtagtgatccctgtctttcccagggttgacccttcaagggggcagaattacaagctattctcagtttgtgctttggggagattatcaaaatatccctagttctattttatgatacacattcagaatcatagtctctgtgttcgaatttcagtctccaggtacagacccggagtgactttcagaattagaacactactagctcctcttcatgaatgttatcttctaaagaggccctcagagagggtagatcagtttcccttagggattccctctcagggacatcttgagcttgggacaccagctagagattttcagcaggtttctggggaaaatgggggcatggagatggcactatgaggtaatagaggcagctggaagggaagcagagtaacataagttcagacagctccacgaaagacaggtggtttccttggggatggagccttcattaacgtgatttactgaggcccctgtcattcctggctcttagtaaggattttccagataggacagctgtgattacgcaggcagagaaaggttacagatcaggttaccaaccccctcctactgacttcaggtagtttgatagggtgagggcagattatcccatggagcatgcacccagggaggaggggcagcg

SEQ ID NO: 33470 - DNA, 2300 bp, Homo sapien
attcatggagtcccagttagactcccagcaattttttatgatacacaaaaatggaaacaaaaaagatggtggaaagatatcttcaatgtgctaaaaagaagtagtaaatttatcttttaattatgaggatgaaaaaagtcactatcagggaaaagaaaaggagaaaattctcactctctgattctcaatagaggaaatgctataggatgtactttaggaagaggtgattccaggaagaaggtcagggtggaaagaaaatacaaagaacaacaggaatgggctgggcaccgtggctcacatctgtaatcccagcactttgggaggccgaggtgggtggatcacttgagctcaggagttcaagaccagtctggctaatatggtgaaacacatctctactgaacatacaaaaaaaaaataagctggttatggtggcgggcacctgatattccaggtacttgggaggctgagacaggagaatctcttgaacctaggaggcagaggttgcaatgagtcactgcactccagcccgggcaacagagggagaccctatcttaaaaaaaagtaaagggaatggaaaatacatggatatatctaagcaagcattgggaatataaaatttaaataataatatatgatgaataaaattattgttatatataatttgattgggtgcagtagctcatgcctgtaatcctagcactttgggaggctgaggcaggtggattgcataggctcaggagtttgagaccagcctgggaaacatggtgaaactctgtctctacaaaaaatacaaatattagccaggcatggtggcatgcacctgtagtactagctactcgggaggctgaggtgggaggatggcttgtgcctgggagagggacgttgcagtgacatgagatcacgccattgcactccagtctaggtgacaaagccagatcctgtctcaaaatacacacacacacacacacatacacacacacgtgcacacacacacacccctttcacaatatagttcataataaagtttacacattatatattcccatggtatgatcacttagcttcaatctttgtaccacagataagtattgaagatgttaaatggcatatagaggcattaataaactacacccaaaaagccctaaatgatagctgcacgagtatctctttgctaaataatgaagtcatgtttatgaggaaagctgtgctgccaaatcttgtggctttaaatatacttaagacagcccaagggggaacccgcactatcataaaaactgaatgttgtgtttatattccagatgaatctaagaacataacctaacttatgactaatatgaaaacccagataaccaacctgtcagatccaaaaccctcactaatcaattggttaaatggttggtttgaatctttgggaacttggtggcagaagctaagtgatcatatcatcggaatactgaatgtatccaacaagatttaaagaaaaaaggcttgctgattttggcagggtttgaattactcgtccttgtacccaagcataacctaaaaaacatcatcctaaccaccctggaagtaaccacagccataaattagtgccacacagccaatatgtcccatctggagctactcaataaatacctagtccctgcacccaatcagtggcatgccagtcagtgtctcgtaatatgataatgtggtcacagcattctccagctatccaccccatatctcctgtactttttggccataggttcttcgtgtggtttctttgctcccagtacaaagaagcattttggctgaattggccaaatgaaggggtgagacagataaatccatcccaaatttgcattatcccattttgaaaatgcgctgttgtttggggtgtggttaccacttcctgtttttgttgagaggatgctaaagtgagagctaatgagatgatccttcccattgaaatacttttcctatgtcccttgttcttaaacatgtttttaatgggccaattctatatattgtcttttgttatgccgttactaaggataccagaccctttctgtgatgtaataaatttttggtattctatccagtcctgaccttggaagggggatacccaccatggtagaccagagccactggaaagaggcatgagtccacatatccagtaggtgtccttttataatctgtctgcataatcctgagcccattatagaaacaggttcatttcattggcatctgtgattggcagtggcaagaagatgtagggacataggatcaatgatagcaaggttgtgaaattcacttca

SEQ ID NO: 33471 - DNA, 2300 bp, Homo sapien
ttttcttacccagtttaatatttttaaggacaggtatagttaagagtgcattcttaaaatactttaatttattagcttaattttaaatatgattaatgaactacagtctaaacattcttactacattactggcttttttttttttgagacggagttttgctcttgttgcccaggctggagtgcaatggcgcgatctcagctcactgcaacctctgcctccagggttcaagcgattctcctgcttcagcctcccaagtagctgggattacaggagtgtgccaccatgcccagctaatttttgtattattagtagtgacggcatttcaccatgttcgccaggctggtctcaaactcctaacctcaggtgatccaccctccttgacctccaaagtgctgggatacaggcgtgagccaccgcacccagcccattactgaaattttcaaaaacgtttggcaacttttcctttgttatgtgaatctttaaaaatctacaacagaggatgacttcagccaatctgcatatcactagtgagggaccttctctaactggagggcaatgtacaggttacaggtgtgtcagggaattgattatctcagtcttccttgcagccagtatgtttctgatatctagagctcttgcacttactgcagctggcctaggcatcctcatctatttccccaaaattctgtaaaataggatcatattctctgcaggcattattgggaatacattgcaaaagaatcgtccctttgcataggcatatgtcagtaaagctttgacattatcttatctgaataccccagcctgcattgaggtggaaagaaataataataaataattaaataaaaataataatataaataagtaaacaaatatgtaaataaataatatataaaatatgtaaaataacaataacgaataaaagtcaataataaaggaataataataaagaaaaaaataatgcgtttcaaaaaccaggttccttttgcttttattttttccattgcttaactcctaggggtagaaaggtggaattctcattttcggctgagatttttggctgtaatataatcaaagagttccttgactgaggcaatctctcattgcctcactatgtgcaaacacatagtgctaaaacgtagcacatatcatcaatattgataaactctatcatcaagttacttacacaatttggttggataaataagaaaatcactcataaaaactccatgtgtaaatgagggctaaacagagtgtcacctaatttatcaatgagatagaactctgagatctgctgctctgagagatggctcccagagtagaagaccttgagtcggcattgatggtggttgggatttggataaggagagaaaaggggaagggagaagggtacactctagggagtagaaacatttaagccaggataattatggcagagggtatttgtgggaaactggttgaatttgtgggtgactgctagaaaggttgttgctttcctgggatattttctttgtatctcaagatacttttatgtactgtaaatttaacacttcccatgaatatttattatcatttttttcttacagaggaaaatttgaaaacttattaaatgttctagaatacttggcgttgcagtgcagtcattttttaaatagaaaggatatcatggattccttaaagaatgagaacttcgacatggtgatagttgaaacttttgactactgtcctttcctgattgctgagaagcttgggaagccatttgtggccattctttccacttcattcggctctttggaatttgggctaccaatccccttgtcttatgttccagtattccgttccttgctgactgatcacatggacttctggggccgagtgaagaattttctgatgttctttagtttctgcaggaggcaacagcacatgcagtctacatttgacaacaccatcaaggaacatttcacagaaggctctaggccagttttgtctcatcttctactgaaagcagagttgtggttcattaactctgactttgcctttgattttgctcgacctctgcttcccaacactgtttatgttggaggcttgatggaaaaacctattaaaccagtaccacaagtaagtgaaccctcagcattcagtttgggattcacgcagaggccttcagtgcatagttggtggctgccacttgccagtaggatcctgaggctaaagtcgggataggcaagggaggcacctagggcatgcttttaaaggaagtgatgagtttcagtgttgtgcaagtataatgttaggcctt

SEQ ID NO: 33472 - DNA, 2300 bp, Homo sapien
ttccttccttccttccttccttccttccttccttccttccttccctccctccctccctccctcccttcctcccttccttcctcccttcttttttgacaaagtctcactatgtttcctaagctggagtgcagtgctgcgatctcggctcactgcaacctccatttcctgggttcaagcgattctcccacctcggcctcccgggtagctgggaccacaggcacatgccaccatgcctggctaatttttgcatttttagtagagacggggcttcactatattggccaggatggccttgaactcctgacttcgtgttccccccacctcacctaccaaagtgctggggttatagcatgaaccactgcacccagccagaatttctttataagatgtttataaccacaattacatagaactcttctccaaagcaacaataactagttaatattttcaaaatttgggttcatatatctctgatactcctataatattttagagtccattggaatcatgctatgtaaaacgttaacgaatctgatacctgactcttcatatctctttccatttgatttttcttagtaacatttgccattaatgtactatatattttatttcttagtgtgtttagtatcagtttgcctggcagaacaatgcctggcataataaatagctatcagccaggcgtggtggctcatgcctgtaatcacagcattttgggaggccaaggcgggtggatcatgtgaggtcaggagttcaagaccagcctggccaacatggtgaaacccagtctctactaaaaaatacaaaaatcagccgggtgtggtggcaggcacctgtaatcccagctactcgggaggctgagacagaagaattgcttaaacttgggaggcagaggttgcagtaagctgagagtgcaccactgcactctagcctgggtgacagagcgagactctgtctcaaaaaaaaaaaaaatctatcaatataattgttgaataaataaaaatcttggagtttgataacaaatcctttattttgctaatgcattatgaaaagtacaagaataagacgaactggagccttgtgatgtctggtaaacctcgcccttcccacacttttctctctctctctctctctctctctctctctctctctctctctctctcctctttctccacaataggcatggctaggtgagggatgcacaaatgcataagaatgtaatgctttaaattccaatgagaaaaaataacccctgtagactgaagaaggcaggaatagaacacgcagaattcaaggacccactgcaaccaaggatttctctgcttatttagagttgcactgaaagcctttcctaaaggaagtcttagtttgaggatagagagtaaaggggactaccggacctggtgatccctgacctcactggggctgacattgcacggaggcagaattacaagctgtcatcagcatgtgctcttggaaattatggaaagattcaccagtcctatttcaggatactcattcagaatgatagtctcagcttttgaatttcagtcctccagggacagacctggacttccagaggtaggactctagcctcttttcaggaatgttaccttctaaagagacactaagagatagattccagggatggtagattgatttcccttggggattcccttccagggaggtcttgggcttggaacatcagctcaagattttaagcaagtctctcaggaaatagatcgcggggctggcagtatgaggtaatagaggcagttagaagggaactagagtaggtaaattcacacagcctttgcaaaagagaggtgggtcccatggagatagagctttcatcagctcgatttactgaggtccctgccattcctcactcacagtaaggattttccaggcaggagggctgtgatcacaagggcagagcagggttaagtatgggctcaccgacccctcctactgactgctggtagtttggtagagcgaggatagattatccaatggagcacgagggaggaggggcagagggcaagaggggatggacagaagagaagactggcaggatccttactcctacctctacccacagccagtgcctttggcgcactgaggtgcacagggtcccttagccgggcgcagggcgcgcagcccaggctgagatccgcggcttccgtagaagtgagcatggctgggcagcgagtgcttcttctagtgggcttccttctccctggggtcctgctctcagaggctgccaaaatcctgacaatatctacagtaggtgagtgcttggc

SEQ ID NO: 33473 - DNA, 2300 bp, Homo sapien
atcatgtgcacgaaaatgtttactatagtattgcctatatgcagtaaaaacctaggttatatttatttgcaacaattgagagtggttattgaattgattaatctcccagatgtgtcttacatcccctgcccccttctttttacatctctcactctgtcatgcatatattctagggtctaaaaccgttgctggttgatttataattaagtccttttggataatatacttggagggtaagtttctgctttcagctactgactagattttacagtacttacaaattatatggccactcccttttaatgtattcttgttttcctctcttcctttattatttttgatgcctcagatcatttctttatgttccctttttaggtatcagcctggtggacgatatctctcgatgtctcgcagtgacatatttaatgatgtttaaagtctgaaaaagtttgtgggaccactaaccaaggtcaacacatcagttcagtcttgatgaacatctgtgtaccctagaatttcctctatacacagtgaaaagtgtcaagataacaaaaaaggcactgagaattaattatatcttaggaataatagtttaatgtgcattgaatagagtatcacctttttcaacaagatttattacatatcatttcctaagcatctgccttagaaatacagttacagtggaaggactttaagaaagatcaacatatgttaagaacatgcagttcagtttgtttcagattaattttttttcaagagagttattttaaagattcaaggaagccataagtcatactaaataatattatatacagttttgttattgtgacttacatttttgttacttctaaaaagtatattcaacctgtatttcccaaagaaatgtaagtgaatggagacctcaaataataactgtattcataaaactcgtgtcttaaaacaaggcttacttactagacataactgaatgtaaaaagtgctttttcaaatctgtttgcaaactcgtgggggatttttgcatgtataagattaagattatacttcaagtgatgcgtgtctgtgtatttagcatgtgtactataatcaggtgatatagtattccttcagtctttgtagtaactggatttttttatgcttctggtattgctttataaaagattttcatttcagaaagctatgttcacatttatcatttaacatattgatttaaatgttgattatgatattcaaggataaatcctaggcattaatgaaaaatagtttttttttaagtagtcaaagagtccaacaaaatccttcagtatttaaaggtacctgcttatactttttgagaaaaaaactggttattcaaaggtaaaaagtgaatccatttactgttattactgatacttaaatcgtggtttatagaaaacaaaactatattagaatggaaatgtgtaataacttgttggttaaacattcttactaaatagactgtttttaacctttgtgtttaagataaatttatgtattatattttaaagcactagtgttttattgaaaagtgaacatgtttgattgcagcatgcttgcagagagttttcttatgtccctagaatatttgcaactcttactgaatccatgctacatttggtgaccatacttcagcttgcctaatacagtctcagtgtaacacctagtatcctgtttattactagtgattactttcaccctcaagtatcccacccagtttgaagatgaattatatggttcccctaacttgaagttaatctttccccaagacataaatttaaaatttttatttttatttttaataaatattatcatgtaagtttttttttaaaacacagctctatgcagatattgaaaggaatagagcatcatcctcattatctgaaaattttgatctttgagtttttatgatctttgcaattagatcccttttaaaataattatcagtggatagacttactctgaattgaaggtcatatagactacacttaagaacacacacatacagtcttttcatgtgaagtgtggccagaaagcaataagccaggagcagagataatttgatcctctttgtaatttaatgattgactaattgaatacctttggcaaatcatgtagctcttcagtgcctcaagtgcttcattctgcactttcatttgcagaatgaagatgatacttgctatttacctgctgatctaccttacaaagccattgtgaggaagttgaattggtgtttatgtactggagtttataactgtgctatttttcctagtgatacttgaaggtat

SEQ ID NO: 33474 - DNA, 2300 bp, Homo sapien
caacctctatgtacctactaatctcgtcttcaatggacacaattccttacgttaaaaagaatctaatgtaccaatttaaacttgcatttattatattaaggcaatagtcatgattagaaggaaggcaaaaaaaaattattcccatattaggaagatgaagtatgtctgttaccggggcaaactatcaaactgaatttcaaaactgacaggctctccctgaagtcctagagaggatcttgtgttcactaattcagatgttgcaagtattctagttcccaggtaactcctagtaaaaccaagactgaacaaagatatttctcatctttaaatttagaatcatctcatcgattaaaccttcctatctatgagatctatatctgaagtgggctctcccaattattttacatctcaaaactgtttattctcattatggcatcttaaatatttttgtttattctttctcctccattagcttacaggctctctctgttttgttccctttcctgaaggaaactataattttttgtgtcaaaaatattttctcctatgagttgcaatcttcagggaaaggacgtagcttcaaacaaaggcaaatgctttctccttagccaaagtaacataaaggtcactttctgtaaaacatcaggatattgcattttaaaatgctttccatataacattagtttgatgaacggcttagcctaggattctgcacctagttccaatcaaaaccaagttgtgaacagatcccttctttacaccaatctcatctttcaagaacgagctaaaggttcatgaattccttcctcaagaggcagttacttttcaagctaaggaccaagcttgaaacaagcatatacctgcacaagggaggtttaatttcactacagagcgaatcattttttcaaggaaaccagagggtgtgtcatacagcatcactgaatattctaatatgcgatgaagctgttatgcttccttatgaactttataaatcttcatttttatgaggcttagaattcatcccccttccctcttccactgttttcccggggtcacagttgtagtatagtttgcccaatggatttcgcatggtcattgtacctggaatatgtcacgctccctactcttactgcccccaaactcttctcagcagagataggctgaaagcagctcgcttttaggcggcgacgcaaacacacgtagccagctgagcgacagcaagcaaccaaatggctttgctggaggccccctgcgtgcacgggtaaagctcgttgcaaaatacagtcctttcatttattcccatgttgctatttatgagacctgtcaaggctgcaagggcatgcgcagccttcccaccacacaggacccgctggggtctccggctcccctaaaattaaaccattgtctctcgttccaacggcgtgtttagctgttgtgcgttattttacagataaaggaaggatcccgtccacagacccaattcttagggccgccttctccccgacggaggaagaagcttcctggcaaaaggacgaacaggtgcgacgccagcagttcgcagcctctcacctggccggcgggctgggctactgtcaccactcagcagccaaggacttgggccccgcagcggcggccactcggggtctgccgggtcccctctctttccgcctgctctcggccccggaccccagactcaaaagcgcctcacgcgttccgccttaggctcaccgtccgatctcgccagacagcgtctggacgggaccgggaaacggcggccgccacagctgtccaggttctgggatccacgctcagagacgacagcgctggcgatcaccagaaggcctgcgggctcccgagaaaggaaaatccgtctacagtccagcggctgacatttcccagtcagccgtagcgccgcccgcttccgcctccccgcctaccccgtgggccgaccagtcccgctcccgcggggggttgtgggtatctcgaaggcgggtaaagctgcaagggaaggaagtaagggcgagcccgtcggactacgaagcgggacggaaactacaattcccagcaggccttgggcctcagtgcggccgcgaagcagagcgggctgtagagccttgcgcgcgcagtggggatggaacgttgctaggcttagcgggtctggctgctgggggcccgagcagcacgctcggagccgccgcgcgccaaagcgggaatctgggaggcgagcagctctgcagttaatgcacgtattttaaactcccgggcctgcggacgctatgcacaggtaaacggattgcaaa

SEQ ID NO: 33475 - DNA, 2300 bp, Homo sapien
tcctctatctccagcacctggaacacggcctagcacatggtatgtgctcagcaaatatttgctgtattactgttttaaatagcttactagtaagaaaaactgataaccccaggtcaatgccctgtttatcctatggcttttgcatactccagggttctggttcactctgggaggcactcgttcgcctgcttgaggaactaggggatggggagctattaaggagggaagatacagtaagttctacatttcagtcaatccattctagttcgggggatagacctggggagaagaaggttggaattatgaatccactccaatagttcaggcaagagacgacgagaacttgagaaatagttaccagagaagagggaaagatgcgatgaatgactggatgttggggggcggtgggaagctgactgactctcaggttttcgggttgggtgattaaacagatagtgtcagcagtaatggagacagaacataccaggagaagccaatatgggggtgggagtgggcctggggagatgtctcccccacttaggtgaacgttcacttcgcagtccactgataaataactaaagtgattaaggcaaaaagatcactcaggggtacaaagcaaaaggaatcctacaagaagaccactgtttatgtttctgttaaacggtgaaactgagctggccttgaggcaggcagattcccttctaaggaaaaaggcaggaatgtcttctcatgggttaaaattttcaaggtgattatgcaccagaacatacatatatatatatatatatatatatatatatctaccaagattcctgcatacttgacgacttgccctattttgttgaaaaatagcttcagaattaggcaatcttaaaaggaacccatgctaaagatctctgaacaaaggtttcccaacaacatagctaaatccaccctttgcataactgacatttttaccctcatgtccttacctggaaagttctctcgatttagcttaggcctgcggacaatcacaaagtctttgtcactccctttgctcttcagccgtttccgtggggggctctccgggtggcccaggtttgagagcagttcctgggggatgttctcactgtcgggctcctctttctccagggcggagacccccatgcctgacagcagttcagaagtcttgctggaatcccatccccacgtgaagctggtggcaacgttgctactcaggtctggaatctcctggaggtgcttcctgcagaagtgcacaatacccccggttcctttcgaaaacacacccataaataatttcaaggcaattaaagaagctgcagtttatgcattgtaggaaaccttcacagcagctaacagaatcgcattttttatgtgcctgcggcgagttaccaagaaaacgaagaaatgaaaagaacaaatcgagaaggctttttgacttacgatcctgcagaaggcctcaagaatttctcccagtggagggaacagacaaggagagagacagggcaatcatacactgattgaaaacggtggcagaaaagcccaattagggaagccaaataaaaccacacgctgatccccgcactaaggcatccatccattcacactttccccaagaaggggctaagcaaccattcacttaacagcattactaacaatattagccagtagcgatattcgcggcctaaaagaattattaagagggtccatttcatgctcttcccctttttgcaatccgtttacctgtgcatagcgtccgcaggcccgggagtttaaaatacgtgcattaactgcagagctgctcgcctcccagattcccgctttggcgcgcggcggctccgagcgtgctgctcgggcccccagcagccagacccgctaagcctagcaacgttccatccccactgcgcgcgcaaggctctacagcccgctctgcttcgcggccgcactgaggcccaaggcctgctgggaattgtagtttccgtcccgcttcgtagtccgacgggctcgcccttacttccttcccttgcagctttacccgccttcgagatacccacaaccccccgcgggagcgggactggtcggcccacggggtaggcggggaggcggaagcgggcggcgctacggctgactgggaaatgtcagccgctggactgtagacggattttcctttctcgggagcccgcaggccttctggtgatcgccagcgctgtcgtctctgagcgtggatcccagaacctggacagctgtggcggccgccgtttcccggtcccgtccagacgctgtctggcgagatcggacgg

SEQ ID NO: 33476 - DNA, 2300 bp, Homo sapien
cttggatcagttgatagattttgggggagttagtgaaatttcttgaggggattttcaatcgaatgcttttattttctgtggcagtaatgatctggttggtttatctcataaataactgatgctgctgctttttgtgttctttgatgtctcaccttatgtttttactaagtaaggacagcaatggattggcttctgatgctgttgaaaatagtttaactactgcaggtattagaactcacttttaaagattttatgacatagaccattaggcagaaaggaaatggacatttattggatgcctgctgtgtgtcaggcactgcgtatattgtgtatgctatctcatttaatgctcatagcaagcctgtgagaaaggtggttgtatttattagtgacaaaattgagatttggagagttcaaataactagcacaaggtcatataattagctagcatcagaactgtaacataaacccggtgtttctgattctagatcctgtattgaggcttcactatgctctgaaaacttaagtgccttgcttggaaaatatgaagtgcagcaatattattcctgcctcatttataatgttcttagatttaagaacattttaaaggcccaattttgttttcttttctcctatttgttctaacctagaatgtcttattcttgggctgtagcagtggacaatttaagaagaagtatacccactctaaagggactgtgagttttattgctgccttaaaaaaataatttccctgaaacaaaaattctatgaactgactaatcttgataaatcttgcatgtgagaatgacactaaatttgctcattattttgggctgagcatctctcacctgactgtacttgtctttctctctgcctctgcttcttttctacccatgcccccttacctctaatctcttttgtttctacttgattctggcatagtagcagccacttctatggatttggctggcttgtctgtacataataggctcctaatgtgtgttttctaggaagacataacaaagctatgaaatagattaaatgtgaatattaggcctgctatcttttatttttaataagaaattctgactatagagaaaaaagtgaaaaggagttgtattatgcaaaacccttacaaattaagagcttacaggataaactgtaaaggttagaataagagataaattatccatagtgttagtgtttgcaagcatgtccagtaattattttgaaaagttgtattttattacggttttatcgtaacttttttatttgctggagaaaaaaattcagtgttgatcagtgacaccattattttaagatagagtttacaaaataggcttttagacattgcaaaagttctttgaatagttacaaatcatttatgtgttcatggagttaaagaatagtgccatttttgctggtgccagaaaacccatttgatttcatattaatgaaatattttaagaaatgtaaatcccaagaaatttatagttctggtttatttctagttttgtccactaatccagtattggttgagaattttctttacagctttattatctaatctctgttagcttactaccaattcaaaaggtacattagcatgtaacttaagaaacaagagtttagtagaaactattaataactttaagaattagaatcagctttaaaatatatcaaggactagctaccaagaatgaaactcacttaagaatagtattttctttttttggattcagaaatgaggctctgtatatgttagattccataagagcaaaagcacaatgctagctaaaaatttgcaagaagctcctatttgaaatattaaagtattgacagaaaggaatatataaatcagacaggcatgcagacatgtagtttttttttttttaatttcttctaactttttcacttaatcagtattggaattagcatcatgatgtgtgtgcctactaagtcaagtatttcttgggtaagctgacttacttaagatttccttagttctgaagaagactctcttatttaccttgaaccataagctcagcaaacagttttatattctcaattcacagggcttcctactatgagatttcagttgatgatggtccatgggaaaaacagaagagttcagggctcaatttgtgtactggaacaggatcaaaggcctggtgagtaacttgggatgttgcttatcaagttttgtgaaatacttttagtaatgtaatattttggcccatctaaggcctgtaatatgcaagaggtgtcctggtggtgttatgtaggtaggccaagtttct

SEQ ID NO: 33477 - DNA, 2300 bp, Homo sapien
ttaggcaagagtctttgaattgaaaggacccacaaagtgtttcacataattaatggtaaaatgttctacaccaaggtttgtcagaatacaaacagctactgcaagcttccagagaggaggaggagatgactggagcagattatttcatatacacttatcccttggtgtctgagggggattgggtctaggaccctctgcagataccaaaattcgaggatgttcacatccctcatataaaatggcatagtattggcatataacctatgcacatccttccctatactttaataatctctggatgatgtataatacctaacacaatgtaaatgctatataaataaagactggttttattaatatagagagatgaattggtttaataaacaaccccagaattcagtgactgaatgcaaaagcttatttttaactcatctcactgtccaaggagttttcaggcaaccaaggctgctgccaaatagtggctgctaccgtattttaaggcctctgagtcttctgttggatcctctgcatcttgtggggagaaaacagagaacatagaagatcttatgggaagttttaggaactaggccttttcattacttttgtccacattctgttggccattactagtcacatggctccacctagtgcaagtagacctggaaataaagtttagcaatatgacagtgtgagagaattacacagtgtagtagtttgtgtcactagtattacacttctgtgtttaaaaatacaaattataattttgtaatctattctcttggataaaaaagtaatcagtggctgggcacggtggttcacgcctgtaattccagcactttgagaggccgaggtgggcagatcacctgaggtcaggagtttgagaccagcctgaccaacatggtaaaacctcgtctctactaaaaatacaaaattagccaggcgtggtggcgcatgcctgtaatcccagctcctcaggaggctgaggcagagaatctcttgaacctgggaggtggaggttgcagtgagccgagattgtgccatcgcactccagcctgggcaacaagagctaaactccatctcaaaaaaaaaagtaattggtatggagtcttatcttttcatgtcccattgtggcaagttttaaatgaacacagttctgtgattagataaggtttagtagtcaattagtatgaaaaaataagcagaattaagatgattaatgagatttgaaacaattttatttattgtcaaactcatttgacaaaagttttgaattgaaattgaacaagcacatgtaataaaaatgtaatatggagagataaattaggatgagggaaaatgggaatagaggtggaaagtcaagaccgcataaaagggaaacatggttacagtttgatggtgagagctcaaatttactggtaatatttcatgagtacctattgttgagcatttgtaggaaatctgtggggatagtaatctaaaacaaatttcattagtaattaaggaaaagtaatttaaacaataaattttagccatttatgtttgtaaaactgtcaagaatgagaatgtgaatatatgtagtacctaagacagtttaaagccagttttattcttatgtgcaatcaaatttgattaaacatatcaaatccatatatatatatatgcatgcatatatagctttttgtatcaaggtctttctctgtattatgaagttgagctgataatttaggtaaacaacaagtgctccaagggtacttggtattgtaatatcaacttgttatatttgaaagaataattgggttgcctttaggcagttatagtccaaaagaaatgagaaaaatataatgttccatttaataaacataataaacagaagaatataataattaggctacaaagtcaaaggagaagaatagatcaatgttgtcttggtgacagtggtggttttattagtgtatttggtaactatagtgtattaggtaactattgttgtataacaaatcactcagtttagcatcttaaatgtaaatatttatgacctcacacagattataaaggtcaagattctaagagtagcttagctagttacttctggtttaggcaggaggtgacaatcaagctgttggccaggacagcagtatataaagacgactggaactggagaacacacttttttagctcatcacatggcttttggcagaaggcttcagttcctcaccatgttggtctctccaaagggttgttcatgttatctcttcctctagagcaggtgatctgagagaaagagagtggccaaggtggaa

SEQ ID NO: 33478 - DNA, 2300 bp, Homo sapien
actaaactgataaggacatgtaacgaggttaagaaagtagagacatgcctgctatctcactgaaggagaaaaaaaatttctatatgcagttatattataggccaaccaatatttgtcagggtttctctccacaattccaactggactaggagaaggtaaattagacctatttgtgactcagctaatacattacttttaatggctactgttatatctatggagtaatccaaacattatctgatttgttctggttttttgtgtgtttgtttgttttgagacacagtctcactctgttacccaggctggagtgcagtggcatgatctcggctcactggaacctctacctcctgggctcaagtgatcctctcaactcagccccgcaagtagctgggactacaggtgcttgccaccatgcccagctaacttctgtattttttgtagaaacaaggtttcaccatgttgcccaggctggtctcaaactcctgagctcaagtgatccacccgcatcggcctcccaaagtactgggattacaggcgtgagataccgtgccctgcctgatttgttctgttttttaacagcattattaatggcacatacttattaagatacttacataagaacaaccgtaagaaattcctacctgaactcaccacgatagaacttctgtaaggcttctggaaaggaatgtgtatatcgaacgggcaggcataaatgaccctcagacctatattttaacaggaattttttggtgatataaagaggaaaagaaaaaaggtgaagcaaaaaaatttaatcaaaaggtatcactaagctataaaaataagaaatgaaattctaaaaatgtctaccctatattccattttttgccacaaaattgtgttctttaaataaaaacaaaaaagaccagatagaattagtagtctacatccagctttaatgccataatacataataatatgtgagtttctacgttacaatgaaactaaaaatagcagcaaatctgctactaattaccctgtaaagttatttaatggtacagtgttgttcaaatcattatttaactactaaccttccaatttttattctaacctttaaattatttaactattaactttgggcaagtcactttagcatcagcttcctcatctccaaaatcaggataaaccagcaatctcaaaaggaatcaaaatatttatgtgaaatgttttgaaccataatcctttctgaaatgtcatttaagatatcctaagtcactaaaaaagaactgagaaagcttaatccaatgtaatccttcatttattcaaaaatacataaataatgaaactcctttaaggagttcatagcttgatgtggaagacaaattaaaacaaaccattgcaaattataaggtggtaagattgcctattggttggtgtagatgagagtatgtggcacctaaagatgtccagaaggctcagtcatcatcatttaatgatactccaatcttgaagaaaaggctgagggtaggcttagcaaaacaaactcctgataataaatgtaaatcaacttgtaagcgtgaagggcacagaaaagtgtttttacaaagttgtgaatagtcaacttctttatctaagcaggtcaacactgaggttaagaaagcgtaaggcctaggtttttaaatttttatattcattgtaatagttcacacaatgttaagtatataaaaggtatcaacagtcatttgatagaataatacctgctgaggtcaactgcaagtctaaaacccttgcagagagaagactttctcatgaggttacagtcagatatcagctagggcggcaggcatctgaaggcttgacttggactagcacgaccacttccagggttgctcactcacatggctggcaaattggtgctggccattggcaggaggcctcaatcaccctctacgtgagcctctccacagagctgcttgtgagtatcctcacatcatggtggctgtcctaccccacaatgaacaatcctaaagaccaatacagatgctgcaataccatttatgacctggccttggaacctacacattctcacatcatattctactggtcacacaggccatccttgattgaatattggggggcagggaggagtacattaaagggtacctaaatactaggaagctaccttggaggctgactaccacatgccctctatcccattttgaatattaagctttcaaatgttgtaattatttaccaggctcggtagagtggctatagaatacagaagagatggatagaaattacacatttgatttagatga

SEQ ID NO: 33479 - DNA, 2300 bp, Homo sapien
aggtccgagatttcaaatatgagcaacaaaactcagactttgatcccaaacagtttctccctacgcatttttttttctctatcgaatggatcaattaacattcccctgttcaccctggcctcaaacctaagcgtcatctgtgatttctcccttttttttttccttcctaatgctaatgaagtttaaaatagtaagactacaaaggagtctgaggatagttatagatgttacctctagaagctcaggttattaaggttgttacactacacgtcactattagcagctgctgtgagggaaagttcttggtgagaacgggtcagtggtagaactttaccaagtaaacacctatcgggcttcattgtgtatgctcccagtccaatacactacctggcacacagcaggcacaccgcgggaacccacgaatgaacgctggtgctggtgggcccgtgaggagagtcatagattcactgaatcgatttggacttggtagaaccttggggtcaccctaaccccctttttacagatgaggaatctgaggcccagaaagatgaggtaacctgcccaaagtccagaagcgacgtagcgccaggactacaaaggagcaaacacagtgccaggggaaggggatctaaggagctgcggaattgaacagcaggatgtgcactgccatgtggttctccccttacaatgggacgtttccttctgttctcgtcacaccccagcccaggtcctgatcactccacgggtcattatcccaacagcatcccttcctcctcttcttgcctcccaagctacccaagattccaaagccagatcaatagtcatcaaacattgctttaactcactcctttccagttaaaagctttcaaagaactaattcatttggactttgtcctataggtagggctcttcgggggggcagggggcagcggggcgggcactgggtcccacgccgagaggatttcgtgccaagccacgcacacggtgcagcaggagccgggtccgcctcctcagcccccagcccggccccagacacaccagctatcacaccgaccctggtcaaataaaccaatgggcacgtggtcggcctgcagaacagaacccaagcgagcatatgccaggaacctgccttcccgccagccgctcaaaaccccacccgctggccccgcgccgcctcagaccggatccagctggattcctcagggcgacgcaatcgcctaacagaattctacctctttctcaggccgcagccaatggcgcggcccctcggatccggagccgccgcgggctctgattggccgatagagttagcctgggggcgggagaagagcgacctcggggaagcgtgtggtgcggggaggtcgcccccgggcggcgaagcagccattatgcaggcgtgagtgaaacgaataaacaaacaaacaaaacccactagctggggcctccatttcttccccgcccacctttctcccgcgtggggtctcccgtttcccaatcgccacgctttccccgccttcgtcaacgcctgggtacgtccccctagccgcgtgggccacgcacgtcctggcacttaacctctgcccgtccggcgcgaagttagaggcccgggcggcgcggacggcgcgcactcccggcggtagggagctgaggcaaggggcccgagcccaagcccgcggccgcggcccggcccacgatgacttgctaccgaggcttcttgctgggcagctgttgtcgcgtggcgggcggccgggcggcggcgctgcggggaccgggtgcgggaggccccgccgcgcggccccggctgggcggtgacggtggcggccggcggcacctggggcaggggcagccgcgcgagctggcgggctgtggcagccgcgcggacggcggcttccgcccctcccgggtggtggtggtggccaaaaccacccggtacgagttcgagcagcagcggtaccgttacgcggagctctcggaggaggacctgaagcagctggtgggtcctggctcggccccgcttcgctcccgggctcggccggggctctggtggcggctgcgccccctcggggggacctctcgggacgactcttcccagggcaccgcagatgccggtcctgcctctctcgcggcccccaggtcctctggcttctccctgggcctcctttgcctttgggcgtgtgtgcgagggagaggcagggccggggagagggggagagagagggacagtggttcatgcagggacttaggaggcaggggcgccgcggggagggcgaagaggggctgccgagtggcctcagagtgag

SEQ ID NO: 33480 - DNA, 2300 bp, Homo sapien
caggcaatatgtaaaaacaaaggcttagaggttgttttgtttttttagaaaaattttaaagatgtcatagacatgagcatatttaaatactgaagaggcaaactcatttgggagggaaaattcaagatacctgtgagaggatgccttcagaaacactatttttgaggaggtggaagatgagacgcaaaataactatggacaaagggctattccaactgagatgtcaatgtatatgtttgcagctgaaatgagagtcaaaaatctgggtttttatctgtgaaatgggaagaaatgaggtccgagatttcaaatatgagcaacaaaactcagactttgatcccaaacagtttctccctacgcatttttttttctctatcgaatggatcaattaacattcccctgttcaccctggcctcaaacctaagcgtcatctgtgatttctcccttttttttttccttcctaatgctaatgaagtttaaaatagtaagactacaaaggagtctgaggatagttatagatgttacctctagaagctcaggttattaaggttgttacactacacgtcactattagcagctgctgtgagggaaagttcttggtgagaacgggtcagtggtagaactttaccaagtaaacacctatcgggcttcattgtgtatgctcccagtccaatacactacctggcacacagcaggcacaccgcgggaacccacgaatgaacgctggtgctggtgggcccgtgaggagagtcatagattcactgaatcgatttggacttggtagaaccttggggtcaccctaaccccctttttacagatgaggaatctgaggcccagaaagatgaggtaacctgcccaaagtccagaagcgacgtagcgccaggactacaaaggagcaaacacagtgccaggggaaggggatctaaggagctgcggaattgaacagcaggatgtgcactgccatgtggttctccccttacaatgggacgtttccttctgttctcgtcacaccccagcccaggtcctgatcactccacgggtcattatcccaacagcatcccttcctcctcttcttgcctcccaagctacccaagattccaaagccagatcaatagtcatcaaacattgctttaactcactcctttccagttaaaagctttcaaagaactaattcatttggactttgtcctataggtagggctcttcgggggggcagggggcagcggggcgggcactgggtcccacgccgagaggatttcgtgccaagccacgcacacggtgcagcaggagccgggtccgcctcctcagcccccagcccggccccagacacaccagctatcacaccgaccctggtcaaataaaccaatgggcacgtggtcggcctgcagaacagaacccaagcgagcatatgccaggaacctgccttcccgccagccgctcaaaaccccacccgctggccccgcgccgcctcagaccggatccagctggattcctcagggcgacgcaatcgcctaacagaattctacctctttctcaggccgcagccaatggcgcggcccctcggatccggagccgccgcgggctctgattggccgatagagttagcctgggggcgggagaagagcgacctcggggaagcgtgtggtgcggggaggtcgcccccgggcggcgaagcagccattatgcaggcgtgagtgaaacgaataaacaaacaaacaaaacccactagctggggcctccatttcttccccgcccacctttctcccgcgtggggtctcccgtttcccaatcgccacgctttccccgccttcgtcaacgcctgggtacgtccccctagccgcgtgggccacgcacgtcctggcacttaacctctgcccgtccggcgcgaagttagaggcccgggcggcgcggacggcgcgcactcccggcggtagggagctgaggcaaggggcccgagcccaagcccgcggccgcggcccggcccacgatgacttgctaccgaggcttcttgctgggcagctgttgtcgcgtggcgggcggccgggcggcggcgctgcggggaccgggtgcgggaggccccgccgcgcggccccggctgggcggtgacggtggcggccggcggcacctggggcaggggcagccgcgcgagctggcgggctgtggcagccgcgcggacggcggcttccgcccctcccgggtggtggtggtggccaaaaccacccggtacgagttcgagcagcagcggtaccgttacgcggagctctcggaggaggacctgaagcagctggtgggtcctggct

SEQ ID NO: 33481 - DNA, 2300 bp, Homo sapien
aaactgagatttgaaccaagatccttccattacacaacactgaatgaactcaggagcgtgtgtgtgtgacagagagagagagagagaaggaaaaaagacggagaagaagagacaaggagacgaggacagaagacatcttggagatgggtttaggaagaagtcaaaaagggacatagagatgggagaaacactgttagggactggtatgttgggagacagtaaaagatttcaagaagaaatgataaccatttcaaattctttggaaagatcaatcaattaaagaactgaaaaaagtcttttgagttccaacaagatcttttggtcaccttggaaacagcagtaattagcaaagtagtggggagaagctagtgtacaacaggttgaggaatgactaggaggcagggatgtggcaatgatgaacagactactctttcgagaatcagctgtaaaggtaaggcaggcaatatgtaaaaacaaaggcttagaggttgttttgtttttttagaaaaattttaaagatgtcatagacatgagcatatttaaatactgaagaggcaaactcatttgggagggaaaattcaagatacctgtgagaggatgccttcagaaacactatttttgaggaggtggaagatgagacgcaaaataactatggacaaagggctattccaactgagatgtcaatgtatatgtttgcagctgaaatgagagtcaaaaatctgggtttttatctgtgaaatgggaagaaatgaggtccgagatttcaaatatgagcaacaaaactcagactttgatcccaaacagtttctccctacgcatttttttttctctatcgaatggatcaattaacattcccctgttcaccctggcctcaaacctaagcgtcatctgtgatttctcccttttttttttccttcctaatgctaatgaagtttaaaatagtaagactacaaaggagtctgaggatagttatagatgttacctctagaagctcaggttattaaggttgttacactacacgtcactattagcagctgctgtgagggaaagttcttggtgagaacgggtcagtggtagaactttaccaagtaaacacctatcgggcttcattgtgtatgctcccagtccaatacactacctggcacacagcaggcacaccgcgggaacccacgaatgaacgctggtgctggtgggcccgtgaggagagtcatagattcactgaatcgatttggacttggtagaaccttggggtcaccctaaccccctttttacagatgaggaatctgaggcccagaaagatgaggtaacctgcccaaagtccagaagcgacgtagcgccaggactacaaaggagcaaacacagtgccaggggaaggggatctaaggagctgcggaattgaacagcaggatgtgcactgccatgtggttctccccttacaatgggacgtttccttctgttctcgtcacaccccagcccaggtcctgatcactccacgggtcattatcccaacagcatcccttcctcctcttcttgcctcccaagctacccaagattccaaagccagatcaatagtcatcaaacattgctttaactcactcctttccagttaaaagctttcaaagaactaattcatttggactttgtcctataggtagggctcttcgggggggcagggggcagcggggcgggcactgggtcccacgccgagaggatttcgtgccaagccacgcacacggtgcagcaggagccgggtccgcctcctcagcccccagcccggccccagacacaccagctatcacaccgaccctggtcaaataaaccaatgggcacgtggtcggcctgcagaacagaacccaagcgagcatatgccaggaacctgccttcccgccagccgctcaaaaccccacccgctggccccgcgccgcctcagaccggatccagctggattcctcagggcgacgcaatcgcctaacagaattctacctctttctcaggccgcagccaatggcgcggcccctcggatccggagccgccgcgggctctgattggccgatagagttagcctgggggcgggagaagagcgacctcggggaagcgtgtggtgcggggaggtcgcccccgggcggcgaagcagccattatgcaggcgtgagtgaaacgaataaacaaacaaacaaaacccactagctggggcctccatttcttccccgcccacctttctcccgcgtggggtctcccgtttcccaatcgccacgctttccccgccttcgtcaacgcctgggtacgtccccctagccgcgt

SEQ ID NO: 33482 - DNA, 2300 bp, Homo sapien
taattatgattcttagctaagtttgaaaactgagggactagattttcaaatatacccctaaatcctacccagattttagttttaaatctatttctttctccttaggctctagtcagagacaaagtaggatactcctccctttcccaggcctttatatccatagaatgagtgttgaataatttatcccattgcttagcaaacatttgtttcatatgctaaatgaagacacaaacccagaaatgttaagtggctgggtcaaggttgcactgtatatgaatgagaacaccatggcaagaaagctggatgtcttagcctccatggccagatgaccaccctttttttttctctttttttcctgagtaagaaaaatggaggcatctagggggcttccttgaaaaaatcagacataaattagggtaagtgtagatgttcatctccaagcaacatttctctctgagatgaacctatagattaaaaaagacttgagaaacatatcaaccaaatacaatgtgtggacctttgggtcccaatttgcaaaaaatgtaaagataaaaaagtttatgagacaatcaggaaaataagaacactgtgtggatgcttaattacatcaaataatcatatttaattgttatgtgcgtgactatcttattatggttatctatttttaaatcctcacattttagaaatatacactgaaatatttattaatgcaatgatgtctggatgcttcaactccagtggtgtaataagggggagaacagctataatgaaacacatagttttaagacacgattgtctatgagttgataatattgaagccaagtgatgagtatgcagggcttattgtgctattctctcctattcatgtatttttaaattttttcatcataaaacattttaaatgtatttctcaaaagggctggcttacagttttgtaggttatttaacttacctgtataataatatgcttattagtgaggtacataacttgatagaataacaataactttacatattcaggaaaaatcaccttgtctctccaccatggcttttgtggaagatgagatgaatagcagacatttaaagtagaaactatgactctccaataacaagactctctttcaaagtagcacaacacttctgtcatctgttacactgtgattagcctaaaactgcagtagatagactactgaaacaattaaagcattcaagaattataaaagatcaatcacctacttcataaaaattttcataaaccagactatacttggggaattgttaattgcctcaaagtaaaatgagggcagccacccagatctggttaggaggtaaattcattacagtgtcaagtttaacaccaatttccaaatgcacataagaagctgcagagtccagacttcgaggctaaacagctctgcctttctccttagtcctgcccactaccttctttctgaatctgcgaagagctgtgactcttgaagggcaggacctaccagcattcattatgacttcagttatggcaagctctcaagttaaattaatggtgtttggggtttatgtttccaaacagtaaggaaatagccaacgagtaaaactggaaattactttctcctatgacctagaagtagcaataagaactctaagtgggaaacagaaataggactctggaaagataatgttttgtgtgtttatttttcttccagaactccaaatagttgccttggcaggaaggctgccctctaactgctcccttccgaagactaggaggtgtttacagaaattgaaagttccagcagtacatttccatgagctcattaccagttccatttataccttttagatttcacatgcacaaatgaatgtccttgcagtataaactcctgctttcagcttgcattttaattacaaacaaagtagcagaaatcaggtactcagttactgtaacataagggcagggcatctttagaatctgtgctttgttcactattattcaaagcagctccaatgcccgtcttgcctgcctctttatgctaatcatcctagcccactttgctcctcctccttccagagtcccttaagaactgtacactttcagctgtcacagagggtaactcagatcaggcttagaaatcacttgacttaactcagcagcactttttcttttctttgtgtctgtattattttagcagccttctctaaatactggaggcattggatttcatgtcgccaaaaggaatttaaaaatgacaaaagtgtaatctgttagaaatagttaatttgtagaattttactctataagg

SEQ ID NO: 33483 - DNA, 2300 bp, Homo sapien
tcccaatgtttccctccagactaaaattggatgaactctgaactgagactctttgcatctcattttctcattaggttttattacagccaacaaaactttcagtggtgaattacttcccttctcaacagaataccagactcccataatgtctacacaaactgaaataatgaaatggtttttaaccaagctttagggattagagaggaaaaaaaaagtgaaaaagaaagggcaccagggtcttcccatctctatgctaaccaaagtgtggttttccagccctttttcttgcctattaacaaaaataaaaacaaaaaatggaaatgccactgggcttgaaaccccatttaaaatcagatttctctttcgagttcccttgcaatacaagtcaaagtcatttccaccaaaaaaaaaaagcggtggggggggggggtgtgcaaattaatcctaaactcatggctcagataggacctggtatagtaaataaatgcttttaaaagtagtcatggcattgagaaatggctccatgcacctaaaccagaggcaccaatgtaaaaactagtaattgtgttttaacacaaaagattgaaaagcgttttgtttcacatcctaatattattccacccacttaaaaagagttacttaatattgactctgtattaggtataagacaagttcttgccctcaaagaacttataatttagttgagaaaccaaaacttaacatgagcttaaaaagaaggatgcagtacaaaacatggtataattaagtgctaaacaatgtagtatagatgctcagtgacctaggagatcagaggaagggaagggtcactgagggctgggaatgtcaaaagcatgtactttcagtaagttcttaaaatgatagcatgttagaaagctgttataattgctgctgatttgtaattttaaagcattgacatgattcaccattgctttccaaccagtagctgtttaaaaggacatacagttgagggtgaaaggagatatttctttatgatctccagagatttgtattgaggggaaaaaagacatactttcttgttgaataatagaccaagaattgagcatattttgcatggggaatattaaattcagtgaacaagaatccaaacctcaggctgtgattctggtataaatttttgtttctaatgaaccattttcttccttctaaagaagatttaagttttgggaataagtcacctcaaaaaaatttttttttattttctaatatctattttcacaatttatttttcttttaagaaaagtggactagaagctcaagttaccttctcaaggcaatgagaattttttagctctaaaaaagttgtgtgtggtagggagaacatttagcatcctttaaaatggagacatctgaacagcaacctatcttttgaatcaccaaatctcaagtgtactttgcactcttggtcttaaaatgcttttcattttctagtttggcaaaaattccagtctctttacatttgctaccttttccgtctttgcaacacaggcagtgtgagctaaattaggtttgttaaaatgaagttttgaagtttcaactgctgaaatagaggcatgtccctaactttagacaaatttagagaatcgtagtaagcattattttttttctacatacttgtctgcattcagtgtcttcccaagaaacgtcagttaattccccgattcgaaaaaggaactttctcgtaacagttgtacaaccaggctaaagagcacaccctcgtcttccctgaaagggaggaaacatgcaataatgtgaggtaattaaatttagccttagaaaagtctttgaaacgttctaatcaagactttcagctttccgattgtgtgcgctttatttttcaattcttcctagtcccggttttgcatttctaatgacagtgaactgacaaagcgtgaaagtggtctaaggagcaaaacaaagccagcaagcctgcttctggtgtgccaagattaatcaatattccagaaacctcggggtttccccctcctccctgtgcggtttccattccccactcctcctttcccgggcacagactcctccccttttcttaagttgccctgatagtaacttgcagtttcagagcacatgcacactgtcagggctagcctgcctgcttacgcgcgctgcggattgttgctccgttgtacctgctggggaattcacctcgttactgcttgatatcttccaccccttacaaaatcagaaaaggtaagtgtcacattctgtgttcctgctgggtttaatttctcctttcacttctc

SEQ ID NO: 33484 - DNA, 2300 bp, Homo sapien
gtgcctggtacccatttgtgcccaataaatacttgctgaatgaacttttccaatagtgctggatttgctctgagccaaccaaattctcacttttaatgtattttgaaagacagaggacgacaagatgaagaatgcagtttgagactcagaagagcaaacataatcggcccagtatggatatgatcatttgatgcactgtcctcgggcatgctcatttacagaagcctaaaaacaaattttatccctcatttgtgggtttctggtgttgtggagggctttccaatgtttagaagcaatatatttttatagaattctgtaataaacgtgttttaaatcttttataaagctctctgtagcatataagtacatattaaagacagaaatgggggagcatcaaggcccttataatcgcattcattccttaaccacatactacgcatctactgtgtggcattctaggcgggggccgtaacaccagtgcagaaaaacacaacctcttgtcctcttagagcttacattgcactggggaaggagagataagaagataaacaagtatggatatgtagactgtccaaaggataaaatgagaagggggctagggaactttcagtttaaaagtagccgcggaagcaccgagtgacacgagcaaaatcctgaaggtgaaggagcaagccctgtggacgacgctcagggaagagtcctactcgcaaggatgccagggcaggcccgcccccaccctcaacggcgcgcggggacttctgccgcagtcaaggctttggctcactcccctcaagacgggaagccattcgcagggcctagagaaaaggagtgacaggatcttggccccctgagtggcctgaggcaaaaggaataatctaagcaagttttcctacttacttttagcgcactggtacacacacaaatacacaatacaattcatataacacgaatttcgtcccggttgagtaaaattccgcttacctactgcactttttaccgaaaatagcccctttttaatttacacaaacttaatagagaacggtggaacaatggttacttcttgttttacaatttaaaaactacaacaaccatagtactgtacgtataatcacatattgtattccagccttgtccagcgcctcagttttccgaacctaaagaggaaaacgatgtttgaaatcagctggccgcaggcccgcgggtcgcccgcagtcaccggtggctgagtcggggccggcggttctccccgcgcgctcggctccacccacacctagaggggggcgcccgggcagccgcgggcgagcttctcgctcgcgcagcgtcgcctacaggcctttatcctgaccgttagagaagaacccaaacctctgccgacaaaaagcaaaagcagcggagaccgcgtatttccagaaataaacgcatcatcacaaacacgattccaattcaatccagccgacagtcgtcttcacctccaaaggttgcgttcttattcgcagaaataacacgcagtcgggcgtaaggtcccggctctcaaaaggcaaggtgtacgatccatccatccacccggctgcagggacaccatttaaaacgggcatcatcgccatcgaatcgcgggcgtcctctgtggggccgcccggagatcggctccctaaagctaacgacgacctgggacagccagcgcggcctccagccgccgccgtcggcgacctgagagcccgtccgggcctgagtgccccccacgctcacgaccaccaccgaactcgggccccgctcctgtcggcctccaggaaaataaagacagaggagagccggcccgcctgtgtcgcagggcaaacgtcgctctgaagcatcgacaatactggcaacatccacagccgccctgaggggacgggcgtagaggagagctgccgcctcccggctgctgggcccgggtgccgcgcggcgcggccgaggacgcgagcccaagtggcggcagcggcggctgcggcggtggcggaagtggagtggggaagagggggtggttgttagtgtttggcgccggcggagggagtcattcctgcagctgcacttccggtcggcattttgttctgagagggagagacggaacgagagagagacacacacagggctccttccccccgccctcccccccctccctccgtcggtaccgactcacccgacaccaccaagccgcagggagggacgcccccgccgacaggagaattggttcccgggcccgcggcgatgcccccccggtagctcgggcccgtggtcgggtgtttgtgagtgtttctatgtgg

SEQ ID NO: 33485 - DNA, 2300 bp, Homo sapien
tacgtgacagctatattaacttcattcttttaaacatttatccgtacgtttgcaggaaatgtgaaacaatttattgtaatcaggacgctaaactcaaaaataacctccacaaaataacttattctacagtgacaataatttaatgacacaaaaaatatgaaccaatgtaacaaacactagtaaaacaagggatttcgctgagcagtgctgcttcattttaaccaatgaaagttttccttcagcgaatatgaaacaaaatatcaaaacgtgtaacccaggtacacttttctagcaatttgcctgactgaggaattttaaattggtgtttcccccttataccaacctacattatgaacgcctccataaacaagctcgaaacacttaacttactcatgaactagaacttgtcaagttagaactgatatttttctccagcatttacagatacatttaacctattaaaatgacacctctctcattacacagtcaaacatcatggcacaaacagccaatgacaatcctgggacctcaagaagaactgccctgacataaaaggatggcaccttctacaattttttaacctcccaaggattttaagtataacttaatttcttttttggaaaaagaaaagaaaagtggttttacccgtatctcagcacaattctcagaacacttaaaattctttgtatgctcctacacgttttggtcaggaagtacctgagtgttttacgtatagtcgcttaaaactgcccttacataacgcatacaaatagaaagtggcagagtaaacctgtcaagtactttatacttgtctttgaataaaaagtccatgtgcaacaacacactgtcaaaacaacaagataaaagctcttggggagggggagatgtgcagtgtctaccacagtatgtttttctgtattaaatattcatgtggacgatttaattctttaaaaaagaaaatgagtctttatgaactttccaacgtccaaacaagttttagaaagagaaagaattaccactggatccgcgtctgagtatttacgtttgtctcactaactgaaactacttcctcccttcatggggtcacagggggaagaagggaggttgtttgtttcactgggacgttccccactcccggaccgggaaagttgtaaatatggggacgatcagggcacatttgctgttagttgtattgtttccgcctccccactagctacggctccactcccgggcgaggcctgtcaccgaccagcagtcgctccgctcagcccggagctctcctaatccccgagctcaagtagattccgctggcccgcggcctgcactctccgccgggcctacgcctccccggccgcccagcaggagcccagtccccgccaccggagccggccgggagagggtacaaaaccaccgctacccaaggcggctgccaccagagaggagcgaactctagactcgcctgtggaagagacctggggccgctaaggaaacggcggggaggggagcgaggaggagagacgctgaggacctggcgccggcgccgccgccgccgccgccgaaataaagagcaggaatttacctgggcgaatcggcgtctgaatccaaggggaggccgaggccgctgtggcgagagactataatccgggccgggagggggggtggctacggctcctcttccgtctcctcagtgcggggaacatgtagagccggggggagaccagccgagaagacaaatcgttgcttcttcttcctcctcctcctccttctcccacatagaaacactcacaaacacccgaccacgggcccgagctaccgggggggcatcgccgcgggcccgggaaccaattctcctgtcggcgggggcgtccctccctgcggcttggtggtgtcgggtgagtcggtaccgacggagggaggggggggagggcggggggaaggagccctgtgtgtgtctctctctcgttccgtctctccctctcagaacaaaatgccgaccggaagtgcagctgcaggaatgactccctccgccggcgccaaacactaacaaccaccccctcttccccactccacttccgccaccgccgcagccgccgctgccgccacttgggctcgcgtcctcggccgcgccgcgcggcacccgggcccagcagccgggaggcggcagctctcctctacgcccgtcccctcagggcggctgtggatgttgccagtattgtcgatgcttcagagcgacgtttgccctgcgacacaggcgggccggctctcctctgtctttattttcctggaggccgacaggagcg

SEQ ID NO: 33486 - DNA, 2300 bp, Homo sapien
atggggatgcttctgaccgacttgccttttagcaagttgaaggtaggtatgcacgacagggctctgacttcaccagaactaataagttagattgcaatagtaggagacagatataaataatgaaggaagctagagttatgacggctttctggaaaaatgttggaattgaaagaaaatgtggaaagagagttgagtggaagaaagactaatagagtaggagtattagttttatgagaatgtgagtaaatctaatattggataaatgaatctaaggctactaatactacatttttgcaacttacgtttttgagtatttgggtagtaaatcactctgataaaaacttttagagtgttcacctctcagtcacatattttgtgttttatactacatatacttgttttttagtccaaaatattgtttgatttctgtataccctactttgtaaaagcataaactagcatttaaaattaatcaattaattgcatgttatttttttttttaaagcattttcctggtgatatatggctttgaaattttaaaagttggctgggcgtggtggctcacgcctgtaatcctggcacttgggaggccaaggtaggaggattgcttgagcccaggagttcaagaccagcctgggcaatgcagagagaccctgtctcattgaaaaataaaaaataaaaataaaatagaaatttaaaaagttgattttggggttggtaagtttaaatatgagtcatgcatgtggagaaaattgtaataaaatgcaaatcactttaatcatagttctttggaacttagaattaattgaaaaggactgttagaatttcatttacccgttttatttagaaagccattgctttcaaactagtaattccagtttgtcccagtgatggctgttaattcaggggggaaaagctttttaactcctgtctcattgagtgttcatctccctccaaaagaaaaagaaaaaaaaaaaaacctccagcaacaataattatagtaattaagctattaaagctatggagcaaaacaattctgtgctgagtttgagttggaaaagaaaagtcagaagttgaaatttagactacatacttaagaaaacacccttcaatggtagacttagaggcgattttgaaacctaatttcattcagctacaatctcttttgtagtactcttagcaaatcaacttctgtttgaatatttctagtgaaagccactttttataacaacagcaggaaatgaaatttggaaatacaatttgatgcttgcagctgccaaaaaagagattggctatagaaatcataagaaaattcagggtgttatttgtagatttttatctgattttgaaatgtctaaataagtgaatttttctgtgtctcccatataatgaaatgtcatgtgaataattgagaaataatgtctagcttggaaataaatgtaagaaccagaatgctcttcacaggtttttattttttaataaaatattccgttaatccctactatgtgacaaagagttattgtgaaagaaggaataggtacattctgttttgcttcagaagacattcaggtggaaattgcaggaattcaaactttcggcccataaataaagtacttttcaaaacctgtgtctgaaccatgataatacaaatagctttgtgaaattaagttcccaagcatgagagatgtatatgataaaatattcatgtaataaaaactaccctgagtcccgttgtagaaggaagtgtattgtgttaggtgcgaggttagataagacaacttttaaaaaaatcttttcaattctaaggctaaataatagaatattgagtaagcaagtaaatttttttaaaatattataatctctgtttctagtcctggattagttttatggaaaatggtgttgtaataaaattgttcttgaaatttacagttttacagcgtctatattttgctctttgaaatgaaaacattgatcaaaaaaatctctggaatgtttgaaagaataactgatttcagttatttaaaggacactttactgttagaagaaaataacgttctgtatttttgtgttttgcataggaatgatgatgtctcagtataaactttctcagaattccatgcacagtagtcctgcatcttccaattatcaacaaaccactatctcacatagcccctccaggtaatatatgtatatatcgtttattaaatattgtcttgtatggtgaatatgctggtgaatatatggttcatacatttaggtaatggtggattatttagagtttaaatagttgaaatacttaa

SEQ ID NO: 33487 - DNA, 2300 bp, Homo sapien
caatttcactcctaggtattggcacctagagctcttacacatttataaaaacagtccttatgtacaagaacatacattgcagcattgtttatggcagcaagcattttaagcgatttgaacatccacataagaatgaacaaataaatagtgtacatcatacagcagagtatgtgtaattatttaaaataaatgaatttacaccaggcacagtggctcacatctacctgtaatcccagtgctttgggaggctaaggcagaaggatcatttgaagccaggagtttgagagcagcctgggcaacatagcaagaccccatctctaccaaaaaaagaaaaagccagatgtggtggcagtttcctgtagtcctagctactcagaaggctaaggcaagaggatcacttgaacccaggagtttgaggttacagtgagctatgatcatgccagtgaactccagtctaggtaacagagctgtctgtaaaaaaaataaataaataaaagaatttaaaactatatatatatatatatataaaatctcagtataatattaaatggaaaaacaagttatataaggatagatacatatatcatctatataaaattataatgtaaaaacaacacaatgaattacttaggaatatattcatgcatagcaaaggtataaagataacacataggcagaataaactcagatcaaaatagtggttacctctagggagtaaaaggaaaggaatagaggagagaaataacagataaatggagatcttcaactatatttgtaatgttttagttcttttcaaaaatagattggaatctggcagagtgttaagatttgatgaaactagtcagtacatgagtatctgttatattattctctgtaatttctatatgcttaaaatatttgtgaataattactattctccaagaatgttaagaatcttttattaaacctttttttattcttattaatttcagcatcggtatcaagtcccattgttgcaggtggtttgagaaacatacatgataataaagtttctggtccgttgtctggcaattcagctaatcatcatgctgataatcctagacatggttcaagtgaggactacctacacatggtgcacaggctaagtagtgacgtatgtaatatattatcattaaggtgataaaatagttctaatatttgtcatataacctagtatttccatttcaaaatttgaatgatacctaccgtatatcattatactgggtactgagtacaacatggctcctgcacatacagagcttagtctagagcaggattggtcaagtgtgaccagtagcctgaaccacaaagtgagaatggtttttacatttataaagagttatttaaaaaaaaaaaaatgtgatagagactgtatgtggcccacagagcctaaaatatttattctctgttcctttataatgaaaagttggctgacccctgaccttgaggtttaggttcttaatgaaatatttcagttttaggttaatactgctcacactaaaatttttttttttttagataatgagcctgtatttattagtacttgactctttttccctctgatacttgtacaaagttttgtgtctgaaatttaatattgccttgatgttattaaaatattccacattctggaaatttgccttgttattgatttgattgtaatttatgtaagctgcatgtgtctaaggataacacagatgacaataaactctgccctcaagtcatttaccacctggtagagtattcatagctccttttgtagaaaaaagcaaacaaaaatggagcatactagtaatacaaattttcttattcattgccatgcttaggctgttgattcttttggatacaatttcaattcttctaagatataccaagaagaaaacaggaaagtgcagaagaattatgcttttgaattccaacactttacctgtcagtaatttatgtctcttattggttctcttttaagatttctataaagcctctcctgtcattcaaaagataaattgtatactctatttttaggatggagattcttcaacaatgaggaatgctgcatcttttcccttgagatctccacagccagtatgctcccctgctggaagtgaaggaactcctaaaggtactactgtaactaaaatttccttctgtatattttatatttgaagttgaataaagaactcagacttcctaaagcagatattaaaaagttattctgtatttttttttcattgtagaaaaaaaaataaacctgtacaagcaggtctggatcatgggatttaaat

SEQ ID NO: 33488 - DNA, 2300 bp, Homo sapien
agaaagtattacagccacttgaaaaatgatttcataaaattatctcataaaagcattatcttgtgaagttgaacaatgcatgtatccaatgacccagcaattcgacttcaaatatatatacacacaaaagaatcttgcatatttgcatcaggaggcatatacaagagtgcttattgtactaaaattgggattaacctatctacaaaagagtggataaatgaattaaggtataggcacacagtggggtgttgtacagcagagaaaatcagtaaaatacagctgtatgcagtaacctagatcatagtggcataatgatgagtgaaaaaagcaaatctcagaagactacatcaagtatactacctttttagaaagtggaaaatcaaagaaaaatataaatagcatacagcttatactttttttaaaaacaaggagatggtaaatttctgatagtggttatctcaagtgtgaaacaggaaaatgggataagggaaggagcacattgggagctacaagatattaaaattattcgtgttcttgatttggattcaaagtatgccattatttattagtaaattagaagggcatatacgagtggcaacagtgtgtcatgagtcaaaatttatgattaattcttttgtgtgtacctgaagccttggaaatgaaaaaggaaaaaccaaggatgagagaggatagttttctactcctgccgttaaataaaagaccaagctaggccgggcatggtagctcatgcctataatcccagcactatgggaggctaaggcaggcggatcacttgagcccaagagtttgagaccagcttgggcaacatagagaaccccatctctacaaactgtacaaaaataagctgggcacgatggctcacgcctgtggtcccagctgtgtgggaggctgagcctgggagggcaaggctgcagtgagctttgattgtgccactgcactccagcctgagtgacaatgagaccctgtctcagaaaagaccaaactagaatgtgatattaatagctgctttaaggaaattagagaatggggcaggaagaatttgcggttcatagttgaaacctagtacattgaagctgtctgctttatttatttcttcaaattggaggaaaaggggcagtgtgtgtgttatgttactctggttgctgtcagttgttttaatcatttatgcatcttgtggggaaagtttaagcttgtgctgcccaagcttgtgcccaactgtaagccacatgcatttttttaaatgttaacttaatttcaatttttattttatttaattttaatttctcagtcacagtaggtacattgcaagtgcttaataactgcatgtgactcttggaaaccatattggacagcaaagatatagaatatttccattattgcagagaaagttatatttaacagcagtggaactcttcacagaaatcaaatacacatttagattccttcaatatccccagaattagattagctagcttttcttaggaaaacagatataccttatgacttttctgttgacctttgattatgaaagattagattggttttactttttagctatatttagaatgagctctatcctcatctcattattcataacacttttctagcattgtttgtgattttgcaaaggataatgcagaaaagaaatctaccgttatgttttataattgccttttaaggtgcaattcagatgcagttattaattatttaaaataattcaactagtattatgtgatactgtgtttttgattggaatagggagaaagggaaggtcatcttttctacatctttcacgtattaccttaggtcttacacagcaatttaagtactttgtagtaaaattgtttgaaagtattggtaaattactggtttataagatatttttaaacatatatatttttgttttattaatttgcactttgagtattaaattgttaatgacaaattgaaaagtatgttacttatggacacttttaatgtgtttatattattattgcctaatgaataattataccgggatttttttttcttttttgtatatatatatgtatatatatatatatatatatgtatatatagttgttgaagtccgaagaggattcctcatataaacctgtgaagaaagcttgtactcaacttgttgataacctagttgagcacattcttaaatatgaggaatctctagctggtaagacattttatatatatattgatctttagttgattttataagatatttttaaatattttgagtaaatttctcatttttgcctctggct

SEQ ID NO: 33489 - DNA, 2300 bp, Homo sapien
caggctaaagcaggagaatcgcttgaaccttggaggcggaggttgcagtgagccgagactgtgctactgcacttccgcctgggtgacagaacgaggctctgtgtcaaaaaaaaaagtccaaaatctatgccggtaatccattactaacaatgaggattagtagcttaaaaactagattaaggctggacatgatggctcacacctgtaatcccagcactttgggaggccgaggcaggcagatcacaaagtgtggagtttaagaccagcctggccaatatggtgaaaccccatctctactaaaaatacaaaaattagccaggcgtggtggcaggctagttgtcgatccatattcccgacatgctggtgcttctccttccatgcctccagctactctggaggctgaggagaatcacttgaactcaggaggcggaggttgcagtgagccaagatcgcgccactgcattccagcctggatgacagagcgagactccgtctcaaaaaaaaaaaagaaaggaaaaaaaaaaactagattaaaaacatgcattgaaagccttactacacacacgcgcgcacacacacacacacacacacacatataactttgattgcctttggggaaatgaactgggtggctggaggatagatagaaacaagactttttattgtaaatccttttctaccttttggttttttttaaaaagtctctacctgtttttttaaacatgcttattagtttttctaatcaaagaaataacacatttaaatttaaaataaagaagtcctaggctgagcatggtggcccacacctgtaatcccagtactttgggtggccaaggcaggaggatcacttgaggccaggaattcaaaaccagcctgcgcaacatagtgagaccctgtctctacaaaaatgaaaattaaggccggacgcagtttctcacacctgtaatcccagcactttgggaggccgaggcaggtggatcacgaggtcgtgagtcctagaccagcctggccaagatggtgaaaccccgtctctactaaaaatacaaaaattagccaggcatggtggtgggcgcctgtaatcccagctactcgggtggctgagtcagggggttgcttgaacccgggaggcagaggttgcagtgagccaagatcatgccactgcactccagcctgggcaacagagcaagactctgtctcaaaaaaaaaaaaagacaattaaaaaattaaccgggtgtggtattatgcgcctgtagtcctagctactcgagagactgtcaggaaaatcgctcaagctcaggagcaggattgcattgagctgtgattgtgccactgcactccaacctgggcaattgagcaagactgtgtttcttagaagtaaagaagccttctgcctggttctgggattctacatgtttatctgtcatagaaaattttaacacagggtttctcaacctcagcactattgacaggactagatgattctttgttgtcaaggattgttctgtgcattgcaggttgttaagcagcatccctggcctctatccactagatgccagtagtggctcccattgtgacaaccaaaaatgtctccagatactgccaaatactcctgtgtcaggatacgggggaagaagcttattcctgattgagaactactgggttaacatacacagtttggaaaatactaatcgtaaaaactgtaccagtctttgtataatgctgtcaatatgtaaatacctttgtttagaattgacttgtgttacattttagggaaaaaatataacattgtgattaagtgaccccaaagtcacattttggtaagttagttgtcggtacatattcctgacatgctggtgcttctccttccataccttgaaaaaaaaactctaacagacttttttttttaactggacctttacgtgcaaaatgccctatttctgcccccaaatacgtaaagctgtatatagtttcttttcaggttttggatattcataaagcattaattttattcttatagacgcaaaatgatttcatggttatctgcaatgttgcaaaaatcctagagctagttgtaccactgatggagcatccaagtgaaacttttcttgccactattgaggaagatctaatgaagctcatcatcaaatatggcatgactgtaagcactcagtttaccatttctttattcattagtgtaaagttctaatgtattttattaaaatttttaaagcaaatatttgtaaaaagctaagtttttaaaatagtatatttttaacttttatctaaacattttctatatc

SEQ ID NO: 33490 - DNA, 2300 bp, Homo sapien
ccaggcatggtggtgggcgcctgtaatcccagctactcgggtggctgagtcagggggttgcttgaacccgggaggcagaggttgcagtgagccaagatcatgccactgcactccagcctgggcaacagagcaagactctgtctcaaaaaaaaaaaaagacaattaaaaaattaaccgggtgtggtattatgcgcctgtagtcctagctactcgagagactgtcaggaaaatcgctcaagctcaggagcaggattgcattgagctgtgattgtgccactgcactccaacctgggcaattgagcaagactgtgtttcttagaagtaaagaagccttctgcctggttctgggattctacatgtttatctgtcatagaaaattttaacacagggtttctcaacctcagcactattgacaggactagatgattctttgttgtcaaggattgttctgtgcattgcaggttgttaagcagcatccctggcctctatccactagatgccagtagtggctcccattgtgacaaccaaaaatgtctccagatactgccaaatactcctgtgtcaggatacgggggaagaagcttattcctgattgagaactactgggttaacatacacagtttggaaaatactaatcgtaaaaactgtaccagtctttgtataatgctgtcaatatgtaaatacctttgtttagaattgacttgtgttacattttagggaaaaaatataacattgtgattaagtgaccccaaagtcacattttggtaagttagttgtcggtacatattcctgacatgctggtgcttctccttccataccttgaaaaaaaaactctaacagacttttttttttaactggacctttacgtgcaaaatgccctatttctgcccccaaatacgtaaagctgtatatagtttcttttcaggttttggatattcataaagcattaattttattcttatagacgcaaaatgatttcatggttatctgcaatgttgcaaaaatcctagagctagttgtaccactgatggagcatccaagtgaaacttttcttgccactattgaggaagatctaatgaagctcatcatcaaatatggcatgactgtaagcactcagtttaccatttctttattcattagtgtaaagttctaatgtattttattaaaatttttaaagcaaatatttgtaaaaagctaagtttttaaaatagtatatttttaacttttatctaaacattttctatatcttttaggtagtgcaacattgtgtgagctgtcttggagctgttgtaaataaagtgacacaaaattttaaatttgtgtgggcttgtttcaatagatactatggtaagttcaataccagggttttaaaattattctgctaggtcctgcagggggtcagctcattttaaacacatttgataaaaggctagactcgaggaaattatgaggtgtgattatccaccgtggtcctctcagaaacaatattttctagtgtcttttgtatttcctgaagaacccactgtgattacttcagaaatttatctcctgataagtaaagattggtaaattttttgcgcactgtgaaaagtaaaatttaaattttcttacattagtttagactctgaagagcactctcataattctagacatatttaatatttagaaccattagtaaaaattaattggctggggacagtggctcatgcctgtaatcccagcactttgggaggccacggcgggtggattacctgaggtcgggagttcgagatcagcctggccaacatggtgaaaccccgtctctctactaaaaatacaaaaatttgccaggcgtggtggcacacgactgtaatcccagctacttgggaagctgaggcaggagaatcacttgaacacgggaggcggaggttgcagtgagccaagatcatgtcactgcactccagcctgggtgacagtgagactccatctcaaaaaaaaaattgtaattcattagtagtaattacttgaacttagtaattcaaagataaatattataagtaaatattacttatctttattaggtgccatttcaaaattaaaaagtcaacaccaagaggacccaaataacacttcacttctaacaaacaaaccagcacttcttagatcccttttcaccgttggagcactatgtcggcattttgattttgatctggaagattttaaaggcaacagcaaggtaaaggtagtaatacttaaaatgctataaaacatagagctatatggcactgtgatctgagaatgacagtagtgacccaggatga

SEQ ID NO: 33491 - DNA, 2300 bp, Homo sapien
ctctaaaatagttttaaaattgtatatgtgtgtaaacattaacattttgagggaggaaagagattatagttctcactgggttctcaaaggggcctctgacacagacacacacacacacacacacacactcacacacagattaagaaccattgagccagaacactagctgtaacgttttgtgattttggttatggcctaattttgaaatatttagtaaagttagtataggtgctcttaatgtgtgtttatcctttgcttgcttttgtagggaagaaagttgcaaaacaggaagacttaaaagaaatgggtgatgtttcctcagggatgagtagttccatcatgcagctttatctcaaacaggtgcttgaggcattttttcacacccagtcaagtgtacgccactttgccctaaatgtcattgcattgactctaaatcaaggtcttattcatccagttcaggtaagcatgttttatggcagcagcacttactaaaagagcaagattagttgtaatttgatacattgtgattatagagaataagtagttcttcgttcctcttactcttctttgtactaaactcttaagaatctggcagttttagataatctcttgggttatgattactgcaaaatacccatatattcataatattgtctctgttataaacttgtaatttctattggcagaacatatactcaaattatttttctaagtatgggtgatatatttgttttaattcatatttacttttgtccctaagatccaacaatctataatgtgaagagagttaactgggtttaaaagtataatctgttcaacagggtggagtcttagtccacagaaaagtaaattatataaactcaattccttcatctttaagttgggtataacaccaactactcgacacctcatagcattaatatgaggacacaacgacgtaataaagacattagtgttactgaagattggcagccaatgctgatgtagtagtatataccatctgatggtcaagagagcaccataggctacaaaagtgtatgtattaagtaagcagagtctatacccttcaagatttttattttgggtatttttcatggaacgttttaaaaatatgatttatttaaacatactgtggtcttccctgtgtcctgaaacaaaacatgttaacaaatatttatcctgttcttcatgactccgggctattatcataaagaatcatacattataatgaaacagtagtacattgagactgtcacctttttaaactaccgagggttctttgttgggtgctttttattatatatgccttttaaacttttttttttaatttcacacaaaggagtcaggtgcagtggctcacacatgtaatcccagcactttgggaggcagaggtgggcggatcacttgagtcaggagttcaaaaccagcatagccaacatggcaaaaccccgtctctactaaaaatacaaaaattagccaggtgtggtggcacatgcctgtggtcccagctacatgggaggctgaggcaggaaaattgcttgaacccaggaagcagagaacccaggaagcagaggttgcagtgagctgagaccgtgccattgcactccagcctggccaacagagggagactccatctcaaaaaaaaaaaaaaaaaaattcacacaaagaaattgcaaaagtgatacgatgaattcctttattctcttcacctctattcaccatttgttgacattttgccacaattgctttctctctctccctttatacatctgcttttttctgaatcatttggtaggaagtttcaagtaattatgattctttaccactaaacacttcagcatatattttctaagaacaaggacattctcttacaaaaccgtaatataatcattaaatttgggaagtttaacactgatacaatattatctaatatacagttcatttgcagattctgctagttaaccaagggcgttctctatagcctttttcctcttctttttttttgaggcaagatcttgctctgtttcccaggctggagtgcagtgatgcagtctcagcttacctgcagcctccgcctcctggattcaagcactcttcccacctctgcctcccaagtagctgagactacaggtgtgcgccaccacctggctaatttttgtgtttttgtagagacggggttttaccatgttggccaggctggtctcaaacttctgagctcaagtaatctgcctgcctcagtgtcccaaagtgctgggattacaggcatgagccaccgcacccaccttacagccttttttctt

SEQ ID NO: 33492 - DNA, 2300 bp, Homo sapien
cgtgccattgcactccagcctggccaacagagggagactccatctcaaaaaaaaaaaaaaaaaaattcacacaaagaaattgcaaaagtgatacgatgaattcctttattctcttcacctctattcaccatttgttgacattttgccacaattgctttctctctctccctttatacatctgcttttttctgaatcatttggtaggaagtttcaagtaattatgattctttaccactaaacacttcagcatatattttctaagaacaaggacattctcttacaaaaccgtaatataatcattaaatttgggaagtttaacactgatacaatattatctaatatacagttcatttgcagattctgctagttaaccaagggcgttctctatagcctttttcctcttctttttttttgaggcaagatcttgctctgtttcccaggctggagtgcagtgatgcagtctcagcttacctgcagcctccgcctcctggattcaagcactcttcccacctctgcctcccaagtagctgagactacaggtgtgcgccaccacctggctaatttttgtgtttttgtagagacggggttttaccatgttggccaggctggtctcaaacttctgagctcaagtaatctgcctgcctcagtgtcccaaagtgctgggattacaggcatgagccaccgcacccaccttacagccttttttctttcctgattcgagatttaacatgatcatttctttcatttagtgccatgtctgtattttaaagttaggtttgttgttgtttttctggccttcacattgctttttaattcagactcacttaacatagtagtactgttttttgactctagaagtacagtgaatatgactgttatcaactctctgttcctcaaagccacatctgaaatcaactttgaaaaacaattatattttcgtagctttgagtatggaaaacaaattactgtttgccctatattatctttacaaggcaaattcagtcaagctttaaaaactactggattatacatttgtagtctatatcataatcttaaatagatattcttagtgtgagaatgctttatgtttaaagaacctaaaatttacaatgaaattgtttaaattttatcacgtcagtatttttgctggtgctccagtgctttctggatttaagctgaatctcaaaagatctgtcattttaaaaagaacactaaaacatagactttataggaaggcctataaggttaaattcatatatctcagatatatgaaaagttttgacatatgtctaaatagagaatttttactaccatgatatctcgtaatttttttttttatttccagtgtgtgccatatttaattgctatgggcacagacccagaacctgctatgcggaacaaggctgatcagcaacttgtggaaatagacaaaaaatatgctggattcattcatgtatgtattttaacattttataacctaaatttaaacatttttcttgagtaaagcatttctttgataaatgctctgcccacattcataattggaataaaatgtcttacttagtacctatcttctaaacatgcaactaagttagtcttccaaggtgtttattctagtctaaagttaaggttgggctagaggtgacagtaccaagcacaccagactaaaaatcaggaaacctggattttatatcttactatgtgaacttggctgcagtgactctcctgggcctcattttttttttcttctttgaaatgagggaattgtaagagataatctctaatgttccttctagcacttcattctgtgattcgtattattttaattaaaaaaaaacaatgaagctagcctcagaatgtaatgctctaagtatatttttaatttgtgtcttttaatttccctgacaaaaatgagacttttattgatttcagatgaaagcagtggctggtatgaagatgtcttaccaggtacaacaggcaatcaacacatgcctaaaagatcctgtaaggggtttcagacaagacgagtcctctagcgctttgtgttcacacctttactccatgatccgtggaaaccgccaacacagacgagcctttcttatttctttactcaacctctttgatgacacagcagtaagcacaaaaacttattattttaagaaaataagtgctctagaaattttatggataaagtagtcattttttaaatattaccattttattagtatatgatagtaacttcattaagtgttttcttaatcttctaagttatttacaaagtacacagtcagaagtgaagg

SEQ ID NO: 33493 - DNA, 2300 bp, Homo sapien
ttctcttctattgctggatagtattctattgtgtaatatgccataatttatttttattaaagggaaaaaaacatattcctatacttggtgataatgcattacaaattgaaggacttattttgttgatttccttaaaaagactcaagctaaccttaaaatagattacaagtttaagtttttaaagagctctgaagtaacagatgtaaaccaactaaacagagctccagtagaactcaaatagtatttaaagtactctataaagtaagagagagaaaaggtacagctattataaacaccctgtagttttacccaccagtagtcattaaagatacctcttttctgcctgtaaccatggaattttggtcattttttacattcattgaaatctaagattaggaatcacaaaatcaaatgttaataggctacctggtcaatggccaactggaaagagtgtgttgcatgtaaagaggtcatttaagtggacctgtctcaagtttccataagcttgttgccaaaggagagggtaggcataatgtggctagagctcccactttttcaggagacactagaaatccagatttttaagaggaatatctgtatttgcaacagggtctcgctctgatgcccaggtggagtgcagttatgcaatcataaactcctgggctcaagtaatcctcctacttcagccacctgagtagctgggagtacagatgcatgccaccacacccagctaattttttttattttttacttgtagagatgatgtctagttgtgttgctcatggtagtcttgaactcctggcctcaagtgatcctcccacactggcctcccaaaactctgagattataggcatgagccactgctcctggccttataaggaatatcttgatgttaaatgttggcaagatgcaaaataatttaaaaccttgtaaggttttgaggcaatgctaaggagttggaaagatttttaagcagagttgttaataacctgaaacaggtttataaacaatcattctggccactatatagaggatggataggttgggggtgggggagcaactagtagaaagaggtaaaccagttaggtggtattaagtaattgtattgaagctgtcctaggatcacaatagtattaaaaatagacatgagaaactaatttcattaatatggtgcttcctacctataattggatttctccaaatacgttgtttccatagttttaaagtttttggttttgttttcccaaaacagtaaaattcagaagtactctccatctgaatctgcaaaagtatatgataaagcgataaaccgaaaaacaggagttcattttcatccaaaacaaacactggacttcctgcggagtgacatggctaattccaaaatcacagaagaggtgaaaaggagtatagtaaaacagtatctagatgtgagtagtaaaaccaaaagtttttacttctcataagggcttttttgacaagtaaatgtggggggccggtggggagataactatctccttcacattgaatataagcttcatgaactatcaagataatttttctctatcttattttaatgagttactttaagcttgtctttcccattgcacccatggcatcctaattattttttcttaggaaacagcagcccacgaataattttattttagcaaaaatgaaagattataggaaaacctgtgtgtgttttgtagttgtcccctggtatctgcgggaaattggttccagtccccccatggatacccaaatcctccgatattcaagggcctgataaaaaaatggcgtagtgggctgcgtgaggtggctcacacctgtcattccagtgctttgggaggccatggcaggtggatcacttgagctcaggagtttgagaccagcctgggcaacatggcaaatccccgtatctataaaaaatacaaaaaattacctgggggcagtggtgtgcacctgtagtcccagctactcaggaggctgaggcaggagaagtgcttgagcctgagaggcagaggttacagtgacctgagattgcaccattacaccccatactgggtgacaggagtgaaaccctgtctcaaaaaaattatttaaaaagcatagtatttgcatataacctacatacatcctcccatatgctttaagtcatttctagattacttataatacctaatacaatgtaaatgctatatacatagttgttatactgcattttttttaagttgtattttttattgtaatgctgtttgttttgttttgagacggagtttcactcttgttgcccaggctgg

SEQ ID NO: 33494 - DNA, 2300 bp, Homo sapien
tgtagaatgggttctgacattaccttctcgctgtcagtgaagtaaatacccaagattgttagaattgtgtccaaatttagaataaattggctaggaatagtggctcatgtctgtaatcccagcactttgggagcccatgataggaggatcacctgaggccaggagttcaagaccagcctaggcaacatagtgagaccttgtctctacaaaaaaaaataagaaaatgaaaatttagccagatgtggtggcacatgcctgtagtcctaactactcaaggtaagaagatcacttgtgcccagttgagaagatcatgcccctgcactcctgcctgggcaacagagtgcactcttgtctcaaaataagtaaactctaagggtttaagaactgcttggtttatagattttgtggtctcattcaagattgcaaacactttttttgttttgttttttaacttctatttgggtaaagggatgggattagtgaggtgttaatgtaattaaaattttcatttgaatttctattagaaatcaacaagacctttaatttgctagtgacaacttctccacaggaccttgaaaaagtgaatttacttctgagtgtccatttttatatacataattgtgtgtgaaaagaacctcacatgtaactcacaccaatagttcttaatgttctggaataatacgtatgtgtctgacatttgttgtttgccttctggtgtataacttgaagagtttatgagtcacagtcaattcactgtagtaggtttctgataaacattttaaaacataaaaatgataattttaaatgtctaatttctgctttattaacaagctcttggtgaggttaattacaggattgagtacaaagcataggtgcttccacctaaaatgttcctactttccatttttagtgcagccaaataaggttctctcctaattaattcaataaaatatattaattgaactagtaaaatagattttgccttccatttattaaattggtttattatttttatttatttatttatttttttgaaacggagccttgctctgttgcccaggctggagtgcagtggcgctatctcagctcactgcagcctccgcctcccaggtagctgagattacaggtgtgtgccacatgcccagctaatttttgtatttttagtagagacgaggtttcaccatgttggccaggctggtcatgaactcctgacctcaggtgatccgcccgccgcagcctccctaaattggtttttactttaattacatgatgttttaatttaacatttttatgttttatgctagagtaggaagcttcatcaaacacgacagtgttttgtactgtttcctaaataacagaattatgtgtaatggtttaattatttggattgaacaataatgaaccaactgggtattttttatgcagctttacatgacttcaagggaaataaggctgagacaaaagatgaagcatgaaaaagacaggtgagtttggtagctgtaaccctgtgttttctctctaacttccttagctgaggcatagattaatgccttaggaattctgttttcacaatagtctcttttttgtcaataaacagagaattatgggagttatcactgcaaggaaaatgatgagactcactagccttttttcaaatttgctttcaaatattatgtgtttcattcagtttttatgacttttatttctgctgttctccctttcccaacccagatatttacatgcatttgggaaatactccagagaccataactacaagtacctttaataatactgcctaatcattttcagaaatctgatgaatagaaggatgttagaagtgctgaagaaagaaaatgctaagtgaaattagccgggcatggtggccaggcgcctgtaatcccagctactcgggagcctgaggcaggagaattgcttgaactcgggaggcggaggttgcagtgagccgagatcacgccattgcaatccagcctgggtgacaagagtgaaactccgtctcaaaaaaaaaaaaaaaccagaacatgctaggtgatcttcaaacactatattccctctggatagatgaactgaaagtgactcttaataaatgatgcttaattctttgtctacagattgctgctctctgaacactatagtcgtcgaatctcacaagcgtacggtctgatgaatgaactgttatctgagtcagtacagctaccaactctaccacagaaaccattgcctaacaaacccagccctactcagtcttccagttgtcaacactgcccttctccaagagggta

SEQ ID NO: 33495 - DNA, 2300 bp, Homo sapien
tgtaggcaacaaatgtataaaaccaaaacaagtttcatgataccttttattgcctgagatgctctctggtattttctcttctctgctattgttgcccacagttgcttcttgcatccacttcttttttttttttttttttttttagacaaagtctcactctgttggagtgcagtggtgcgatctcggctcactgcagcctcctcctccagggttcaagcaattctctgcctcaccttcctgagtagctgggactacaggcacctgccaccatgctgggctaattttttgtatttttagtagagacgggttttcaccgtgttaaccaggatggtctcaatctcctgatctcatgatccgcccaccttggcctcccaaagtgctgggattacaagcgtgagccaccgtgcctgaccgtatttcttttatttaccttatattggagtaggaatgattctttagttttaagatttaactttggggacttttcacccataatattttgaagtactgcttcctccccattttttcttttctctctaaaacacctaatagaggcatgttggacctcctcactctgttccttatatcttttttttttttttttcgagacagagttttgctcttgttgtccaggctggagtgcaatggcacaatcttggctcaccacatcccctgcctcgcaggttcaagtgattctcctgtctcagccttccaagtagctgtgattacaggcgtgtgccaccaccactggcaaattttttgtgtttttagtagagacagggtttctccattttggtcaggctgttctcgaactcctgacctcaggtgatcagcccaccttggcctcccaaagtgctgggattacaggtgtgaaccactgtgcctggcctccttatctcattcagcctcttctgcataatttcctccctttatcagtggttcactcaggatgatttcctcatatctgtcttctagtttactaattctcttttttgctgtgtctttgctgttttagctattcattatgattttaattttggtggctacatttaatatctagaagttgtatttatttctttttcaaatctatctgctctttggatgttgtgtcctgtttttttattgctgttcctatgctttatctgtttcataatttcagtcatgttttatgactaaccttttctgattattgtatttcatatgtgcacattatcaattgttgaatctgcatactgactgtctttcatggttggttgttcctttgtgtgaattgtaattttttatcatgggcttatcattagtggaagttctgctagattatatgtttgtctttggagtagttttgcatttgctttttgctatcgttgaagtaggaaaaaattgaaacaaattttagtatacgtttcttcacttggggttgctgtactttattgatggtagaaattcagaccctgttcatgcttgtggcaagtcagggtgttgatttctcaaagttgacttttatttttctctcagctgctgtccatgcagatagaaaacttatttgctgtttcaccaggggagagattttctttttcctattttatggacaaagctgtccttcagtgctctaagatacatgaaggtagctcagtttttccctcattgcagtgtacagaaccacatctcctattcctcagtagactatcccagcatcattgcccacttactgctccagctatgagttcctttttcttttctggcaccatgggatttctctgtttagaaagattggtcgtatattaaaatttttttttgtaatttagcatgtctatgtttttatgaaagggcataggcctatgtacttcagctcagtctaataaatcttgtttatttactgtgggagagctttaacttcaaattttttattaaattcattatacagtagaaagctattagcataatatgtgacaaacttctaatatctgggttgccagttggaaatagtggcaattgtcttttccatgtgatcttttttcctctactattttattttaattgtaatatatactctggattagtgcgttttttgacccatatggatgaagaagatcaaagtgacaaaaaggagacttcagaacctgaattttcaataacagaaaattattctggtcagaaaacctgtgtgtttcctactgccgattcagctgtcagcctttccagttccagtgatcagaatactacttctcctggtattgttctttactttttcatttacacatactcttattctccattataatgttactgaacatgattta

SEQ ID NO: 33496 - DNA, 2300 bp, Homo sapien
agccaaggtctcctgacaggtgacctccaccacgcctggctaatttttgtatttttagtacagacagggtttcaccatgttggccaggcttgtctcaaactcctgacctcaagtgatttgccctcctcggcctcccaaagtgctgggattacaggcttgaaccaccacatcggaactgagaaacattcttaaatgttcattatctaagcatgtctttgagaaagccttggaggtacattgcttttgttgctaagtagtttatcgaagttggcagctgtttcctgagtctgctattcatctaggtgaaggcccaagatataaataataataaaatttgaaattacattaattatttaaaattacattgttaagttgtcactctttgtttctacctatcaccttttatgcataatatctaattatctgtattcatatattttaattttttcttgtgtttgtgaaatttttttgttttctctttttgtcttaaatttttaatgtactacaagataaggaagctacttctcaagaagttgtttctgaatgtggtaccaagcagcaaataatttcttgcatatcatgtgtgatttcttttttttcctaagaacagtatgacttattaaagatgtatctgcattatgccaaagctagtcaccatcccccttaaaaaagcggttaaaccaatcaattaagagagagggaatgatttcagtatttttattttccttttttttctagttttaagtggtttaaatttaagctttggtaacaagtactcaatatgagttacatttgaaaatagtgctttattgaaaatacagtgctagaagataaggctagaggcctagaacaaaaggcacagagttaaactgtttgttgatctgctgtgacaggcctgtttattttactgttaaataagaagcagttaacgtttgtgaaatttagatgttaaaacaccttaagtggtaaaatttaattataggctctgtgaatatactatacaccactgaatgatacccttttaaagaatgtgaattaggccgggcgcggtggctcacgcctgtaatcccagcactttgggaggccgaggcgggtgaatcatgaggtcaggagatcgagaccatcctggctaacaaggtgaaaccccgtctctactaaaaatacaaaaaattagccgggcgcggtggcgggcgcctgtagtcccagctactcgggaggctgaggcaggagaatggcgtgaacccgggaagcggagcttgcagtgagccgagattgcgccactgcagtccgcagtccggcctgggcgacagagcgagactccgtctcaaaaaaaaaaaaaaaaaaaaaaaaaaaagaatgtgaattagctgggcgcagtggctcatgcctgtaatcccagcactttgggaggctgaggcgggcggatcacgaggtcaggagatcgagaccatcctggctaacatggtgaaatcctgtctctattaaaaatacaaaaaaattagccaggtgtggtggtgggtgcctgtagtctcagctactcgggaggctgaggcaggagaatgaacccgggaggtggaggttgcaatgagcttagatcatgttactgcactgcagcctgggtgacagagcgagactctgtctcaaaaaaaaaaaaaaaatgtgaattatgtttcaataaagctgtcaataaaaataagcaaataacaagaaagtgttcaagttaaaaaaaaattagttataggttaatcttctaaaatctggttttgttgaaacttccctaaagtagacaagcatgacttactatatctgatacggaaataggaaattttagcattttcttgatgtaatttagttactttattgttcttgtaaatcattcatatgagagaaacaatagtcagcttacattcaattatgaattactttaaattgcccttagaatagaatgtgctttaattatttatacccatgtcacttctacttagatttcaagaagtacaatttatgttgtttgttgctaacttgttcatacaaagctgatgatttggagcagtttacagcctttttttgaatgttcctgattatttcttttttaattttcagaacatgagcctttgactgctcctcagctcttggtcccagatgtctatctaaatctgaagctttccagtgaaatgtcagagaaaccttggtcaccctcaatacctcatacagtaacaaacttggtttgtgttttattcagaagttttaataatacctttgcgctaaaatgtattatggtcatgtagacattattcaat

SEQ ID NO: 33497 - DNA, 2300 bp, Homo sapien
cctcagcctcccaagtagctgggactacaggtatgcgccaccatgcctgactaattttttgtatttttttatagagacagagtttcaccatgttggccaggctgatcttgagctcctgacctcaagtagatctgcctgccttgtaacaattctttcaaaaaagattcatttttcctggttttatagttgtttttacagggaaatgaataatcatatagtgttaggtgtatataatttacagtgtgttagtctactgacacaatcttgtctttgtaacttagcatgctcaatagcccagtgtgacagagtggaggcaattcacacagtataaagattaggtcagagcaggactgggagtacattttactgtttgatttctcacttgcttgtagactgttgttactctggttaagtggctaatatgagactcaaaatactcaagacagtaatacctatttgttttacctgttttctttttgggtactattcattttaacaggagttcacagaagaggttcagtgtcaaagggaagaaccactggagacaattatggaggaaaaatcgactgaacaaaaagggtaagggggaaaaaagtatgacagtgattgtcactggttacctcagtgaagctttcagcttttttccttcataatttacaatacatgatttagggtggtattgtgtttctagtgaaactgtaacttcagtttatagttatggtaaaatgatttttggtaaatgttatacttctatgtattgatagagtgaaataaataatgatatctaaaatgccttttgttctctcatcactatcagccttatcaaaataaagctgtaaataggccaaagcttatttagctgctaagtagggaaccacttttcatacttattccatttttattgaatcaaataaagaatgattataaattattttatgtatgtataaaatctttcactgttgtgatgattactatacactattcattagggctatgatgtacacatacactgccggctagcttattgcttcaaggagagctgaaggcagttttcatgtgttgcagtttggacatgatttctaaatctttagaattttagaagttctaaattttagaattcccttagatcagaaaggcaacatggccaggcgtggtggcttatgcctgtaatcccagcactctaggaggccgaggcgggtggatcatgaggtcaagagatcaagaccatcctggctaacacggtgaaaccctgtctctactaaaaatacaaaaaattaactgggtgtggtggcgggcgcttgtagttacagctactcgggaggctgaggcaggagaatggcatgacccggggaggcggagcttgcagtgagccgagatcaggccactgcactccagcctgggcaacagagcaagactccatctcaaaaaaaaaaaaaaggcaacataattagattttctttttctgttcagtatgcaaattttgttagtttttctgtggacagttaaaaagaatgcatttaatactatgggcctttacaagtaatttagatacttctattcataaaaatgattccttcggaaaattacccaagaagagagagagagaagacaaacactaatctttacagtttcttttttcttttctttcttttctttttttggaaacagggtcttgctgtgttgcccaggtgtgcaccaccatgcctagctaatttttttgtattttttttagagatgggattcgccatgtcacccaggctggtctcgaactcctgagctcaggtgatctgcctgccttggcctcccacagtgctgggattacagtcgtgagccatcgtgcccagcctctttacagtttcaaatgtgacaatgggctctagggttctgagcatagtgtctccctcttctataggtgaaatttgggtcttaactaacctcatgtcccctcattttgggttctgttgttttcattgctgagcagtcagccgtatttaagtggtgttttaagtcatccagacatatttttttgcttttgcttagatctgttactaattgctatggagacaaatgtaaacagattgtaattatgagctaaacattatagaagattagaggatgtttagactcttagatggctgagcatagatcactcataccttagataatgcaaagaatatcttgcttactaatcacctgttaatttttattgatagtatgatcgaagccttttcacatcctgggcataccactcctcaatcaatgcaagtagatacgagttcagaaatttctaggtaagaagt

SEQ ID NO: 33498 - DNA, 2300 bp, Homo sapien
attctgaagtagtttattctaggctgaaggatgtgagtgtgtgtgtgtatgtgtgtgtgtgtatgtgaatatgtgaatttgttttattttttacttattcattttttgagacagagtcttgctttttgttttgttttgttttttgttttttttgagatggagtctcactctgtcacccaggctggagtgcagtggcgtgatctcaactcactgcaacctccgcctcctggattcaagcgattctcctgcctcagccttgtgagtagctgggactacaggcacgcgccaccacgcctgactaatttttgtagtttttagtagagatggggtttcatcatattggctagggtggtctcaaactcctgaccttgtgatccgcccgcctcggcctcccaaagtgctgggattacaggtgtgagccactgcgcctggtccagagtcttgctttatcacccaggctggagtgcagtcttaggatcacagctgtctgtagccttgacctcctgggctcaagtgatccttccacttgaatcttccaagcagctgggaccacaggctcatgccactatgcctgactaatttttaaattttttataaagacagggtttccctttgttacccaagctggtctcaaactcctgagctcaagtgaccttcccaccttggcctctcaaaatgttgggattacaggtgggagccaccacactagtcctttttttcccttgagattggtttctgttatcataaggtatacagtttatatgatactgtgatattagtcatccttgaaatgtgtatttctaggtaatgtatatggaaattttaagtgagacaaaaaggatgtaccttgtgtttttagctgcatgtatttttgtctactatgtcattttgaaataactactgaatgtctttatgatatagcaaagggaatgaaatgaggatattataatttttttgccattgttttgtggcctgaaaacaatgacaatatgccttacaaatttgtaaggctgatttcttttgaatactatttaggtagtcagatttgctttttccagttagaataaagacttgatcattgcttcagcaacaaatattgagttgtagaaatgcagtaaatatttgataaatgaataagaggattattcagaattcctgtagaaagaatgaataattttaaaatatggtgaaaaataaagggttcaataaatactaaatactttaaatggtttgctttagatggtagagaatcgtgacactgggtgtcagattggacccaatattgagagggagagcaaatcagatgctggcggttcagttgcagtagcaactccaggtggaactgaggaaagaaatggtcagaataaatcttgtcaaaatatcttgaagtaagttgccgattatactcttcttttcaatataagacatgtagtttgatggcatttgggcttaaagggaagatcaaacccttgaaagttaaaggaatgagcattttttgaagtagaggagcaggcagtgagctttctgaggtgctttaacaattcattgcaaattgtatttcttccctcttggtctagcttatatcttctgagagagcaattaattcatcctgagggattcctttatcaatttatttcccatatcagaagttgaactaatcctttcatccatttttatatatgaagcaatgctaggagtaacatagctttgaataccaaggcaaaacccattatagcatgaagagtcctttgtgagaatgataattttagttgaaattattccaatcattcgagtaaataaaaactatgatgtttagttatttactgaacaatctttacctgagcttctgtgtatcagaattttttaaagaaagattttataaatatgaaaccaaagtttgttctttgcttttaaaaaactgaattaagccgagattgcgccattgcactccagcctgggcgagactccatcttaaaaaaaaaaacaaaaaaaaaacccaaaactgaattagctctttatctccaagaatagttgtaattttagttgctgcatttttttcagtagaatgccaactgaagcaaaaaatcctgatataaaagaaatcaatgatgatattatttccatcactcataatactaaaaaagaatttatagatattgatgagaatcttttagaagtagaagcatttacagaagaggaaatggatatgcacatatcagactatgaaggtcagttcatttagataatctatttttttggctttattaatttgaaattggtaaataatattatctgaggta

SEQ ID NO: 33499 - DNA, 2300 bp, Homo sapien
ggaccacaggctcccgccaacacgcccggctaattttttgtatttttttagtagacacggggttttaccacgttagccaggatggtcttgatctcctgacctcgtgatctgcccgcctcggcctcccaaagtgctgggattacaggcgtgagccaccgcgccgggctatagtgactacagttaatcgtagtgtattgtttacctgaaatttgataagggaggatattacaatggtaaatgtgtgtattgatggatgtgctaattaattcgactatggaaatcagcacagaatgtatacgtatattaaatcatcacattgtacaccttgaatatacacagtttttgtcaattacatattttaaaataaaaaagtaagttgatactaaactcctattagcagacagatgctcagagagaggctttgacctgacttcaaaagattagtaagaaatgtgcatttatattttgagttaaaataaaatatttgtggaatggaagaaaaaaaaagaatgatgtttctcataaaacttaaacaattttttttctgaaggtagcagaaattttcgtgaaagcatttccctatcctgaggacgtgagggttcctttaagagacaaatatcactctcttcaccagagactcagacactgtgttgtgaaaggtattatttgttgtttctcagatagctaacagataaattgcagaagattccctttttgttttgaaaatatttatttactgttgcttatgtgtctatgcatttttgcctcttccttgagataggagtatgagaaggtagaaacatttctccattgcagaaagactaatctcttgctttggaaccagatgaagctgacttcggctcatggctctgtcagtcagtaactgtgcgatcttaggcaagttgctcagtctctctgagcctcatatctttatttgtaaagtgggcatagtattacctgctttatgatgtgtattcagagaggattaagtaagataatataaaatgagcatatggtactttgtatattgcaagtatttgttgaaaacaagtaatttccctttatggttatttatgcttctaattttgttcttcaaaattagaatacacacatttcttactgtggtaaaatgcatataatataaaatttaccattttagccatttaaaatatgcaattcattgacattaagtacatttacaatgttgcagaatttttaaagaattaaaattaccctgctttttaaaactataattcagtatttaagtccaggtatgtccagtgattttgtattattctattaatatattgtatttgtgatttgtatttttcttaatacttttttttgacatcctctaaaatattctgtttatgtattaaataatgttttaaaatgtttctataggcagccttgaaaaccttcccttgctattgtttcttattacttttagtaagaaaaatgtccttgatttttttggctagaattatcctcattttatcttattctctatgtgataatagaaaaaacattcattattctttttattaaatataattatccttctgagttttaaaacagttaaatcacttaaagttttttttttccagggcatactttttcttcatgaggtctaggttctgtctcttttactgtgttctttaatggaccttctttagcttctgcagttctactttaaaatatctttccagtaaatactgaagaaaacacgaccagtaagaatgtggaaataagccttagtcatcagttaggtttcttgtccccaggagggaccagagttgggtctcctatgtcttgaattgaaatattttaatgaacactaagactttttattcttttctttccaggaccccagactgaggaaatgatgtctgttgtcatgcattctatccagaaagtgagggtgaaagctctaaaacgtgtgcagagaaatataggctcttttgaagtgaatatatgggaaccaattgaagaagagaaaccagatgaggctccaggtgttgacagatattccctggggactagtttgagcagaagtacactcacagaactaggagattctgtggttcacagtgatgcagatacgttctctgaagctttgtcggttgaagaaaaaagtaggataaatatctatcaaaggtacaattgagatcttttaatcactggcattcacttcctttgaaaagtagctttcaggcatctgatgagctgatttctggtcccagcaaccctcactgattgtgctattaataatatgaatgataagtgccaccccctccact

SEQ ID NO: 33500 - DNA, 2300 bp, Homo sapien
cccaaaatcttatactagtgagctactattactaatgggagtatattaagattctcagatctaatggtacagacaaaagcattaagaatcttgggtggtcatggtggctcacacctgtaatcccagcattttgggaggctgaggcggaccgattacttgagctcaggagttcaagaccagcctgtccaacatggcgaaaccccatcttgaccaaaaaaatacaaaaaaaattagccggtcaaggtggcgtgtgcctatagtcccagctactcaggagactgaggcgggaagatggcctaaaccttggaggcagaggttgcagtgagctgagaatgtgccactgcactctagcttgggtgacagagcaggattctttctcaaaaaacaaaaaagaaaaaaagaaaaaaatcttatatcagtgctttttagattatttttgtagtaagccctgccccgtttatcttcaaaaaaaaaaaaaaaaaaaaaaaaggaaagagaaggaaaaacgggaaataaataatgaaattctaagcttgcaaggctgtcgtgcctgggtcattttgtatagatacctccatttaaaaaataaaacttaaagttgtgaacagttcttaggtgtatgtgcacataattactaactacagttgaccattgaacatcacaggggttaggagcaccaacaccctcatgctgtcaaaaattcgtgtataacttgactcccgaaaaacttaaccattaatagcctactgttgactagaagccttactggtaacataaatagttgattaacatatattttatatgttgtatatattatatactgtattcttagaataaagtaagccagagaaaggaaagttgtattaagaaaatcctaagaggccaggtacagtggctcatgtctgtaatcccagcactttgggaggccgaggcgggcagatcacctgaggtcaagagttcgagaccagtctgaccaacatggagaaaactggtctctactaaaaatacaaaattagccgggcgtggtggcacgtgcctataatcccagctactcaggaggctgaggcaggagaatcacttgaacccagaaggcgaggtttgtggtgagctgagatcgcaccattgcactccagcctgggcaataaaagtgaaactctgtctcaaaaagagaaaaaaaaatcataagggaaaatacatttccagtattgtactgtatttattgataccacaagtttatgttatctgtttccaagattaattgtctgaaatggtagacaaccatagctgcagacctcaatccatggtatgtctcaagtaattcaacttttacttgtaatgtcatgatttttttctgcttattcagaacacttccaggatctctggtggcacttcctgtaggtcttatggtgttattcaaggtttatggtactgcactaaacgtgatgagaactacacaagaattgtgaggttgctttttattgccatgtgcactttactagagagatgaactgctcatgcagagatgattagcatcacacagtattttaagcaaatacttgcaacacttgaactcctcaaaatagcaacaggaagtagctgcaaaattaatacagtagtacagtaggaactacaatgaattttatgcagttatttaatactttatctttatgtgtgtttacatttctcttgactgtgaacagtgccatatatggcctgtaagtgtttgtgtaaattttgataatttttttttgagtcagggtctatctagctctgttgcccaggctggagtgcactggcacaatctcagcttactgcagcctccgcctcctagactcaagcgatcctcctacctcagcaccctgaatagctgggactataggtgcgcacaaccatgcccagctaatgtttctttttattgtatttttctgtagaggtgggatttcaccatgttgcccaggctggtctcaaactcctgagctcaagagatcagcccaccttggccttccaaagtgctgggattataggtgtaagccactgtacccagccaattttgataaattttaactttttatagtttatatgtattttatggtactaaatgataaaataattatttacatatattttttatattgatgacatacctttttctttttttattgatatttctaggttatgtggtatgcctacaaattttttcaaattgtcacaaatctccaaaacattttctagtacatttatggaaaaaaaatctgtatatataagtggatttatgcagttcaaacccgtgaagttcaagg

SEQ ID NO: 33501 - DNA, 2300 bp, Homo sapien
ttctcttgcttaacatatttgggagaggaattaagaatagctaggaatctttggtcaaaaacttttctgcctaaaattaagaagtaagtttgtagagttgttttcattttaatggtaataaccatatataaatttagacatagactaaaacttagttgacagcatcatctgtctgcttgattttatatatttttaagttcttgttatctcctcttctaggcaaatgagcttctccagcgttcccgacaagttcaaaataagactgaaaaagaaagaatgttaagggaatcattaaaggaatatcaaaaaattagcaatcaagtggacctttccaatgtttgtgctcagtatagacaaggtgagaaataaaatgtttcttgtatcttttactcaactcaaaagacaaacaatagtgtatgaatgaagcaagctaatgatgaaaagccactttccagatgcaaatcttctttcagcatcagaggccgagtgaaaggacgtaggaatgtggtatcattgtgttgcaatatttgatgactacactgacctgcagaagctgtaatgttctttctattttttgaaatgtacttttttttttttttttttttttttttgagagtctcgctctgtcagccaggctggagtgcagtggcacgatctcagctcactgcatcctctgcctcccaggttccagcaattctcctgcctcagcctcccgggtagctggtattacaggcgcacgccaccacgcccagctaattttttatttttttatttttttattttttttattttgagacagagtcttgctctgtcacccaggctgaagtgcagtggtgcgatctcagctcactgcaagctctgcctcccaggttcacgccattctgcctcagcctcccaagtagctgggactacaggcgcctgccaccatgcccggctaatttttttgtatttttagtagagatgggtttcaccatgttagccaggatggtctcaatctcctgacctcatgatccacccacctcagcctcccaaagcgctgggattacaggtgtgagccaccgcgcccggccattgcccagctaatttttgtatttttagtagaggtggggttttaccatgttagccagggtggtctcgatctcctgacctcaggtgatccacccatctcagcctctcaaagtgctaggattacagacatgagccactgcgcccagccgaaatgtataactttttagcattagagtttcagttcttgtccagttcaattactgtatgttttacattgctttctggattacatttatttttcagatatttaaaattttttattgagttttaaggtataatctgcttactttttaaaaaattactttaaatcaaatctaacataatgtaaaggccataactatttgcacaggtattattttgaatcccaaggtatttttttccccccagtagggaactaaaactttcctttttgttatttgaaataggatcttttttttccaatgaagaaatatatatatatatatatttttttttttcctttttctttttttttttgtgagacagagtcttgttctgtcacccaggctggagtgcaatggtgcaatctcagctcactacaacctctgcctcgctagttcaagtgattctcctgcctcagccttttgagtagctgggattacaggcgcatgccaccaggcccagctaatttttgtatttttagtagaggtggggtttcaccatgttggtcaggctggtctcgaacccctgaccttgtgatctgccccctctcagcctcccaaagtgctgggattacaggcgtgagccaccacacctggcccccaatgaagaaatatatttaacagttgccttttaggcatattaagaccttttccttctgaagacctatcagaaatattttatgttagcagggtgactattgtacagtagagacataaccttgatcattattttcatgtgccagctaaggaaaaatgtatccaacttagtagtaagtcataggtcttcattcttttctttcccatcagtgagattttatgagggtgtggtggaactttctcttacggctgcagagaaaaaagatcctcaaggtcttgggcttcatttctataaacatggagaaccagaagaagacatagttggacttcaggccttccaagaaaggtgcattccattacgttagcagattgtcatctttatggatacagacttttctttgcataatgttttttgttttttgttttatgttttttttttttttttgagacagagtc

SEQ ID NO: 33502 - DNA, 2300 bp, Homo sapien
acctgccttggcctcccaaagtgctgggtgctgggattacaggtgtgagccactgtgctcggccttgttactcttttaaatacaatgttaaacattttaattttcagtttgagttattcacaaatattaatagatgtaaccaacatgaaacaaaaactctctggaatcctgaataatttttaagggtatcaagggggtcctaagaccaaaaaaattcataattatctgttctagggaagaggtcagcaaacttttcctgtaaagtgccagagtccgtatttaaggctttgcagtcttttgtagaaattactcggtttagcagttgtagtgggaaagcataggcaatatgccaatgaattaagttagttagattacactttggggagctttacttctatgcaggaatatcacagcaacgttgttgaatcttccaatttatggagttgaaaactttgtgtattttgtctcaaattaaaaacaaactcggtgccagaccaccacttttcaatctatggtctaccaaataaagtaaactcacagctagagacccaactgcctatctatataccaatgataaaaaatccagtttttcttggtatattggctatgtcaaattttaagtgtagattggtaacatcaaagaactttcaattttcagaaatgtagtcaagtctttgagggagtaaaaatgtaattcaaatagcaaaagaccaatttagagtaattcagttattgatttgtgaaattctgaagaacataactggaagctttcttaggtgagattctaaataagagcagctttctaaaaagtgctttgatttacccactcaggttgccttctgtagtaaatgaagcctcttttacctctctgctttctcctatcctgctatagtttatacctatccaaatagaaaaattataatgaagccctttgtctctgcttgaagcaccttaaggacaggaaacactgtgttagtttgatagtcccagcaccaggcacaaggcaagtattcagtttcttaggattgtatgaactcttgggttcctatctcatacgagttcctatactagcgctgggaatggaaagatgaattagaactgtctgctatctctgccacgataaaaagcacggcagcggtccacctgcactcagcttcttcttaaacacgtattttatactaaggggcaacaaagtcaaaagacagcgacacgcaaatggaaaagcctgatgaattctaatttacactgaagcccgcgaagaatatagtgagatactggtttatatccctctctgtgacagcgacctaccaattcttaactactctcacaaaagcagttacttggagaaccaaactgcgcgctcatgcgcgaactcatatagctgcagttagcggataccgacgcgggaagttccaagactcaggtcgagcacgcgcttaaaccaacggaacctgaccaacctcctaggccagacacacgacctagctcccacctaccgtatccctcctccctccttcctcctcaccctatccaaccccatcccgcccctctccttccctgttccctcccctttatccttcccttcctttccctccctcccttccctaaataacctaccctaattttaccctgccacaccccaaaaccctcaaccccctcgaaagcatcagcagcctcctagctccacccacaacctctagccccctcccaacagcttcctcttcccaggccagaacggcgtcttccagttccccaccggatgaagcggaagtgcgtcatgtcgaggcgccaaggcgctcgtttggcgcgcgcgccctaggcggcggatctaagctaacttcttggatcttttcttgtttctccttggtttttgactttttctggaccctggtgtctacgatttccgagatgccgtcttctttgttgggcgcggcgatgccggcctctacatctgccgcagccctgcaggaagctctggaaaatgctggacggctcatcgaccgtcagttgcaagaggaccgcatgtacccggacctttccgagctgcttatggtgtctgccccaagtgagtgatagtgaccctgctttctcaacctaaaggactctcgcctgacttcctaatttgctacttatccccagcgttggtcccggcgaggatatgctgagatttatggcactgttggctgcatttttggagaacagcaagcagcttcttttcaggttttttcctttcctcactttcttcattgtagatacttgagagggcaagagtgaagagcaagctcccagttgaagcagaa

SEQ ID NO: 33503 - DNA, 2300 bp, Homo sapien
ctgttttagaaactatagtgatttctcattttaaaaaagtgttatattaacatggattaagcttggtatgctttttttttttttttttgaaacggagtcttactctgttgcccagggtggagtgcagtggcacgatctcgactcactgcaacctctgcctcctaggttcaagtgattctcctggctcagcctcctgaacagttgagactacaggcgcacgccaccacgcccagctaatttttgtattttagtatagacggggtttcaccatattggccaggctggtctccaactcctgaacttgtgatccacctgccttggcctcccaaagtgctgggtgctgggattacaggtgtgagccactgtgctcggccttgttactcttttaaatacaatgttaaacattttaattttcagtttgagttattcacaaatattaatagatgtaaccaacatgaaacaaaaactctctggaatcctgaataatttttaagggtatcaagggggtcctaagaccaaaaaaattcataattatctgttctagggaagaggtcagcaaacttttcctgtaaagtgccagagtccgtatttaaggctttgcagtcttttgtagaaattactcggtttagcagttgtagtgggaaagcataggcaatatgccaatgaattaagttagttagattacactttggggagctttacttctatgcaggaatatcacagcaacgttgttgaatcttccaatttatggagttgaaaactttgtgtattttgtctcaaattaaaaacaaactcggtgccagaccaccacttttcaatctatggtctaccaaataaagtaaactcacagctagagacccaactgcctatctatataccaatgataaaaaatccagtttttcttggtatattggctatgtcaaattttaagtgtagattggtaacatcaaagaactttcaattttcagaaatgtagtcaagtctttgagggagtaaaaatgtaattcaaatagcaaaagaccaatttagagtaattcagttattgatttgtgaaattctgaagaacataactggaagctttcttaggtgagattctaaataagagcagctttctaaaaagtgctttgatttacccactcaggttgccttctgtagtaaatgaagcctcttttacctctctgctttctcctatcctgctatagtttatacctatccaaatagaaaaattataatgaagccctttgtctctgcttgaagcaccttaaggacaggaaacactgtgttagtttgatagtcccagcaccaggcacaaggcaagtattcagtttcttaggattgtatgaactcttgggttcctatctcatacgagttcctatactagcgctgggaatggaaagatgaattagaactgtctgctatctctgccacgataaaaagcacggcagcggtccacctgcactcagcttcttcttaaacacgtattttatactaaggggcaacaaagtcaaaagacagcgacacgcaaatggaaaagcctgatgaattctaatttacactgaagcccgcgaagaatatagtgagatactggtttatatccctctctgtgacagcgacctaccaattcttaactactctcacaaaagcagttacttggagaaccaaactgcgcgctcatgcgcgaactcatatagctgcagttagcggataccgacgcgggaagttccaagactcaggtcgagcacgcgcttaaaccaacggaacctgaccaacctcctaggccagacacacgacctagctcccacctaccgtatccctcctccctccttcctcctcaccctatccaaccccatcccgcccctctccttccctgttccctcccctttatccttcccttcctttccctccctcccttccctaaataacctaccctaattttaccctgccacaccccaaaaccctcaaccccctcgaaagcatcagcagcctcctagctccacccacaacctctagccccctcccaacagcttcctcttcccaggccagaacggcgtcttccagttccccaccggatgaagcggaagtgcgtcatgtcgaggcgccaaggcgctcgtttggcgcgcgcgccctaggcggcggatctaagctaacttcttggatcttttcttgtttctccttggtttttgactttttctggaccctggtgtctacgatttccgagatgccgtcttctttgttgggcgcggcgatgccggcctctacatctgccgcagccctgcaggaagctctggaaaatgctggac

SEQ ID NO: 33504 - DNA, 2300 bp, Homo sapien
aacgataatatgggagcagtggacttggctgatcagatgctcacttcttatccagcttagcgccaaaggtacaaggtttggtataagatattctttcataggctgtgtgcagtggcccacgcctgtaatcctagcacttagggaggctgaggcgggtggatcgcttgagctcaggagttcaagaccagcatgggcaacatgatgaaaccctatctctacaaaaaatacaaaaattaggccgggcacagtggctcacgtctgtaatcccagcactttgggaggctgaggcgggcatatcacttgaggtcaggagtttgagaccagcctggccaacatggtgaaactctgtctctactaagaatgcaaaaattagccaggggtggtggcagggcctgtaatcccagctactcgcaaggctgtggcagaattgcttgaacccaggaggcggaggttgcagtgagctgagatcgcgccactgcactccagtctgggcaatggagcgagactctgtctcaaaaaaaaaaaaaaaagtcgggtgtggtggcggtcacatgtaatcccagctacttaggaggctgaggcacaagaatcgcttgaacccaggaggtggaggttcattgagccgagattgtgccactgcattccagcctgggtgacagagtgagattctgtctcaaaaagaaagagattcttctccaccttctaaacgttaaagtgttgaactcccacattctgtttaagaaggacaatcctgagcacacgattagccttgtaaactttagactgacaggccaggtgcagtggctcacgcctttaatcgcagaactttgggaggctgaggtgggcagatcacaaggtcaggagattgagaccatcctggctaacacggtgtaaaccctgcctctactaaaaatagaaaaaattagctgggcgtggtggcgggtgcctgtagtctcaaatactaaatagccgggcatggtggcgcacacctgtagtcccagctgctcgggaggctgaggcaagagaatcgcttgaacctgggaggcagaggttgcagtcagctgagatcacgccactgcactccagccaaggcaacagagggagactcagtcaacaacaacaacaacaacaacaaaaaggcagagcgcggtggcacggggcctgtaatcccagcactttgggaggccaaggtgggcagatcacctgaggtcaggagttcaagaccagcctggccaacatagcaaaaccccgtctctactaaatacacaaaaattagccgggtgtggtggcaggcgcctgtaatcccagctactcaggacactgaggcaagagaagagcttgaacctgggtggcagaggttgcagtgagccgagatcacgccattgcactccagcctgggcaacagagtgagactctgcctcaaaaaaaaaaaaaaaaaaaaaaaaagcaaagggtgtcgcctgtaatcccagcactttgggaggccgaggcaggcggatcacttgaggccaggagttcgaaaccagcctggccaacatggcaaaacgtcgtgtctactaaaaatacaaaaaattagctgcgcgtggtggtggacgcctgtaatcccagctacttgggaggctgagacaggagaatcgcttgaacccgggaggcggaggttgcagtgagccgagatcacgccattgcactccagcctgggcgacagaggctccgtctcaaaacaaaaacaaaaacaaaaaaaaaacaaaccaaaacaaaaaaccaaaaattagccggcacctgtaatcccagctactcgggaggctgaggcaggagaatcgcttgatcccgggaggcagaggttgcagtcagctgagattacgccactgtactgcagcctgggcgacagaggctctggcttaaaaaaaaaaaaaaaaaaagggaaaggatgttatagaaactccagatactacttctcccctccagtggtctgagttgcgcggcgctttcccgcctgtccggtagggcggtgccgcgcagaaagccgcggtccctctgcggaaggcgccgctcttggcttcggcggcgccgctgtagcttgaaggcggtacttcctccagcatttgccgcaagttattggcaagttcccctgcagttgtttgggctgtccctgtggctggttctggggtgtgcggccagccatggagcgctctgggcccagcgaaggtgggtttcatgaggcgagtccgggcggggtgggccgtgtcgggggagctggggcgccgcactaactaggccgcctctcttttcctcttgctcca

SEQ ID NO: 33505 - DNA, 2300 bp, Homo sapien
tcgccacacttctaattgaggatctccacgtccaatttaaaaagccctccgtcggccaagcaggaaaaaagggaaaaccctcttaagacggaagggaaatctagtgcctctgtggcttcctgctggcgggcaccgcgatttggaatggcgcattaaccccgcgcctccatgctcctccggtcggaccgccagccatttcgcacgcacccgggagctggcaccggcggggggcttgaggggggaagctcgcgttccccaggtcctagctgccaaagtacctttctgggctcattttgcatggcctggtgcagttttcctgtgtctgcacatcgcgacccagaacctagctttttcccgagtttgcaaaccagcccgcgaggcaagaggcgctcggtgctgcaggtcactaggagtttctagtccctacaccctctcgagcccaacagctgcatagcgaacaaacagacgctcaggagatgtaaaatgcattagtctctgcagaggtgggaggtggcggccgaattaaaggcttccccgggttgcctgcaccgggacagggagtggggttccgggtagagatgaggactggaaccctggaatggaggcgggggtgcctgtgaactaatggctaggaaaggcactgaggtttttgcattaacctgggttttgcatttccctcccgcatgggaaaaaaaaaatcgagtttttcctaagaaccgttttatggagccggtcgaggggataggataatcgactgcacgaatctcgcagattccgcttgaggagattctctctaggtcactagtgccctggagacgaaccctgggattaggaaggcactggataacactgcaccccaagatgcctcggttcttccccgtctcctcattggttggaactcgcccccaaatttacagcccctttttctaacccacccccagctgcgtggccctcctttgtaggggtgtgaggattgagaagccaaacagagcccacctcgggctgaaaagagctgaaccccctactctgcgccgtaccacggtctaggccttccagtgccagagcacctccaaagcgtccgagactgggtacagtcgtccaggcgtgacgggggcgcggggagccagtgactcctctgggaggggaagggattagggccagaatctctcaaaggtgcaaaaatccagtcaagagagggttttcgggtataccacggaggattaaaactttcaagacaaatgcagtctttgcctaacagcaatggtaaagcatttactgagctcttactacatgttccgctagagcttgtcatgcgtgatttaatgttcataactttaagaggtgggaggagtattttaaatcgaatcagtgctttgggaagttaagtaacttaaaccagatatcccatacaggccaaaagtctccaagtccctgctaacttcttgctctcgcaacagaatacctatttaggtgggaagaatgaggtgtgggcggcaggctgggtgagtggtgcccccgagcctgccctcgactagccagaagcccggttgggacccgaggcaggggaatgcgcttgattttatttccaaagagaaacaccgtccttgcttgggccgagggctcgttcaggggcctataggagctaccgggacaagaaggggaggtctctggttggggtggaggacgaagggtgggaactacccgattgccccccaggaatgggggatgttgcgcaccagtagaggggactggacaggaatcgtggtggtgggggtggggggttaactggaggggacagcagccctgcttgaaactctgacccctaagaccgtgtggtggagaagggcagctgcaacctgaaccaggagtgcgagctgctcctggggcgcgctgaggagggagaagcgaactggggacttgcaaggagggcaggagtgcccgaggagccgctggcctgcagcggtgccggaggagggcggtgacgaggttggagaggggcgcagggacccgcagggagcccaggcttaacgtgcattctgcggttctctcccccacctcccgcctgcccgcgcaggtgccgccgccggacgggactttaagatgaagttatgggatgtcgtggctgtctgcctggtgctgctccacaccgcgtccgccttcccgctgcccgccggtaagaggcctcccgaggcgcccgccgaagaccgctccctcggccgccgccgcgcgcccttcgcgctgagcagtgactgtaagaaccgttccctccccgcgggggggccgccggcggaccccctcgc

SEQ ID NO: 33506 - DNA, 2300 bp, Homo sapien
acacggctcagacggtttctggtgccccctgctgccgggaactcagaagtgcctcgcggcgagcggctgcttctgcgagcacttctgtggctttcctgggcgtccttgcctccccaggcctggggacccacaggtgccggcgcccacggcctgctgcttttgccctgccgggacgtggtggtcccggacccagaaggggaccagcttgccaggcacgagaaatggtgcgcggtcacctggcagagcagagcccccgtcacttgaggagcagagcttggttctcgcacgtggcggcgcgtaaagcagtttgcaccgcgggcaaaggcccatggttgaggagaagcgcgtcgggcagatgtagatgtgttttgggaaagcgatagagagacaaactgagaagccgaggggtggagcccacacggactctaagaaaaacgtcctagtagacgctgtgtgtgccgagtcccccaacctccccccttttcccccgcccagcaaataccgagaacgaaagagcccctcggactggagccggtcccggcggcgctcagagggaagaatgcgccctccctgtcccgggggaagaggggagctcgatccgggcgctggcggcgctcggccgagggcgggaaccgcagccgggagcctcctctggcgacgcggggagttttccactgtgtagtcttttgccagcttcgccacacttctaattgaggatctccacgtccaatttaaaaagccctccgtcggccaagcaggaaaaaagggaaaaccctcttaagacggaagggaaatctagtgcctctgtggcttcctgctggcgggcaccgcgatttggaatggcgcattaaccccgcgcctccatgctcctccggtcggaccgccagccatttcgcacgcacccgggagctggcaccggcggggggcttgaggggggaagctcgcgttccccaggtcctagctgccaaagtacctttctgggctcattttgcatggcctggtgcagttttcctgtgtctgcacatcgcgacccagaacctagctttttcccgagtttgcaaaccagcccgcgaggcaagaggcgctcggtgctgcaggtcactaggagtttctagtccctacaccctctcgagcccaacagctgcatagcgaacaaacagacgctcaggagatgtaaaatgcattagtctctgcagaggtgggaggtggcggccgaattaaaggcttccccgggttgcctgcaccgggacagggagtggggttccgggtagagatgaggactggaaccctggaatggaggcgggggtgcctgtgaactaatggctaggaaaggcactgaggtttttgcattaacctgggttttgcatttccctcccgcatgggaaaaaaaaaatcgagtttttcctaagaaccgttttatggagccggtcgaggggataggataatcgactgcacgaatctcgcagattccgcttgaggagattctctctaggtcactagtgccctggagacgaaccctgggattaggaaggcactggataacactgcaccccaagatgcctcggttcttccccgtctcctcattggttggaactcgcccccaaatttacagcccctttttctaacccacccccagctgcgtggccctcctttgtaggggtgtgaggattgagaagccaaacagagcccacctcgggctgaaaagagctgaaccccctactctgcgccgtaccacggtctaggccttccagtgccagagcacctccaaagcgtccgagactgggtacagtcgtccaggcgtgacgggggcgcggggagccagtgactcctctgggaggggaagggattagggccagaatctctcaaaggtgcaaaaatccagtcaagagagggttttcgggtataccacggaggattaaaactttcaagacaaatgcagtctttgcctaacagcaatggtaaagcatttactgagctcttactacatgttccgctagagcttgtcatgcgtgatttaatgttcataactttaagaggtgggaggagtattttaaatcgaatcagtgctttgggaagttaagtaacttaaaccagatatcccatacaggccaaaagtctccaagtccctgctaacttcttgctctcgcaacagaatacctatttaggtgggaagaatgaggtgtgggcggcaggctgggtgagtggtgcccccgagcctgccctcgactagccagaagcccggttgggacccgaggcaggggaatgcgcttgattttatttccaaagagaaacaccgtcct

SEQ ID NO: 33507 - DNA, 2300 bp, Homo sapien
tgaaggcaaagcccaaacaaacctcccagcctgccaggcacaagaaggtgcgggggcactgacggcgggagcgctgcctcctgcgaatctgtcacggtgacgcgtggaaggggtgagggatggtctgaaagcaggttgccaagaaacccgctcaggtgaagtggggagaggaaaaccagcgagaatggaggggtgggagcctgaaaagcagagatgccagtaaggacctccacaggttcccgggctaatgggatttcgggaggctcgtagagggagtggtggttctccggttttataactaaaatgataacacagcctccgggccgcgtgggcgcgacacggctcagacggtttctggtgccccctgctgccgggaactcagaagtgcctcgcggcgagcggctgcttctgcgagcacttctgtggctttcctgggcgtccttgcctccccaggcctggggacccacaggtgccggcgcccacggcctgctgcttttgccctgccgggacgtggtggtcccggacccagaaggggaccagcttgccaggcacgagaaatggtgcgcggtcacctggcagagcagagcccccgtcacttgaggagcagagcttggttctcgcacgtggcggcgcgtaaagcagtttgcaccgcgggcaaaggcccatggttgaggagaagcgcgtcgggcagatgtagatgtgttttgggaaagcgatagagagacaaactgagaagccgaggggtggagcccacacggactctaagaaaaacgtcctagtagacgctgtgtgtgccgagtcccccaacctccccccttttcccccgcccagcaaataccgagaacgaaagagcccctcggactggagccggtcccggcggcgctcagagggaagaatgcgccctccctgtcccgggggaagaggggagctcgatccgggcgctggcggcgctcggccgagggcgggaaccgcagccgggagcctcctctggcgacgcggggagttttccactgtgtagtcttttgccagcttcgccacacttctaattgaggatctccacgtccaatttaaaaagccctccgtcggccaagcaggaaaaaagggaaaaccctcttaagacggaagggaaatctagtgcctctgtggcttcctgctggcgggcaccgcgatttggaatggcgcattaaccccgcgcctccatgctcctccggtcggaccgccagccatttcgcacgcacccgggagctggcaccggcggggggcttgaggggggaagctcgcgttccccaggtcctagctgccaaagtacctttctgggctcattttgcatggcctggtgcagttttcctgtgtctgcacatcgcgacccagaacctagctttttcccgagtttgcaaaccagcccgcgaggcaagaggcgctcggtgctgcaggtcactaggagtttctagtccctacaccctctcgagcccaacagctgcatagcgaacaaacagacgctcaggagatgtaaaatgcattagtctctgcagaggtgggaggtggcggccgaattaaaggcttccccgggttgcctgcaccgggacagggagtggggttccgggtagagatgaggactggaaccctggaatggaggcgggggtgcctgtgaactaatggctaggaaaggcactgaggtttttgcattaacctgggttttgcatttccctcccgcatgggaaaaaaaaaatcgagtttttcctaagaaccgttttatggagccggtcgaggggataggataatcgactgcacgaatctcgcagattccgcttgaggagattctctctaggtcactagtgccctggagacgaaccctgggattaggaaggcactggataacactgcaccccaagatgcctcggttcttccccgtctcctcattggttggaactcgcccccaaatttacagcccctttttctaacccacccccagctgcgtggccctcctttgtaggggtgtgaggattgagaagccaaacagagcccacctcgggctgaaaagagctgaaccccctactctgcgccgtaccacggtctaggccttccagtgccagagcacctccaaagcgtccgagactgggtacagtcgtccaggcgtgacgggggcgcggggagccagtgactcctctgggaggggaagggattagggccagaatctctcaaaggtgcaaaaatccagtcaagagagggttttcgggtataccacggaggattaaaactttcaagacaaatgcagtctttgcctaacagcaatggtaaag

SEQ ID NO: 33508 - DNA, 2300 bp, Homo sapien
atgctaaacggcaataaatatattaagcttattctgccctctaatttctgaatctaactacatttctaccataaatctatcaaagagggaaatgtcattttctgcagaactccagagagcatcctaatttcagctaaggtatgttttgatgactcgattttcacttcgcttaatcttaaatcacagcaacgttagtaagaacaattttcctcccacactcgcttcactgacaaacctgcaaagtagctgatctttgacttttaagaagtttaataatacatgatcttccccccacactgccacacgcatttcccctgcctattgtctgtatcagctacttgaagaacacatactccccaacaaccggatgagtcataaaataagaggtacatggacgtaaactgagcctgtttacactttccctggccccagctaataaaataaaagaggtcccactgaattcaggtccaatggcttccggaaaacaggtttctgcttagcaaagacatgccctatttagtacattattttagaggtacagccaattccatgccccatgtgaatgaaatgtatttatggttatagccatgcacagggtgtgtaaggacttgccctcctcctgtcctctacaaaagaaggctcaggcagcttctggtggtgaactaaccaacaaaaggaatgcccagaaggtctcacctctcccatccacagagctctggaatgggggccgggcccctgatcgctggaaactcagcatccaagtgggcgcttgctgaagtttcccatctgcattttcgaaaatctggataaaagcaggtttagctcaacctcccctaacccgttcctgataaagtgatcttacgcctctggaattgggattttgaatgtatgtgcctgccccatgtctggtattagattacaacagcatgaaaatggagcctaggactgaggagccggccagcctcagaagccttcttcattgcctgccatgtaatacatgatatgcaaagcctctgacttcagccagcagatatttggagaccgtgttggccttagcatggggactaaactaatgtgtgtttaggtcagaaagcgaatcagaaaagccactggagggcacgtcacggagtgagagccctataaattcatccccactcgcagcgtcccctggcaaatactcggcttccctcacccggccgctccgcacctctccttctcggtgctagaactccggccggcagctccttttctcgccactgcctcctgccctgcggagaagcgagagggcgagacacccgagcgggaaggccggccttcgacaggcgcgaggaaagcccggcgctgccctgcaccggcagagcgccaccctcccagtgcggcgcgcgggggcaaagcccggcgcgggcgccgcggtcaagttcggattgcccctttcggctggcccgcgcagagcgccgcacattcctctcgatttttgatccacccggagaggagaaggcgctagccccgcggcgtctccgcgctctcagcgctctccctgcagcccagggaggggcgcctcgcgtcgcccactcgcaccccggccccccgcctcgggaactccagggcctcctcgctgctctcctctcctcccccaccgccaggcccagccgacgcctcccgacccctccctcccggggccccgcgcctcccctcccccaccccggaccccggacccccagcccgggctctagaagaccagcctgcgctcctggcgccctcatgtcttcacgggactccccgcgccggttgacgtggtgtctcgttcggatctccaggcaagacctcagctccggcagcagcatcagacaaaccagtctcgtgctcccaggcagtgcgcccagaggaggcgcagagcgcggcagctgccgctgagccgcccgcagcgccccgggcccgcgcagccccagccaagagcgcgacgcgcgcagccctgtcagccccccacccaaagcagcggcggctgctcggacctcggcttctgggggtgcgggggcccggcgggagagttgccggcagccctcgccctgttggcggcggcggcggcgggagtcttggccgccgcctccagcgcgcccttgctgccccgcgcgaccccaggattgcgaactcttgcccctgacctgttgggcggggctccgcgctccagccatcagcccggatgggtctcctggctgggacttggggcacctggagttaatgtccaacctagggtctgcggagacccgatccgaggtaagtgagggagcgggccggggagc

SEQ ID NO: 33509 - DNA, 2300 bp, Homo sapien
aaaaactgtaaaacagcctcaggaaggtcctttaggaggtattccagaagaaggcattgttatcgtaggagacaacagcttcacgcgtgtaactgcctctgaagaccttccagtgggacaagatgtggaagtggaagacagtgatattgatgatcctgaccctgtgtaggcctaggctaatgtttgcatttgtgtcttagtttttaacaaaaaagtttaaaaagtaaaaaagaatttaatagaaaaaagcttatagagtaaagatataaagaaagaaaatatttttgtacagctgtacaatgtattcgtgttttaagctaaacgttattacaaaagagtcaaaaagttaaaaaaattaaaaagtttataaagtaaaaaagtttcagtaagctaagggtaatttattattgaagaaagaaaaaaattttaaataaatttagtgtagcctaagtgtccagtgtttataaagtctacggttgtgtacagtaatgtcctaggccttcacattcactcaccactcactcactcactcacccagaacatcttccaggcctgcaagctccaatcacggtaagtgccctatacaagggtacccgttttaatgttttatactgtatttttactgtatcttttctatgtttagattcaaaaatgcttaccattgtgttataattgcctacaatattgagtacagtaacatgctgtacaggtttgtagggtaggagcaataggctataccttatatcctaggtgtatagtaggctataccatctaggtttgtgtaagtacactatgatgttcacacaaggacaaagtcgccaaatgatgcatttcagaaggaatgtatccctaccattaagtgacgtatgacaatagtttcttttcccctcttccctcctctttgatgttgaagaatggcttggcagagcctggaggtcagtcacataatgaaatggttgactcctaactctaagatgtggatttctttggtacagagagctgttcttcaaagtcttaaatatacaagaatcccagcttgggctcccagagatattaggtgtttttctcacctccttatttccctcttgttcaatagtattcactattccattgtgaagtctcccccaggtcatttttggttgattctgggcatctttcttgatcatcccagctcttcccactggttgggatacactaggagcttttccaaaatttgatcttgggctctgctataccggcatgctgcctcaaacagacagtcccttgacttaccataagtcaattccattgtccagcttcttaaatagaaatcatttggtcgttttaatattttgactgctcattcctgcatttatatataattatgcttagactgcctttttctaccatgtgcaaattcaacatgaaaacacttctctctttagctttagcctcactggctatgctgagccaaagcttttgttttctgtctagcttatccaccacccacttcatttgaccttataaacatgtttaaatagatttctcggataatgaccattctagctggcaacttcccgtttagatattatagcaggcacagtgcaaattagagggcagagcaaaagcactaagaatcatgagaccctggataaatatagtagacccgctcagcctcataggacaaggctgggttcttaccccagtttacccactgactcagggggtgactctggggaagtccgagtaaaacaatcattggtttcatctactggtgactcagtcatgttgatctcgataaatgggggcaaaagaaggagtccgctgtcacggagacacctcatttccatcctggatatttcactgttccctgggttggcctctgagttcactgggaggaaaacaaagatgccctttgtgcactattgaaggcaggctggggcaactggccgtatcagcaatgagaggaatcttttaaaggttagcagatgggcaaataggaagagctgttcaacctgatattaaaaggttgcgtttcaaaggtggctttgttcaattcggtgttatcttgctttaatattttccactgctctgcgattttgctaatagaccgttccaccagtgatgagagcattcagtgagagcctggtgttctgctcagtaccaagtgcagcactttcacatgcttgatgctcaatgaatgttgaaggagagagtgaatggatacagagctgaatgagtaggtatggttacattgtaaatggccttgctcacattctttgacagcagctttctttgctgacttgattttccaaatgtca

SEQ ID NO: 33510 - DNA, 2300 bp, Homo sapien
attaaacacccacatctcccgatcctctcagtccactgctgtgtttactttccacattgttctctcaaaagcctgaaagctggaatcagaccccttggattcaagcgctgcatgggagctgcatgaccttgggcaagtttcttaaccttcccatgcttcaggttcctcacctgtaaaaggcgagaatagtaatgacagtatcttcctggtatggttgttattgggattaaaatgcacttcaaagaaggtctggtacataggagaccttaaataaatggtagccataatatcaacgattattattacttccagtttcagcatcacagagaatcatttttaagtaggaaagcctgcatgggaggcatctgcattgcaacactcgcttggttctgggtgccacattaagtccgagataagaaatcactttcgcataaagaaaggcctctaacaacttctcagctggcgctggaggagctctctcacacaggtggagttcaaagggaggtggcacgacccgacaccaatgctgaaagcagactcctgcgtggagtggaggcatggcctagatgacctttaaaatgctaaaaagtctatgattttgagacctttgagactagcagccttgggggcagtcactttgcttagcttagtggccggctttatggtcaccttggacgtgaagagcatagttctgtctgaactttgctccagttctatgtaagaggacaagctctggtgtcacagctaaaacttccaaatactcaagttggaggggactttgaatttatttgtgaacagacaattgcacacttgaaaatgccaacacataagggaacacactcagctttgctaactaacaagattgagctcattacaaactctccagccaggggatatttcattcttaaaagaggagtagaaatcctgtgtgtgtgtgtttggggggctggggaggggagaagaatatatcagtcaacattgtttcctcccgcgctcccaaacataggctaactgtgaagagccaggacgcccaccgagtcctggcagcgttgcaaggtggggagggggcgggcgcggtcctgtcgctagtgactgcagatttcctctgcggggcacttcctacggcctttgatctttccccaggaactgccgagggccgcgtttgcctctaagtttattccctcttggtttatttattgtatctgctttctcttctcgctggtttggaggtcagaacgccagtatgcaacgggacttgtgtcccaggcagggtctcccctctccaggcactaccgcgaaatctggcaaaaggtacattttactgagtcctagggcagcaaattcagcggcggagaaagagtctttctccattcaggagacaacccaggaagcccgatcccgggatcagaggccaggaccccgccccggccccctgccccaggcccagctgggcgccgcccaggggcttttctcggtccgcctgggggctcgagctcgcgtccctccctaagacgccaggcttaacttggagtttcatctcctccccaggagggtctcaagttgccttcctctgccgggaagggcccccactcccccgctccaggccctaatctccacccggcgtcccagtctgagcggcctggcctcagctctccatctgcgagccttaaatcccatttatcttcttagcgcctcagacccggacggtcccgcctctcttcctctcacccccaccccacttgcaaatcacagacccccgtctacccctcgcatcccccaagtgcgctggaccaactacagcaacctttgaggtgttagaaaaagtcgcctagaggggcgcggcaggaggagggcccaggtggggtggagggggggcgccccaagatttcagggtgaggaccgcggagggtcctggacccgcagtcgcctaactcctgccctgcgtctccagtgcttgaagtcggtccctcccaggtccccaatctaggtcaccagcggggaagggctgcgctgggggtcgctagagagggtgaggggcgggctgtctgcttccgaggtgggcgaggagtgaaggtttcagggcctgtccctctcacttccactcgattgtaatttcatccccgggccggtcgagcctccctccctcccgcggccagcccttccctcccagtcggcctccttcgtcgcccccgcccccgcgaaaagccctgcagcttgcagccggcttcactcgcgcacgccgacctcccggctgcagtcctacctcttggaactacccgtgtttccgggcccagccctcg

SEQ ID NO: 33511 - DNA, 2300 bp, Homo sapien
atttcaaactcctccaagtggaaatgaaaaacatatggagtcagagtctcaatggcagaaataaaagctgcaacctaaaaacaaacaaacagaaaacaggaaaagacatttccagtgaagctgcttttcaccaggataactctgttttatgttccatggggaagaaaatagacagagcaggaaattttttgtgatgattaatggttccccatagaaactctgacttacctcatctagtgtaataattatagttgttcacatggctctttatgctgtcttttccttccaacattgccacaaaatttaactcctccagaaagttctccttgattaatcacacatgccacccaacccccagccctgatcaatcttcttacagctatttatacaaaattttcatgataggaacacatacttttgcatagtatacttaaattgcctctatgtgtacaggtgggtactatccctttagtatacctggaatagttgtgcaattttgatacaggaataatatcaactcaagacctgggtgttcagttagcattcagcagcgaactggggaacacatgtgattaacaaatgggatgatttcaaaacctggaagatgaaagcaaacttttaggttacctgtacttgcaagagaccgccactgggcagccaactttttcaatgttttccttttaaacttttcatttaagcagcagtgacaaacacatgaaacacgacaaagccattcctcaaacaaactcttagccatgtaagaacaaaggagtggacaatgaaatcagaaggcaactcatttaacacagataaaagaaaatgcttttttttgtctactgtataattaacttataaatttgctgtgcaggaaattattgaagcaagtaatgtgataagacattgttaaggatttgattaggaatattctgtttctgcacatctggggggaaaatgagaaaggccacttatctttggttagagtgaatcaccatctgtggccagaagtttctgtcttgggctcagcatttcaaactgaaggtcaatattaacaagcaggggttggggttaccatgttagaaaacttcacaggttgcaaaacccagaaagtgactccatggacgaggctggggccattgattgtgctgttacttcttgacgcagagctctgcagtgcaatagaaatctaaaagccattcttcagaaacatgtaagcgaggaagagccaggtggaatttccctcttcggtccatgccatttttcttagactatgaaaagtgcaactctgaataccaggtgacagccctgaagagttgcttcctttttctagccctgaaccaaacaaagccaaaggtttttgtcacctcctaatcattagcaatccttggcatatggctgagagtgtcaggtttctgggcaattttccttaaggttaattgcattctctttgtcatgtcatcagaattgagcaaaccattttcattccacttctatttctaatgggaataatgacaggtacacatttccagataagacacgtggagacacgtggagaggaacctgctgcaaattgctggaaaccaccctgccctcatgagtcagctccctcttctgttcctactcaggagtggaaactgcaagtggccacacagatgccagaggttgggtgagtagagaagctggtagtggtgcaggaagcagagaaacagaaaaccttctcctccccaaatccagacttcagtgtgacctttgggaaggtcagccaacatgggccgaaaatgaaatgaatatgcatatggatattgtgtgcacatttacagtcatatttacctgccttattccaccaaatatttgaagcaacttaataaaatacagtccatgcccccaaggagtctacagtctaatccagaaaaagatctctaagtgtatccctgctatgcgagacaccacagagtgagtgtggcaggagcataactgacccctgcagggttttgttttgttttttttggagacggagtctcgctctgtcaggctgaagtgcagtggcgctatctcggctcactgcaagctccgcctcccgggttcacgccattctcctgcctcagcctccccgagtagctgggattacaggcgactgccgccaccacgcccggctaattttttaagtatttttagtagagacgggtttcaccgcgttagccagcatggtcttgatctcctgacctcgtgatctgccctcctcggcctcccaaagtgctgggattacaggcgtgagccaccgcgcccggccgacccctgtaggg

SEQ ID NO: 33512 - DNA, 2300 bp, Homo sapien
tcttttctgtggcctcggtttccatgcttgtgaaatgacaagattgggctggatggtgtttagatctctttccattcttacttctagcttcatttgggggaaaaggacaggattggtggcagttttcggggtctttggattgggaggcagagtcccaccatgttgagcaagggcaggacatagttcagcactgtgggagtgtctcctgtcactcctctcaaaggtgttgacctttgttgagtacatgaagtgttagtgacatggaggaagggaaaggatatgaagaaatctaaaatatggtttctgccctcaaaggatttacaatcgagttggtaaacacaagggcaagagtctaaggccaggagcccagaagatctacataccatcttacacgtgtgttgactttatcaagcaatgggcatttatgctgattggaggcatatatccatggctgggttgccccatccaggagaagatgaaggaatgtcctacaagtcttggtggcttcttactttgtggagtcaccatttttcccagaagagtctgttttctttttaaaatgtcgcttgattttggtcttctgatggcacacattcagctctgtctccatagaatgcatgccctctgggagaataggtaggctgtgtgtaaggagataggagtgggaaaaagatgacaatgggaaaaagcattaaccaaaatcctagggtaagaaaatacaagatgcattcaggagacaactggcaggccagtttggctattatatagcttttaaagagtattttttaaaaaacaacaaaaacctgaaaacataattaggattcagattaagtagcatgatgtagtcaaaagagagaccaaggataaaatctagccctgccattccccatctgtctgccttgagcaagttatttaatctctctgtgtctatatctccacttggtaaaatggaagtaataacaccaattttatagtattttgtgaggattaacttaagcgatgtatgaaaagctcctggcacactaagaatgatcaacatatggtaattttctcaaattctaggatctttctacctccacagtggcttcttctgcaataggcgattaggagagcagtcaccagacagaccttggatttgagtttagctcagccagttataaagtcttcaattttaggtaaattacttaactactcttaactcagttttcttatgtataaaatggattagtcatacttaccttgtaagattattgaaaagtttagaaatatatcatgttaagcacccaatagtacctgataagaagaggagatggagtagaattcaataaatcatggtgatgggggaagaaggaggaaaaaaggagctgttttaattgagaaccttgaattcttgaccaagaagcctagaatttatgttgtaggcagtggagagtcactgaaggtgatttttcagataggaaatcataggataaagatgaagagaatcttaaccttgttgagaatgtgttaataaggtgcacagggcaaggaagaacagcctggaaggagagagaccaaactactgaagacaaaagccagcttgctttatgtatgtgctgtataattcttttactaccaaatggatttcttcttctggaatctaacaattctgaatatgtgagagaggcagagatagaaatgaagagtgagggaaaggacagaggggagaaagagaaagagagagaggggccgagagagatagatacagtagttccctctccgcaggggatgtgttccaagattcccagtggatacctgaaactgcagataatactgaaccctatatatgcagcagaactagcataaatttcattttccttcttcacagtttcacagatagaagattcattcttgccatagatcttagcaacctcagcatatgatttttttctttccttaattcagttgagaactttcaccttttaatttaaaagatgcacttcatggcttctctttggcatatctgaatcccagaatcactgctcttgcactgtggggccattatgaagtcagataatggttactggaacataagcacttcgataccatgacagtgaatctgacaactgagacggctgcagaccatggggcagggagcatatggagcacggatatgccagacagagggatgattcatatcccaggcaggatggagcagggcagtgtgctatttcatcgtgctactcagaacttatgaattgtttatttctggaatttcccatttaatatttttggactgtggttgatcgagggtaaatgaa

SEQ ID NO: 33513 - DNA, 2300 bp, Homo sapien
aaattatttatagtatatctatagaatggagtaccatatagtaggggaaaggaatgaatcatcatttaatatatcaacatggcttaatctcacatgacttcatacaaaaaaaatgcaagttgcaaaagaatgcatctagtttgatgacattaatataaaagacaacagcaaacaaaacaatatattacttagggatacatatatatgtaatttaaactctttaaaaaagcaggacaaacacataaatacccaagggaagatagaaaagggatgtgaatgaggtgtgattcacaggggcctttgagagtattccatcatattctgtttcttaaggtaagtgctgggtacctgtaaatattcatattttttatatgttgtatatatacatatatatacttttgaagtacaaagtatttcactaaaaggtctttaaaacaaaaaagggagattatagtaaacactcccacaaccaaaaaaagggggccctataaggtatcttgggggtcatccatttcatccatcttagcaggacaactaaatctttcagaactgaaaggtgggtgagaaaacctctcagacgtcaatacagagcatcatcttttggggaacattcagttggcatttttattcaactgtcatccgcagaatccactgatccacagcgctctgatttaggttgcacatgggaaacactccaccaggaggtggcagccttttaaagagcggctccagggcacctgcatgtcctcacagtggatttgggccagcacaggtattaacttgctgccctctctcaactgaaaaagccaggcaccagcctttagggcagtaacaactttggcaacagaaactggctttggtaggatgctgccactcattagttattagacatccagtgtttggatgcctagtggaaaagaaaaaggaaaaataacataaaaagcataaaaaacataaactaaacttaaagacattttgctttcagaataagctaagtcatgcaccattctcaggaagacaaactcaccctcctacattgtctgtccaggctgctacaacaaaagtaccataaactgatggcttgtaaaccacaaacatttatttttcacagttctgcaggctgtgaagtcccagatcaaagggctggcagtatctgatgagggcacagatggtgccttctcactgcatcttcacatggtggaaagggcaaaccagcccctttgggcctctttaataagggcactgatcccattcacaaggactccacccttatgatctaagtacctcccaaaggcccctccttgggggttaggatttcaacatatgaatttgagggagacataaacattccgaccatagcactcctccaaacagaatagcaatcagattgaaaatggagtggaaggaaatggcagaaagtcatttttgtcagggggcgtgctgttgaccagaaatcaatctcctcccagaccagacgagagaagtgcagtcagcagatgatgcagatgacccagagacagggtggagtgagctgttctcaggggttcgggcacttcttggtggaggtgggataacaaaggggaggcggtgttctcatcccttccacaccaattccccagttttatttaaagtagtccacctgtcaactgaaaattcaacctgtcgatgccagatttatacctggatgcatgttctctcaagccacctgcatgcagcgtatctgtgtgccagatgtcttcacacaaaaggcccttgaggacagctccttcctcttgtctctatctttgtacagcaagcagtcccccttatctgtatttttgctttctgcaatttcatttaccctcgatcaaccacagtccaaaaatattaaatgggaaattccagaaataaacaattcataagttctgagtagcacgatgaaatagcacactgccctgctccatcctgcctgggatatgaatcatccctctgtctggcatatccgtgctccatatgctccctgccccatggtctgcagccgtctcagttgtcagattcactgtcatggtatcgaagtgcttatgttccagtaaccattatctgacttcataatggccccacagtgcaagagcagtgattctgggattcagatatgccaaagagaagccatgaagtgcatcttttaaattaaaaggtgaaagttctcaactgaattaaggaaagaaaaaaatcatatgctgaggttgctaagatctatggcaagaatgaatcttctatctgtgaaactgtgaagaaggaaaatgaaatttatgctagttctg

SEQ ID NO: 33514 - DNA, 2300 bp, Homo sapien
acccgtggggattataggagctacaattcaagatgatatttgggtggagacacagccaagccatatcatcatgttttttttttaaaaaaataagtaattgcaagaagcatgtagctttatggatactcaggctgtagattgcctccatactaatgagacttgctaagcaagttgtaaagcaggaccacagatgtggctgtttaataagctttctgagagacactgattctatctgaagtgggattccccagcaacagacctgagatgtggagtcctgtgcaagtgatgtattaagaaagtgctcccaggagaaactgctaagagagaggagacggacagggaagaagaggatatcagcaagagtgagatctcaggccaagtttttcagggtatggcttctgcctgatccagtagaggagctctggagtacaaattatacctcagactcatccgaaactgttaagggctgtcctgggagaatgtgaattccagggcacttccatttctctgtacaggcaggcaaagcaagctccagggatcagaaggcaaccctcatctgaaatgtaaaagccaggtttgaagactgttgcccgggatcttgcgaagggcacagcaaaatagctacccacccctacaaggcactttatgctctagaaaaggattgagctgtcaggccttctgctgtggtcccagatcatggaacaaaactggaagggccaggatgggatccagaagaagtgaattctgagaatcttggtgaaagaagccaagaggacatttaactcatctaatgaaagcagcatgctcagtggctggcaaacagcgtaacctgaccctgaaaacccacttcctagcttgtgttgagtctactatttacaaatgattcttatctcttcatcagaaaagataaaacaatcattagattttccacttgctggtaacagaagtttaaagtatcaagattatgtttcagagtcttacactctgaacattttataagttctggcagcgtgcctttccctgacacccttccttaccctgtaatgcagataaatgagatattttggtcataaaaaaaagaatgaccaggccgggcgtggtagctcatgccagtaatcccagcactttgggagactgaggcaggtagatcacgaggtcaggagtttgagaccagcctgaccaacgtggtgaaacctcgtttctaaaaatacaaaattagctaggcgtggtgacacatgcctgtaatcccagctactcaggaggctgagacaggagaattgcttgaacctgggaggcggaggttacggtgagccaggatggtgcctttgcactccagcctgggagacagagcgagactctgtctcaaaaaaaaaaaaaaaaaaaaaacaaaaaaaaaaggccaagggtgacttaattttgtcccatctaatcttcagctctgtattttgtaacctttaaacctgcaatccagattgtggtttggtctaagatgggaagtttccctacctcactgtaaaaaaaagaagtcatattcataagcaaatttcaaaacactttgcatcataatctgtttggtaattcccctccaccccccgtccaccccaacaatgtttctctcaggatatagtataaaggtgactaggacagtgaaaaggtaattgttagccactgtatacaaaattagtattatcacctttggaggcacagaatagccccctaagatccttccaaagtacacagtcaactggtgtcaagactggaaagagaacgtttttgttggatgcctagcatggttcactgcctggtgggtgaggcgtgtctctgacctcccttcccttcccttctagacattccaaaatcctcccttctggaagcacagccctctgagaaactcactgagctccctacggtaatcgtgggtttaattttccagtaaggcaaggtcttaaagataaatacagatggaagaaaatgctggggctgtcactgacgtcttaaccatgtccctcataaaaatctggtgtgttttggcttttgattttgtttagtgagagtattcatgagtggtcatctttcttaaagggccaatacagtaaaattactttccggacacctctctatcttggtggcgctcccagcgcttactggttggttagagcaacagggacaaaccgaggctttcaaggctgtgtgcagtcgctcgctgtgaatgggaggagaattgacatgaggccctggcccctgggaaaagcactcagtggggctgatgtgggtaagtggctgcctggtgggttggggta

SEQ ID NO: 33515 - DNA, 2300 bp, Homo sapien
tctgggggtgtttagtatagatgttgctctttagatagttgaagggctgctagtttagggaaaggttttgtttgtttttcctttgtggctaccgtcagcatactataataaagatctctgtacctagtagaatggtccagcacgggagcgtgccaccttgtggaagagtgagctgctcattgtgggaagtgtttgctccggcaggatgggcatccatcaaggatgctgctgagaggagccctggttgttggggaagttagccttccatgcccacagggccctttgctttgctaaggtcccgtgaacgtgggaaagaaaccgtggtcccttcaactcttttttttttttttttttgagatggagtctaactctgtcaccccaggctggagtgcagtggcgtgatcttggctcactgcagcctccgcctcccaggttcaaactattcttctgcctcagcctcatgagtagctgagattacaggcatgccctaccatgcctggctaatttttgtatttttagtagagacagggtttccccatgttggccaggctggtcttgaactcctgacctcaggtgatccacccgcctggacctcccaaagggctgggattacaggtgtgaaccaccacacctgaccaactctttatagtctattgggaattccaagctcctcaaatggaaaatttgctttgcctggactgcagggcttctggcttggaggctgctgtccactggggtgtttttctgtgtgtgtcaccatatggcacaagcttttagatataaatgtaagaaaatgaaaaaaacacatttcaactaatcagtgaggccattgccacagaaaaaaggcaatgtagaaaaaattaggtatactggaaatggtagagagaagtggggaataggaagagatttgttaaaggatacaaaattacagggagataggagaaataaattctggtgttccacagcactataggatgactatagttaacaataatatatagtttcaaataactggcaggaggacatttgactgttcccagcacaaagaaatgatacattttgagatgggatggatatgctaattaccctgatctgattactatatatgtatcaaaacatcactatgtaccccataaatatgtaaaattattatgtgtcaattaaatttttttcaataaaataaaagcaaaaaaattaggtatagggttaggttaaaatataatcatgttggccaggcgcagtggctcacacctgtaatccaggcgctttgggaggcccaggcaggtggatcacctgaggtcaggaggtcgagaccagcctggccaacatggcgaaaccccaactctactaaaaatacaaaaattagccaggcatgatggcacatgcctatagtcccagctactcaggaggctgaggcaggagaatcgctagaaccctggaggcagaggttgcagtgagccgagatcgcgccactgcactccagcctgggcaacagagcaagactctgtctcaaaaaataataataatagtaatgtttacaacatttaaaccaactacaaagagccagaaagggctcagtggtcacttcaagctctgatgattttggatgtgattatttgtccctatatatactcacttaaatgaagcatagtttgactattttttattcagtggtgttatttctcgagggtgcctctgcctttgttaatcagaaaataaccaggggtctggaatcttgcaatggggggtggcgtgggaatgagggcgatattttccactagggagagagaagaggcagctagctggcttatcattcctttttcacatgcagcctacagccaagaaaagtaataatcattgacaaggtaagtaactcttgagcaaggagctgtttctctagatttaaaagaaatgcagattgtcagttgaaggtgagggagcctcagaagtgtcagacagctgattctaaacatcttcttggtccaccgccacgcccaccttcaataagccgagaagaggtgaggaggcgggtggctgggtgccaatcatgctgaggagagatttccagtggttccccgcggggctcatattcacattccctaagaggacgttctggactctcgggcagagctttgtgagagaaacaaggctggcttcaagtgatctgcaaccagagtaattgggatttgacaaggactgtgaaaggctgactctccctgttctctttcatgctggcaccgggcagagtgtgggaactactgcctcaatagtaagtacagtaagtcctgtgagaaactgcg

SEQ ID NO: 33516 - DNA, 2300 bp, Homo sapien
gtttacatgagcataggctatgtctggaaagacatacacaaggagccagtagctgtggaacatgatgggagagaggtatactccgtatcttttatatctattgaatcttctccagtgtgaatagattacctgctgcacaattaatgtaagaaaaatgcacactattaccaacatatttgtcaaggatgaccattcagaagcaaatttttcaaaaatcacaaaagttttgctccttcaacagcagagtccctgattctcattccccagaagagaatacaagtctccactaatcaagaggcttgctagtgatctcactcacctattacaaagcaaagaagtctcaattcaattcttgaagaggaaatagctgctccgatcaccttgggaacacatcatatatttaaattgagcttgcaactaactccctaatgaagtttccaaatgaacagttgcccccgactataaagcataaagtcaacgtagaagacaactaaaagaatggtctcgtgtttttaaaaaacacattatacttaggcttccttttctctgccaggcttagacaagaaactctctggtaacagtgaaatgtaatttcagatctgtgacaaaataatcatgtaaggggaagggcaagtagcattcgcgctgaaaaaactccttggtttttccacttgtgaaaaggaaaggtttgccttaaatttaatttctgtaccatttctggacccctgcctaaacgatactactatatcacattaatcttacttcaagcaaatactttttaaaattaaaaactaatctgaaactgaacaggaatcggaagacaaactttaaactgaaacttttctgttgaaagaatgtatcttttaaagacacataaaaagaaatgcaaagaaccgatttccatataaatgccactcaataacaatacaggttataacaatatttgactgcattaaacattcaaaaaggaacacaaagatacccaactgcaaataaaagacctcatatatttttggtagcggaatgtggggggtggggggcaaaaatcacattaattcagattaatcatgtaaattcagaacacgtgatgtgcagttttgtgtcgctcagaactcctgaatccagctttgtgcttttacacaacataacagaaatggcatctttcacaaagcctaactttgacctccaacactttaactttgggtttaaccagtacaccaccttcggaagttagcacataaaaatacaggtaagtcaaatgcactacggatacagaaaggacgaggaacaggtttaaaggggagttgaagcagaggggcacgaaatcacctggcaggtcacctctccgaaggaaaaacatttcaagctccctcccatcccccaggtaacctctggcctcagaactcactgccctgcgtggggcagaagttctgggcgctggagtccgcgtcccccaggacacgagggtgacccaagggcgcgcggagagcggcgggacccggagcggcgctctccggggtcactcccctaggacgctccgcagagctgggagcgctgccccaccccgcccgggccgcccctggggaccccgctcggggctccgcggctcccctgctccgcgccgcgcccacccgcccccaggactcacggtacgctcccgcgccgctatcttgccatcccctgccgccggctctgtagcctcggccgccgccccggggctgcccagatcccacagccgcccgggggcaggagccgccaaggagggggccgggcacaatgcgccgccgcctccgcagccgccgtctcgcctcccctgtgtcggcgcgaggctgcttgaggcggccacgggcgaagggcggcccgctgcgctccgcgaaccccgcgggccgccgccgccgccagagcctcccagaggcaacggtaacggccaccgccacggccgagtcgctccagccgggactgcggcgcgcgggggcggcgcctgcacgccgctcggctgggggcgcagcgggcccggccccgcccctgacccgcccctgcccccggccccggccccgccccaacccgcgcgcccccgccgatccccggccgcgcgcccgcgcgcgcgggtgctccaaggagtcggaggaacgcggccgcgcgacgggccccggacgccgagggtggtgcttcctccgagcctccggtggtgaggccgctctcagaaggtcatggaagcgcaggggagagcgaggcggccgagcccaggcaaatcctcgagaaaggccgagtgcgcgacggctctgcggggaggaccgcgc

SEQ ID NO: 33517 - DNA, 2300 bp, Homo sapien
cccggccccgccccaacccgcgcgcccccgccgatccccggccgcgcgcccgcgcgcgcgggtgctccaaggagtcggaggaacgcggccgcgcgacgggccccggacgccgagggtggtgcttcctccgagcctccggtggtgaggccgctctcagaaggtcatggaagcgcaggggagagcgaggcggccgagcccaggcaaatcctcgagaaaggccgagtgcgcgacggctctgcggggaggaccgcgcctccccgaatgcggccgctgctgccgctgcaaacagtgccttgaggagaggaaagcggggaaccgtgttttcgccgcctctgtaaccactgcacacaagaaaaccagcttctgggagagggggatgattgttgggactttgcgaattacctaaacagcccagggccgaggcgccgccgctcgcgtcctggtcctcctgccgggtgtggggctcccctgcccgagatggccagcgggcgcgccgagagtatcctggagccatctagtcttgcctcggaggcggggtgggcttatttgtgcggagaagaaacggatctcttaatggggtgagatttttcctccgtacattgttcccatttccgcagtttcacttggcctcggttttctagcagagtaatcaccaaatgaaattagctggagagcgtttgatggcgcagaatcacggtctgaagatgtttacgctgtatgccggacgcgtttgatggtgttctcttcggcacaattaattttgcaaagttcagaaatgtgccagacagagcccctggcacgcagtcaggactctacagacacaccttgagtaggaaacaggcttgtttgtttcatctgtgatttatgtgatgcaccagcaccaaggccaacgtgttttttaaagacctttcgatgaaactccaaagcaatttataaattggcaaaatgaagcttgttttgtaaaataactcttccttgttgatcatgtaattaaatgggcaacaaaacacctgaaaggacatttactgaaaagtagactcccaaaacaaaaatatgtatttcacagctagatacggtcgctattagcgtcctaatggccaactccatccatgtgcgtattttgaacactaaaaacgcctcctgttacccctaagaccttgtttggataacatttttctattataagtactcgaaaccaaccccatttaagatgtttacccttattcttgagtccttgatggtttgggaaatttatcattattcatattgcacaatcctgtcactgtcttttccattaggcacagtgcctaaggtccacaatatttttagaggcccacaaaaaatattttaatttcttttcaaatcagaaggaaaaaaaatttaggtttaagaaagtattttaatatatattaatatatttgtttttgtgctaatacaatcttaaaatgtatgtatatatgtgtgtgtgtatatgtatatatattttaatggagtaaggggctcaacgaaggcaaaaaggcctagagcccaagaaaaacatgatgtggccctgttgcctggggttgaaaaatcccattccatgagaagaatttagttttaagaatattacataaaatgctcatttctgtggccttgctataatagaaagatggagattcagagtagtgataatggctaacatccacctgatacacaccatgtgtccattacctcttaatcctcacagcacacctgtgaaataggtactattctcacacttagggggtaatgcaggttttgtggggcctgcaatttatgcaatttgggtggtcctcttaaagaaaaagcaaatactgtgtattagtccgttctcacactgctataaagaactgcgcgagactgggtaatttataaaggaaagaggtttaattgactcacagttccacatggctggggagacctcaggaaacttaacaatcgtggtggaaggagaagcaagtaccttcttcacaaggaagcggaaagaattgtgagcggaggaacttgccaaacacaaaaccgtcagatcgcgtgagaattcagttactatcacgagaacaacacgggaaaactgtccccataatcaagtcatttctctccctaacaagtgaggattacaattcaagatgaggtttgggtaggaacacaaagcctgaccctatcccacagcatgtccaggctgccctagcaccacccaatagaagggaaaatggcagagggaaagtcctagtggaaagagacctcagtctcagctaattgtggtgacaatatattgcttttgc

SEQ ID NO: 33518 - DNA, 2300 bp, Homo sapien
tgtctactcccacaagcaatatgtgcaattacagtgactaatttttcctccccagagagatggcacccctgggctagagggatgctaggaaggaaaagtccttgtccttttggcatcctctcaccccacgagctacttctgtgtcttttctttatgtaacactgaactctccagctcaggcctccaggtcctaagttcataatctcattacaactaatcctgtttacggccattctcttggcagaacaatcttgtctggaccaaggctctttcctcaccacccaatgttcttgttgctccattgttcctggggactgtggcctggctgagtataagctttcattgatagggtttatcctgtttacagggagtctgcagaagggcctcatcaaatacttccatcccttccttcaataaatggctccctttgatctgtgcaaggcacaactttgtttatcagaagctgggcttcctctagctgatgatggggacatcctgtcccagaaaggctccccaaaataacaccttctgaatttcagaatattttcaggttcctctattttggaagcattttttttttttcttgcatgccatttcttatggcaagcaaagaaaggagctgattttgcattttgaagcccaaggtaacacaaagttgaacaggtcaccgccaaaaatgaggaaaggacagtgttgataataatataaacatttggaaccagaacaatatacaagattagggttgaccaggtgtgatcgtttttcatattgtcaatttaaaactggaagttatctaacaaggtgaaaaagaggtcatgggtgttagtcatctatatgacaggatggtagaagctagctgaattatgtggatgaatggtaagggcgattttacactgtccgagccaggtaaagagctctatttacagcaatggttctcaaagtgtggtctctagtccagcagcatgacctggaaatgttttagaaatgtaacttctcaagccccatcccagatagtgaattggaaactctggaggtggggcccaggcacctgtaagctcacaagccctttaagtgatgtgattctcatgcttgctaaagtttgagaacctctgatctgccccaataatcttcaaacttcggtgtacacaagaatcacataagaagctaaaatgcagattcccagatcccatacctaacgatgcagattcacttggtctagagtggacccaggaaagtttgcattgctaataagcagcccagggtgatttgggtgcaactggtccatgaatcaagcttcgaggagcattggcctatatataaaggagtggtacaaattgtccatattgctccagtcttattctaaagaggctccctccgtggctaagaatgagccagtatcacaattcatcttcccttcccagtcatctcatgaagcaggctgctaagattacctattgtgggccgggcgcggtggctcacgcctgtcatcccagcactttgggaggccgaggcaggtggatcacgaggtcaggagatcgagaccatcctggctaacacggtgaaaccccgtctctactgaaaaaatgcaaaaaaattagccgggcgcggtggcgggcgccttgtagtcccagctactcgggaggctgaggcaggagaatggcaggaacccgggaggcggagcttgcagtgagccgagatcgagccgctgcactccagcttgggagacagagcgagactctgtttcaaaaaaaaaaaaaaaaaaaaaaagacctattgtggttttcaggattactctaatactagaaggttagattggccccatggattcctttcacactgacatctgaaacacactgctgactcctaacctgggttggactcatgctgctggcctggaggcaaaagctttttatcccattactagttccttgaaccacaatccaagacacaatttggttttcccaagagttttgttttgcactgctgatgcattccagtcattgttgtgatgcatttccttctcctctttccctccagtccctgggcaatgccacacatgtatatatagcctcctagtgtgaacttactcaaatcctaaccctctctcccagaacgtgtctctgctgcaaggcaccgggccctttcgctctgcagaactgcacttgcaagaccattatcaactcctaatcccagctcagaaagggagcctctgcgactcattcatcgccctccaggtacagcactgctggggtttgcttccttccttcctggctttgtgtcccatgtccccttagacctgt

SEQ ID NO: 33519 - DNA, 2300 bp, Homo sapien
atgagttagacttttttagataacatatatgagtaagattaagcagcgtttgtctttctgtgcctgggttatttcacttagcataatgtcctccagtttcatccaagttgttgcaaatggcaggatctccttttttaaagttgagtattattccagtgtgtgcagtatgtatacacacgtatacacatgtacccatgtatgtatgcacacgtatacacatgtacccaggtatgtatgcacgcgtatacacacgtacccaggtatgtatgcacgcgtatacacacgtacccaggtatgtatgcacgcgtatacacacgtacccaggtatgtatgcacgtgtatacacacgtacccatgtatgtacacgtatacacatgtaccatgtatgtatgcacacgtatacacatgtatgtatagatgtatacatgtacacacttatgaatacatgtgtatctacatgtacacatgcacacatgtatatgcacatgtgtatacaggcatgtatatatgtgtgcttacctacgaatatacatacatacacatatctgtatgcatatacacacgtacatatcgatatgtatatgtatacatatgtgtccggaattggtgggttcttgatcttgctgacttcaagaatgaagctgcggaccctcgtggtgagtgttacagctcttaaagatggtgtgtctggagtttgttccttcagatgttcatatgtgtccggagtttcttccttctgctgggttcgtggtctcgctgacttcaggggtgaagctgcagacctttgcagtgagtgttacagctcttaaagacagcacgtccggagttgtttgttccttctggtgagtttatggtcttgctggcttcaggagtgaagcttcagatcttcgcagtgagtgttacagctcataaaggcagcgtggacctaaagagtgaccagcagcaagatttattgcgaagagcgaatgaacatagctttcacagtgtggaaggggaggtaagtggagtgggttgccgctcctggcttggttggcctacttttattcccttatctggccccacccacatcctgctgattggtccattttactgtgagctcattggtccattttatagagagttgattggtccgttttacagagagctgattggtgtgtttacatacctttagctagacacagagtgctgattggtgcgtttacaaacctctagctagacacagagtgctgattggtacatttacaaacctttagctagacacagagtgccgattggtgcatttacaatcttttagctagacacaaaagttgtccaagtccccaccagattaactagacacagagcgctgattagtgcgtttataaacctttagctagacacagagtgctgattggtgcatttacaaacctctagctagacacagagtgctgattggtgtgtttacaatcctttagctagacacaaaagttctccaagtccccacctgacccagaagcccagctggcttcacctctcaatggcactctccgcgggactttgcagcacctagcccgggcactctggcagcccagagggagctcatcccccaatcaagcccagcaggcactgagcccctgaccacccggaacccgcaccggcctgtgaatgccacgcgcagccccagctcccgccggcacctctccctccacacctccccaagagcagagggagctggttacagactcggccagccccagagtggggcccccacagcacagcgacaggctgaagagctcctcaagtgcggccagagcggacgcggaggccgaggaggtgccaagagccagtgagggctgctagcacgttgtcactgctcacatatacacgtatatacacgtgtatacatatacatatgtatatacttgtatatacatatgtatatacttgtatatgtattcatgtgtatatacatgtatataggtgtacagatgtatatagtatgtatatatacatgcatgtgtacatgtatacattgtatacagtttacatgtatgtatatatgtacacatgtattccagtgcgtgtatatatacacataatatatacatatatgtatattcatatacacgcatatgcatacatatgtatattcatatacacgcatatgcatacatatgtatattcatatacacgcatatgcatacatatgtatattcatatacacgcatatgcatacatatgtatattcatatacacgcatatgcatacatatgtatattcatatacacgcatatgcatacatatgtatattcatatacacg

SEQ ID NO: 33520 - DNA, 2300 bp, Homo sapien
aggaaacctttgaaataagctgtttttaaataaagtattttaaaaattgatgtgttccttcttacacaatacttctcccaaattggtcttaccacttaagctgagttaggaaaacatatgactcagagatgagagtatatatatatatatatacactgcacctaacatataactgagactcctgggagaagccacatcttagaacttactgtgagcagaggataaagatgggtaggttgaaatccccttagtttctgcccgagtttgatttatttatttttttccaagggatttattgtgctgcccaccagagagatgaattttatctctgaattttatcagtcctctcaaaatggtgacaatcaataccaccacaattccaacttcttatctcgggagtctaattgtatttttcaaaaactttttattatggaaaatttcaaacatatgcaaaagtaatgaaaaatattataaggaacctcatgtggttatcaccctgcttaaagaattatttagtcccagccaatcttatgccatctaaattctgacccactttccttcattccactgggtaatttgaaagcaaatctgaaacatcctgtcatttcatctgtaaatagttcagtttgcgtctctaaaagttcatcattacttcacaaaattcaacatcattttcaggatgaatattatattgtaaataaacatagtgtataaattgctgttaaagagaaaattcagttgtttcttgattagacacaatttacaactgaaatcaccaggatgaatcatcctcaatggatgtcagaacgtgtaaaccacagaggcattaatttatcaaacttggcacgaaacatatcacttcaattgcccactttaattggaatatttttattgtatttattttaaataaattcaaaaagagtttttcacattctgcttagccgccagtttttttaaattcttcccgtgacagatcttgagtgattttctagggaagtaactatctttgcaaaattatatttttccccaatatctattaataatcatggcttttgaactttaaactttacattttccttcaaatcagcttctttttcctacttgtatcgtaacatacactgtcacagtttgcctacccagttatcaaagtttaagaggtattagccttctatcattgcctccccaccaggtttcaagtgcttaaattccaacacatttaatactgttatcatcagcatttcccaagtggcttattgaaaataaggtggtggtggtggtggtggtggtggtggtggtggtggtggtgctggtgctggtgctggtggtgctggtgctggtggtggtggtggtggtggtggcggtggtggtagtggtggtggcctgtgtgtactgagggaagtttagggatgataaagacaactctcattttagccctaagcattggtggttcgcctactagtttaaaaaattcattatcactacgaattttcactgccatatgatacttctttcttgttttcctacaaaattacttgtcctgtgtttttggttctttttctttttttgagacagagtctcactctctcgcccagactagactgcagtggcgcaatctcaactcactgcaacctccacctcctgggctcaagcaatgttcatgcctcagcttcccgaatagctgggattacaggcatgcaccaccacgcctggctaatgtgtgtgtgtgtgtgtgtgtgtgtgtgtgtatttttagtagagacagggtcttgccatgttggccaggctggcctggaactcgtggcctcaagtgatcgacctgccttggcctcccaaagtgctagggttacacgcatgagccaccatgcacagccattactggtaatttattagtcaatttttaattttatttatttttaattgagatgtaactgacaaacactgtatgtatttaagatgtacaacgtggtgttttgatacacatacacattgtgagatgattccccaaataaagctatttaacctatttatcacttcacatatctgttttttggtcatctactctctgggcaaaattcaaatatccaatatattattattctatagttatgatgcaatacattagatttccacaacttgtgcattttaaaactgtgaggttgtaccctttgaccaaattcccccattttcctccatcccctacccgctagcaaacaccgttctgctttctgtttctatgagttagacttttttagataacatatatgagtaagattaagcagcgtttgtctttctgtgcctgg

SEQ ID NO: 33521 - DNA, 2300 bp, Homo sapien
ctgggtgtctgtgtccaaattccccccttttcagaagtacagcagacactggattaatcttatatgacctcaggttaacttgattaaagctgcaaaaacattatttccaaataaactgatatttggaggttttgggtggatctgactttatggacccagtgcacccactgttaagggtataatcgcgaatttatatggtgctactgcatctagattctagaataacgtataaatttaagaaattagaatggtgcaaaaacagataaattatatgtgggcaccaaatttttacacttcagtctccttcaattgcaataggagcccaaaataagcctcactttttagaaattcatactgggctgaatatttttatttgacatctcatttgctagaagagagatcccttttaactgtttctataaagaataattttttttctcagtaaaatataaaatcataaagactttccaactcttgggcttggcagtttccataaccatgcagatggctaaactaatggactctttaaaactcttcaagtaatgagaggtgtggcaaaggaccatacatttattgagacaaaaatacattttattatcatcaaatatttactatgcatcatggtctttgtggccccattaggtattaagtgtattagggcctttaggcctttgttttaggaaaaataaaaaaacaaaaggactctcagctttccttgggatgacattggggaggagccagatatgtgaacaaacacaaaagtaacattttaaaataattctgacattattttgagtcatccagtcaattcaatataggattctaagatatgtttatggtcgatacttgttgatcactcttggttccctcccccacccccctcctacaaccttgcttttgtgatactttccagggtccccaaactcaaaccaaactaggctcagctgatctggagcaaggccccttgcctgctgatttgtcaggcatccagacaggcgaggctatgggagctcccggtccgaggctgcctcggaaggctcctgttatcctctaagagaggtgaaatgcacctttcaaaggcccagacacggtaaagattggatggcatttttggccgggcgcagtggctgacgcctgtaatcccagcactttgggaggctgaggcgggcggatcacgaggtcaggagatcgagaccatcctggctaacacggtgaaaccccgtctctactaaacatagaaaaattagccaggcgtggtggcggtcgtctgtagtcccagctactagggaggctgaggcaggagaatggtgtgaacccgggaggcggagcttacagtgagccgagatcgcgccactgcactccagcctgggtgacacagtgagatgccgtctcaaaaaaaaaaaaaaaaaaaggttgaagattggatggcatttttaaggggaaaagtaaaccatgtgtagcatgtcgtagcattgggaaataaaggtttcgggactgttgtagccgaagaaactttgtcggacagggcgtttctggatagaacgcgagtaggggaaaaatggggaccgtttgattcggttcaaacacgttttcgttgctctggacgccaaatggaaacacggccaaaatttagttaaaggacttctcttgcctgaagattttcggacggggatctcacgggtttggcctctgggttgggatgacaagtgcccctgtgggatacacagccccaggcctcatcggtcactcggcttacctctggttccgccggctggcccgtgcgtccttggccggggcaggagcagcgctgcgcgcggggcacggagcctcggccgccgagttttcggtttccaagtttccttcccaggcctctcccacttcctcttctcaccagtgcccgcccgcccgcaaagtccgggttgtgaggctgcgcctcccccaggatcgcggccgcctccccccgggactgaagggagggaattcctgtgggtcccaggagtgccaagagtgcgcagcaagacgggaaattgcaaaagacctcacccctctgccctcccccgcggttttccagtaactcccgcccctccgcgcttgccccgcagctgattcatagccccggcccgggccgcctctgcacgtccgccccggagcccgcacccgcgccccacgcgccgccgaggactcggcccggctcgtggagcccttcgcccgcggcgtgagtacccccgacccgcccgtccccgctctgctcgcgccctgccgctgcgccgccctcggtggcttttccgacgggcgagccc

SEQ ID NO: 33522 - DNA, 2300 bp, Homo sapien
acccaagaccagcctttttctctcaaagccacctttgatacaaaaggcttagccacacctgctgggacaaacgggaactgggaccaagatgtaagtcacaaggaggcaatttacagcagagaactagctcttcctacaataaaatgtgaggtggtgagcttcctgccactggaggcactgaacaaatgctacggggaaaacaaactgagtatttcctgaagattctgaatagaaggctgtgtttggagtttgatgctttgaaagctcaagaaatgattctcagacacagcggagtttggggacatcaagggctctgagtgcattttaaagcagcccaggagagagacaaagcaagaccataatgaaacaccccacccagtcttagagtttgagctacagcacggtgatcatgagcagactccaaacccaaatcctgatactgtcacctgctagctgtgtaaccctagaaaagttacaaaacctctttgggcctcagtttcctcaataaaatataataaaaaactagtacccgcctcacccgtgaagcttaaatgagctagcatatgtcaagtgcttagaataggggctggttcacagtaagtatgaaccattattatttgcagacaaggaaactaagaggtgataagtagtttgacccatgttccaaagtcagttttaatcttgggaataaaacctaaaaatttctttctcctccatcagaattccttctagctcaaactaagtatcctacattcaattctatcttctctgccttcatagacccttccatttacttctcttgaatatcttgttcccaaagtgttttcaaggcaggtctgttaccaagccactccatcagcagcacctagcactgtgcctcccgcagcaaggcaggcaggatggatggacggatgcaggcatgcatgggtaggtggatgaagggcagatgaagaactatcgagaaaggaatcgcggtgtcaggggtaaagccctggcctgcgagagccgggctcggatttcagtgccctcacagctagccatatggccttggacaagttactgaacccctccgtgcctaggtttccagaatgtagagggccacttccactcaagtggctggagaagaaggtaagcgccccggacggacgctattgcagagtcgcccggggattcctctctccacctgtgcttgagctcctcccgcttctacgctagggaccaggtgggagagatacacggattcccagaaaaatggctctctcaggtgggagtcaagggttacgagaggagaggtaggggaagcaatgaactcctccacacgatgtgttgggagagaggaaagagggattcaagtgggaattttccactcaacaaacattccaccatcatttgagaaaaaggcgctgggatggtgaatttcaaacagtctgagaaatgggcgactcggcactgtgcggcctgtaaggaatgaatcatttagttttcacccaccaggtaggcaggccgggggcgaggaccctccgagcgccgtccgagcgcaggtggtagcccagccaagcaaacgctgggcagaggcggcaccgaggaggggaacgggctgctgcactcccggtcgcgtccagccgggatgggctgcgaagttgtcggattctttcccgcacagcacggggctcgcccgtcggaaaagccaccgagggcggcgcagcggcagggcgcgagcagagcggggacgggcgggtcgggggtactcacgccgcgggcgaagggctccacgagccgggccgagtcctcggcggcgcgtggggcgcgggtgcgggctccggggcggacgtgcagaggcggcccgggccggggctatgaatcagctgcggggcaagcgcggaggggcgggagttactggaaaaccgcgggggagggcagaggggtgaggtcttttgcaatttcccgtcttgctgcgcactcttggcactcctgggacccacaggaattccctcccttcagtcccggggggaggcggccgcgatcctgggggaggcgcagcctcacaacccggactttgcgggcgggcgggcactggtgagaagaggaagtgggagaggcctgggaaggaaacttggaaaccgaaaactcggcggccgaggctccgtgccccgcgcgcagcgctgctcctgccccggccaaggacgcacgggccagccggcggaaccagaggtaagccgagtgaccgatgaggcctggggctgtgtatcccacaggggcacttgtcatcccaacccagaggccaaacccgtgagatcccc

SEQ ID NO: 33523 - DNA, 2300 bp, Homo sapien
ttataggttcatatgctatggtaattctattttaattttattttgtttaattttgctaattttcataaagtgggcttatttttatagcaggacttaccatggtttatatctttttttaggtaaaggatattccctattttcagacaaaaaacataccaccacatgatgatcgaggtgcaagagcatttgcccatgatgcaggaggtaatgcattgtgcattgtacttgtgagatgcctctttatattaaaaagaaaactcttagttctttctagtaggataacactaaaaatttaggaagactcacttttggatcaactttaaaattataccaaaacaattgttaaagtcagcttaaaattaaaccacatttttgtgtatgtgtgagggacttaacagtgttttcagtgaagtactcaacctttcaaggaaatagaaaccaaattagttgtttctgttttttaaaagtagcacatgaacaatgtataacactaatcctcatagatccaggaaatagctgtttgtttagagtaaggagaaagaaatgtacttataaaatacacggtctttgttttgaactgttatattttaatatgtaaatataagccacaggttttatagctttatattcttaatgactttttaaacaaatgcctctttatacttagaattattacatatctttaggcaaatattgacgataattgaaatgatgtattatataatctcaattttccattttgtatttaaaacactatatattaaaataataaacatctgctggctttccttatttttataacttaaagcaaattattctttttttctttccagttagattttgagtcataaaatgtgcttaagctttctttaaaatttcacataatttaaggtaccttgaaaagtattatctttattggattatgttttatatttacttatgcacaggtcttccatctggaactggaggtcttgtaaaaaattcttttcacttgctacgacagcagatgagtcttacggaaataatgaattcaatccattcagatgcctctctgtttttagaaagtacagaagacactggactacaggaacatacagatgataactgcctttattgtgtctgtattgaaattctgggtttccagcccagcaaccaactgagtgcaatatgtagtcattcaggtaagtgatcacgtcccaccttcagaaaaacctagtgatgactaaagttctctggtttacttttccaaatttctttttggtattctaattcagagtttcccagctggtgagctgcagcacactgatatgccaaattatgttatgctgagatgctgatcctctcacggttccaggtcacagtggggcctgagtctgacagatccctggattaggtcttttccactgtgaacagccctgtccaggccctttgcatgctgtagttattttcattttctatgaggaaaaaagttttggaagtgtttggtatattgcatacaattagagaagatgttattttatattatttctttttagcatgcaatgtaagcacaggaattaagccgttatggtgctttaattgaaataattatttttttcttcagactttcaagatattccatattctgattggtgtgagcagactatccataatcctttagaagtggttccctctaagttttcggggatttctggatgcagtgatggggtgtctcaagaaggctcagctagcagcaccaaaagcacagaattgttactaggtgagtcttcagattcaaatccaatcattattagtaaaactgttctgattagttggttttgttttgtttttcgtaaatactgtaaattaaagttgtctcaaaacagtaatacgtccattttagtgaagcaatttaacactgttaattattgcacctatatcacccactgacatagagcctcttagctatctgcttttattagagttttgctcccaaaatgattggtagatcatgtgtaattgatctctaggtctttaggtgaagtttaaaaataaatttcatgagttttaatcattttattgtgacatagataatatttaacttctccctgaaatcttttcaggtgttaaaacaattccagatgatacaccaatgtgccgtatactccttcgcaaagaagttctaagattagtcattaatttgagtagttcagtttcaactaaatgtcatgagactgggcttttaacgtgagtaaactatgtgcatgagtattatttgtttattctgttttttaagtcgagaaaagatacttgaaatactt

SEQ ID NO: 33524 - DNA, 2300 bp, Homo sapien
ctttggagttatccattataactgctgtttacattctccttaaccacaccttccataacccgtgcaaatgtttgtagcatgaagaacactttaagctacgatgctgttcttcattacacccatatgtttttactcctgagtttagactaaccagctattactactgatctcagaaagaggtccttagtatgtttgagaaattcatgtcattaacattattatttgattgcattctgtattcatgatatgtaacctaatatctataaaagttttaagaaataaagataacttataaattgcactgaaataaaaaagcatagtactaactttttatactccttgagaacacagatgatgtcttactcaactttgttttcccagctcctggattggacacctctattggattgaattgtagtgcatgaaattgaactgaactaaattcagtagaagcttagaacataatgttgaaagatataatgttgaaagatcataaattatgtctataaattcattggcctaaattgcaactttcatgcttgaccttttgcctaattgtgaaaaaccaacaaaatcatagtgtagtatcttacaattattatcttaacaatagaacattattgagccatgggacaaagttcttcatgaatacaatagaagaaaatttaagttcaggtgacatcctcatttatcaaatttttatattctagctatgttaaatctgcattcatccatctagcatctttcttctcctttattttttctaaccatctcaccataaaattcttactccacagagatttttttttaaatgaaggttttttgtttgcttggtttttggggttttttttggtatgaaatgtactgtattagtccattctcatgctgctataaatcactgcctgagactggcagttatttataactgcctctacagataatatagaaattacctataaaggaaagaggtttaattgactcacaattccacatggctagggaggcctcaggaaacataattgtggcagaaggggaagcaaacatatccttcttcatatggcagcaggagagagaagtacagagcacagggggaaaagctggtgataaaaccatcagatgtgagaactcactcactgtcacgagaacagcataagggtaaccgcccccataatcttatctcctctcatgaggtccctttcatgacatgtggggattatgggaactacaattcaaggtgagatttgggtgggggcacaggcagaccatatcatgtaccaaacacttttaatacatttcttgccatttatcccaatggttcagacccaaaacatattctgaaagccttattatgtcataagtaatggttaagattctaaaataattgcttcatttcttacctttttgctacttgtgttttgattttaggtttgtacgaagactactttatttttacaagcccagcagtaaattatatgccaacctggatctggattttgccaaggccaaacagctcacggttgtaggttgccagtttacagaatttcttcttgaatctgaagaggtgggcattctgaatattttccagagcaaatgttttttattgaatttgcttcccttaccctccctctgtttccaccttgtgttttgcttttatttctgaatatgcataagccgtatttggaaacataagaaatgatcccagacctagagttgaatcccgacttagtcactagttatgagactgggcaagttatctgccctctagaaaacctggtttactcttctgtaaaatggagaataatatcatctccatgcagcattgtgttgaagtggattagaaaacaacaggtactcactgattgatagctattattggtaacttcatcattattagtaagtttttgtacttgattgaagttgattttctaattacagattttgaatgcttttctcacaatatcacaatgtatttacttttaggatgggcaaggctacttagaagatctagtaaaggatattgttcagtggctcaatgcttcatctggaatgaaacccgaaagaagtcttcaaaataatggtttattgaccacccttagtcaacactactttttatttattggaacactttcttgccaccctcatggagttaaaatgctggaaaaatgcagtgtatttcagtggtgagcattcccagattttgttgcaatatatacatgaactttatttttaatgtagttagatatggtatgctttttattctgtgtacatgtgtttggttaagttttattttaaattagcat

SEQ ID NO: 33525 - DNA, 2300 bp, Homo sapien
atagagggattttataatatgataaaagatttgttgaaaatcagaacaactgtaagaatctggtataatttctactgatagatctctacttttctttaagggtgaaatgtggtgatacatggagggttgaaatccaaccctctgccagacctcaagttttgtgatttttgttttaggcagtaactagaataaataaattgcaccaagatttttaaagctataacggagggagcacgcttgttgacattaaaactactactggtaatgccagaagacatttctttaaagtactgtaattgtgttacatccttaaatctaagtgcagtatcagccgcagatatctgattgtagacttggtttaaaaaaaaaaaaagaactggaatatatagataattggcaatattctaaggaagcagtgttcctattttattttccagatgatgctactttatgttccttttatttttcttcttaccacttattttacaaatgacatatattaactataggatatttaaaaagtagagacaagcaaacaagaacaaaaaagtgcacgtgtaattccacaaatgaggggagaaaatcagctaacattttcatgtatattttcagacttttttcaacatacatgtacatataaaatattttataatgtatatttttaatttcgtacatatttaaacttttattataaaacaggaaatttgtaatattttgcttgatttaatatcatgaacattatttcctattactaagtctacctcttcacttttaatcgttgacataatttacataatccctacctttggtcatttaagtgtttccaaatgttcactcttattaacaacttcaacaaatatccccaatattgctttttttttcttttttaaagtaagcagagaattggaataaattagaaatccagggcacttactcatccaacagatatttattgaatacttatttgtgccagatattgcattaactgggagctgggaaaacagaactggttaaggctagatctccacttttaattaactttcagtctcatggaatagaaagatgagctgaggaactggagaggacaaatcgctcctctctttaaagtaaatgtagttcaagagaaagctgctgggtcagtggccaggtgtgtgtgtgtgtgtgtgtgtgtgtgtgtgtgtgtgtgtgtgtgtgtgtgtgtgtgtgtgtgtgtgtacacatacgtattaactaagcagtttctagaattaaaatccctaatgttaataggcttatgcataaaatagattaatccacaacacctgcatgagccacgatcctaggagctgcagagccataaaagccggacacagtacccagcagcctcgcctcggctcccggcagagaacaccctctccccggcctcccggcgctggcgcgatcccaccgcggggaccgccgccctggtccccggccgctgcacccccttctcgcgtcctacgcctggcggccaaaaacaaaactgcctaaccacttccacttggagaagccctcctagccgagaggggcattctgaagatcaagggcgaggctggaaaacaaactttgttacgtgttaacttagttggagcaaagcgattccaggaaaggagtctaaaactgtgcgcagcgtttttataaaaaaatgtttcagtggatacacgggggagcggggccgtctatggcagggcttcagagcaagcaggagactggcaggccggcgagagcaggtggcccgccggccgcatcccggcctcctcctccccgctcgcctgcatttggacgacggcttccgcggcggccggaggggagcatcctctacactgccaactcgcatcaatgggactttcctcgtgggaactgcccctcccggcggacgtgccctccgggtccggcgtgggcgggcgggtgccgcgaactccttgcagaccttgggtcggctcagtgctccctcagcgctggggccgagcctgcaccacccgccgccgtcgccgccgagggggcgggggaggtgccgcggggggcgggcgcggcgcgcggggaggggaaggggttctcgcgcgattgggcgaggtttccggtgttgtgactgaaacccgtcaatatggcggcgatcggccgcggccgctctctgaagaacctccgagtacgaggtaagcccgctgcaaccctcactccccaccgcccggcgcccgccacccctggcacttgccttcccctggccctgggttggggagcgagccggggcgctggccggagccagggcagccgcagctggcctg

SEQ ID NO: 33526 - DNA, 2300 bp, Homo sapien
gagaggagaagaaaaacaagtaatcccaaattccagttaggcttccttcatggcccaagatcaactgtcccatgttaggtaaagtcttcctcaactcttctgcccccatgcagaaggaattacatattcctgggtatttccagatgcctttattcatactttgagcttaatactcatcacagtgtgtcatggttagttatacagtgtctatctctatagtggttataatacatgtttggttgcagcaaaagagacacaacataacactgatttttaaaagttaaatgtctgtcctcctgttcccttctttataaccatctagcaaaatccagtgaagatggggttgtctcctgtgttgggggccaggtccttctatctcctggctctgtcatgcctagagtattaccttagtcatcactggatcagaagagctcaggcccccacagcatcccagccagctgggaggggaaagcatgatggggccctcttttaggacacaccaagaagctacatagatcccttctgcatagatcccattgactaaaacttaaccacatggccaaatctaatgtcaagagggactagaaaatgccttatcctgtgtagctgtgggccaggtaaaaagccagagatctcttaggatagaataagcatcctaaacttttggcaaactttttctgcagaggactagatagtaaatatttcaggccatatacggtctcagccatgtcatcatcattgttgtcatcatcattgttaccatcattgtcttcttttgcttcttctcccttttcttacaattcttaaaaaatgtaaattcttagcctgaggtctgtacaaaacattccacaggccagatttggcatgcgggccatagtttgctgaccctactactctataagaagggaaaatcatacggggaggaaagtgaccatctctggcataacgtctgtaagattataagccactgagtggaaaatccttgtcttctccatctttctagtcttggccagtgcttgacccacacagtaagtgtttgatgtttatgaatgaatgagtagaaggaaggtgggggaggttaatttcacaatcacaatttgttaaaatctcatttagtcccaatggtagcctctgttttggggggtttcttttcttttcttgtcttttcttttctttttttctcttttcttttttgagtttctttctttctttccttctctttatttttctttctttctttcttcttttttttttttccttcagacaggatcttgctctgttacccaggctggagtgcaatggtggtgcaatcatagctcactgaagccttgaactcctgtgctcaagaaatcctcccacctcagcttcccaaatgtctggggctacaggcatgcaccatcacacttggctaattttttttttatttttgtagagacagggtctcaccatgttgtcaagactggtcttgaactcctggtctcaagcaatcctcctgcctcagccttccaaagtaccgggattacaggcatgacccactacactcagccccactggtggtcttttcacatggattatcatctaaatactccatttcttccagcctcaagaatagtctaacagagagccgacagagtgagtctagtgggctttccacacatgagtgaccactcttcagttgatatggtcaagcacaccactttacctcctgacctcaggtgcaattagcttccaaatattccacatgctccagtggacctttctaattgtaagcatccccctttggcccccattgcaggtgacactcctgggtgtgtggaaagattatgggtccaaagaacttacagcttcttcctcttgaataaacatggtggcaggcaggagaatcttgttttggttttacccttttaaatatcacatgcttggtgggaatgttagcagaagtatccaggctgaacagacacttttaagttcccctttctcctccttattactcaatatcctgagggcataatagaacttttcttgtctaagtttgcctggtcaggggagggaggtgtggctcactcaaccactgaccgggacaaaaccctgccaggcatcagaaagctccgcagttcttgagttccacatgcagagcagatgcgacagctagaagtgagtagggcccagaccctggcccaggaagatccactaaaggaggccatccttccgccttcttctgcaggagtcaggtaacagctatgcctaggtttcttctttcaaataaatgtgtaattttttatagcaggaaaaaagcacca

SEQ ID NO: 33527 - DNA, 2300 bp, Homo sapien
aacttctaatcaattagcatcaaatctagttagtataaagcatcccatcctgactgcttttcagtctttatttccataagtatcttgatagggtccagagaggcctcataagagccctcaacattgctacagcatttttctttttgtgagacagagtctcactctgttgtccaggctggagtgcagtggtgccatcttggcttactgcaaactttgcctcccaggatcaagcaattttcatgtttcagcctcccaagtagctgggattacaggcacacaccaccccacccacctaatttttgtatttttagtagagatgaagtttcaccatgttggccaggctggtctcaaactcctggcctcaagtgatccacccacctctgcctcccaaagtgctgggattataggcgtgcgccactgcacctgccctgctacagcatatttgacagattcatactgtttccaaatgtagcccacctgttattagccaagactcacaggaagtgtctttcaggcatggactcatcccatgacatagttacacgagttgtggcatccattcgaatcatcttattacttggcagttctgcatggcctacactccacagcaagctcaggaaaaggtgagatcagtcccattgaagacctcaagttctctgcataaaaaggagaggggccaagaaagtgggtgagagtagataccttttaccacaggtaggaatatcagtagaaaaggtaaggcagtactggagaaaatagctgtatattctgtcttccctcagctccaccccttgctttgctggtctttatatgtgctaatgtttgaaatttgcctataagtaataataatacttataaagtccctttaagaactatatccagagatatctgatgtctttcttctcaaggtggtcatcctcagtctcaaccctggctacacgttagaatgatccgcaaagcttttaaaagcatggatgcagggtctcatcacaagtcaattaacttagagctgagcagacagcgggcagccatcactactgttctcaagagtccccaggtcattctatttttgcagtcagtgctttaagagcagttgtgatgtccacattctctggtgttcccaaaaaggcactgctcttcccacaagtgctgggaagcatgaaatgtgagggggagactatttttcatgggtaggaacaagtttttctgtctcagattctatcttgttgacatgtgtgatgctgagataaggagaccactctttctggtggacgcccttaatgccttcgggagtttacatctcattcttcaaaatgtaccactcggcctataaggaaagccaggattgtaaatgcatttgctcacgtggaaataacctacctagcccatttgcagattaaaaaaaaaatgaagcatctacgtctgtgccatcctttccactaagtgcagttctttactaactttgacttcatgcctccatgagaagcatccacaggcttttttttccccaaaattgcatactccctcatcttccacccaacccctcgagtcttgcaaactaagaactgctgggggtccttcatttttgtttctatttttttgtttttgtttttgtttttgttttgttttgccggaattttgctcttgttgcccaggctggagttcagtggccccacctcggctcaccgcaacctccgcctcccagattcaagcaattctcctgcctcagcctccaaagtagctgggattacaggcacccaccaccatgcctggctaattttttgtatttttagtagagatggggtttcaccatgttggccaggctggtctcgaactcctgacgtcaggtaatccacccacctcagcctcccaacatgctgtgattacaggcgtgagccactgcgcccggcctttgtttccattttcacacagcactgctgcccatcttagggactttagcattcacaggcccattgccccatatctacttgtcaatatgagaaagcaggaggccaagaattacaaaatgattctcctttggttggacttcagtacccaggccacccaaattgacaaaaactctgaatgcagacaaacaatgcttgttccctgtcctctggccctttgcaaataaatgccttaccagacctgccctgccaccccactcgcagccacccagcaagagcagcatgtcagcctgccggagctttgcagttgcaatctgcattttagaaataagcatcctcacagcacagtacacgaccaggtgagtcagttacttttctgcttgtctctggaag

SEQ ID NO: 33528 - DNA, 2300 bp, Homo sapien
tgaaacaatgctcataatgaattaagccagtctgtatgtgtgaaccagggtgagcagagacatgaagtaagcaacagtaagatttcacctaatgaggttgagacttaaataaaagggcatgatattggggaggaatagaaaggacctagtctatagctagggagtaatggactacgggggttgatggaaggaggtaatgatcaaccgatttatcaagaccaaattcaaatggaaattctgataatcctagtcatcttatgtaattttctcatttgaagtcacaacatggactaacactttctttttttttctttccaaatgtgataggaaagcaaagatatcctgttagtggatctaaactctgaaatcgacaccaatcagaattctttaagagaaaatccattcttaacaaacggcatcacctcctgttctcttcctcgaccaacgcctcaggcatccttcttgcctgaaaatgccttttctgccaatctcaacttctttcccacccctaatcctgatcctttccgtgacgatcctttcacacagccagaccaatcgacaccttcttcgtttgattctctcaaatctccagatcagaagaaagagaattcgagtagctcgtctactccgctgagtaatgggcccctgaatggtgatgttgactactttggtcagcaatttgaccagatctctaaccggactggcaaacaggaagctcaggcaggcccatggcccttttcaagttcgcaaacccagccagcagtgagaactcaaaatggggtatctgaaagagaacagaacggcttctctgtcaaatcctccccgaacccttttgtgggaagccctcccaaaggactgtccatacagaatggcgtaaagcaggacttggaaagctctgtccagtcctcaccacatgactccatagccattatcccacctccacaaagtaccaaaccaggaagaggcagaaggactgctaaggtgaattgtcttctccacatatccattagcagagtgcatgttcggtaccaaagggtggtgtgatgcaagctctctttcctgctgctctcgtagtttcctgtgttgctgtgaaatagaaggtgggataaggcactttggttctccaggagtactttcctctaactgccaccgtttttaagcttctcagcagtgtttttcacaccctgctttccgtgtgcatgtcttgtcacttatgattaaactaaacacaagtttttccatttttaatgctgctatgcttctatacctctggtaagtttgatcatcgtgttctgggttgggagggtgagagttcttgtgattccctttgtacttccctgacactaacacatgccctgcacacccatcatgttgcatcagtgtccatggtggtggtataaaattctcgagcttatctcctcttttaaatactgagtaaatacataagctttttctaagcttatgtatttactattaccactatgatctcagctttatttaagagcaatttaaaatgcagttcccataggtgtctttttttacctctcctaagaatatacaggcttgcctggattaagaccctatgatctctatgtagactgacttaaaatccaatggaatgaacaaaaatatttaggatgcttattggtagttgccccttttacacacttgctcccccaacttcaagcatttagcgatgagaccagaccaatgtgagtgtgtaaaggaatatagtagatttcactttgcaagtcctaggtagtgtcagacactaagactcagtagtccgtccgttgtaggaatctgtgtctttttttggaggactctttttctgtagtagtagttgttgttgttcatctgtcaagaaaaaagttttcctttttgtggctctcaaattggggtatagggtaggagacaaaatgaggctgtatttcactgttagtgagtaactaaggcttctccctccctccctgtcctgtcagtcttcagccaatgacttgcttgcatcagacatctttgctcctcccgtctcagaaccttcaggccaggcgtcacccacaggacaacctacagccctgcagcccaaccctctggatctcttcaaaacaagtgctcctgccccagtggggcccctggtgggtctaggtaggtgcctagagataaaattaagtatgactcttttgcttttgctcataaaatgatgatgcatcggaagagatttcatactcccagagggttttacagcataagatttgagcatcccagggagcccttctcccacttctactatacaaccccac

SEQ ID NO: 33529 - DNA, 2300 bp, Homo sapien
tctgtactcaatgtaacatcataagactcatgttttttaaaatgttgtgtgtggctcattttcattgctataaaatactctctcgcatcacgatactgtgaggagacctccagttactattcatccctttctagagtgcccattatctaccatgcaaacctagggccctggcaccctagtggaccccactcagcctgctagtgctggggtcctcaggcaccactctctttatcagtcgcctttatctgtcaactcttattttcccaagcccatcagagaaaggtggcatgtttctctcacccttctgtgtctcctcaaactttctaagatactctaagatatcttagacattcaggacaaaaagccaagacacactctgccacctacaaatatccctaaagagttcaaccttgttaactgcttgaaaggatcaagaaaaaggagggaaaaatagaagaaaagacactaagccaatacagtccccaccccttataattcctggttactgatgtagtcattatgtcattaacatactgtagttattactacattatgttactatgtattaggctgtctaggtgaggctgagaaacacttgatgacagtatttggtatcctccagaatatactgggaatacggttccaataacacataggatggttcctcggccactctgagccatcgtcaatgaatccctgtgaacactcctctagcttagttatgctgttcttttaagtttgtctttgagttgggaaagtagacctatttggcttggcttaagggctaaatgtctcctcttcacttggtcttctaatcctcagtccttcctggctatgtggcatcatgtctttaaagcagggagagtaaagtatcaatattttaagaaggaacattcttcccacttacgttttctattcttctttcttttgagccctttctagaaagagtaatgctctagccttcaaccagaaatgaaaagtctatcttcaaatggtttaaacttttcatatatgccttcatatatgtgtctgaggcttcggtgtgctagcctgcaaatagattctagttttcttaataaattactctttatgttcttttttaaggtaatagagcatgaacatccagtaaataagatttctttcattgcccgtgatgtgacagacaaccgggcatttggttacgtgtgtggaggagaaggccagcatcagttttttgccataaaaaccgggcaacaggtgagctctaagtcttgacatagacctggggacttgtcctctgtggacattggagtgtctgtcactcaactaaaagatttactggaaataattggatgtaagagggctaaataataattccgagaatgactatttttattggcctatggaatcttttaaaaatgtcattgatagctatgcactgctgtgtgccacaggattgtgagaatggaccttcttataaagtgaatactgacttcacaacagtggtgaattattctcaggaaccttaaaggacttcaaatatgatcatgatacctcttgttttgtctaaatacttattaaccctgctgtcttttatatacctaagggtgaggattgggttggtggtgatcccctataagccagcagagggtagtaaggcgttttaagattaaaaaaaaaatcccagtatgaattataattgatagcagacaaaggaaataaaatactaaaattaaaatacggataacagtgctttcccttactgcaggctgaaccattagttgttgatcttaaagacctttttcaagttatctataatgtaaagaaaaaggaagaagaaaagaaaaaggcaagtactacctgattaaggctctattaaatttaaaactggctgggcatggtggctcacacctataatcccagcacttcgggaggcagaggtgggtggatcacctgaggtcaggagttcgagaccagcctggccaacatggcgaaacctcatcactactaaaactacaaaaattagccaggggtggtggtgggcacctgtaatcccagctacttgggcgtctgaagcaaggagaatcacttgaacccgggaggcagaggttgcagtcagccgagatggtgccactgcactccagcctgggcgacagaacgagactctgtctcaaacaaacaaacttaaaactgtactcaggactatgtttaatattatatataaatatggtctatctgaaaatttggcttctatatgtattgtctattcttcccaatagggcaatggatacatttttatggttaggcacttctaatctgca

SEQ ID NO: 33530 - DNA, 2300 bp, Homo sapien
aaataagaggtgtctattttaagttgtaagtgtgagcccactgctcttaaatgaactgttttcatcaaagtcttctcttgaaactacaactcatagcagatgaaatcattttcttcctctggcttcttagacaaatcccttccatttggtggggtagagcaaacataagttagtatttcttggtaagagtctttcaaaaaaaaaaaaaatagaattgagtgagcacttcttagtctagaaaatattacatattgaggttaaaagagacacccatgtctttctaattatcaaagtctctatttgcctgaagtcagcagccctttttccagctacctagccaatagaaatgaaactggacttctagattttagaaacaaagccttgtgttctaaaatgtactagaattacatttctctgcataaatgttataaatagaatactatcctaggactaaaatttgtatacttcctgtcattcacacaaagtcattttttaaaatagcaaattacctctgaggaatattgaaaactgccagcatggccctccctgcctccacacccctaggtgtgtcaggggatgagaaatagtagaggctggggaagtagaattctgggccagctgtgctgctctgcacccctcagtctccccgaacaacggttgtttcaagcctgacctacttgagagcagacattgccactcacattgagctaccccaaattacacagtggctttgcagtcgaggctaggcacggaccacaaaatatatccttgatgtcccacgagccctatttgaaccctcagtttccagaggtaaaatgcaaatccactgtgttgcttactcgataaaatcaataaccccctcccatccgagatacaatttagcattttcacatttactacgtgctgcctctgactttaaacaattaaatttttttcttaaaaaaagggaaaagagacacgtctttcacaagagtaatttcagaattctccaaaaagcaacagagcttctgtggatgttttacaataattcttgattttaaaatatggagaaaatgaattctcagcttgttaacactcattaggatttgctgcggagtaccttctaccgctcagcactctacgttaacatttttaaatattttatttcttgcagttcatgtttttcctagagttataggaagtgctatggaaattcatgcagataaagtcatgttatgtgtctacatataggtgtatatacactgtaagggaagcctgtatagaatctctgattgtatcagaattataacttatttgataggctacatagacgtgaacatgttttgctcatatcgatttcagagagaatattatttttatatccatatatatgattatatttcataggtaaatacagtatgtttcacatatgcacacatagatttcccactaacttaagcgcatttgcatctgcaatgagggagacactaatttcttctaaggggagcaaatccaatcgcgcgatcaactttagaaactgcagatctgcgcaggaaccgttgtcccttgtcagaaaagtcaggagtaaaggcagtcctttgttcaaagggccccaacgggttggttaggatgactccgtgtgccacatcactcgcagtggcaatccagggaacggatctgtgaaacgaagctcggtggatcccacccctttcctccagagcttccctttcctgtccttatttgcacccgccccccgcccgcgtcggtctggggcttttgacttctccccgaacacatttcccctcccgtcgctgggtccctgcgatcgcccccagctggtggggctcgcggagctcaggggagcggggtcctctgcgccgctgcagcgcgagttaataaacagttaagtttggaagactctgcagacacgttgagggggagttaccaagcccaggcagcaaaaacatcctggcacattcctggggagtcctcagctgccagcatctgattagaaccatatctctcgccgggagtggccgcgcggctccgaagctcccggccggcggctatttaagcgaggcccgccgcatccgctgcgctgtagcctggaggctccgggcgcggggaagtcatgctcgcttcacggaggcaatagctagccggtgagtagcttcgaaacccttcttccctctggctccattttttttttaaagatctccttctctcctttgctccccctctctcacccccccgccccccgctacccttctttgagtacagaccttgggctgtggggaatcttagaaatgagaccctgtgct

SEQ ID NO: 33531 - DNA, 2300 bp, Homo sapien
gtttgcataactggacagatggcgtcctaccactgagttaggaaataatgtgaggcatggatcgttcagggactcataaattcagtgagacatatcaaatgaatggtggtgaatgactagggctcagcaaagagaatcagaaacaatctgtttgtcgtcattctttctcagttcagatatggtaagtgagcatctattttagccaaggtaatcattgctccctaaggacactagtgagtgtgcgttcctgaatcaaaggggaaaaaaaaagccaatgcaatgctggacgtatgataaattgttttaggagtcaccataactcccaagagcaaagacaaacggtgactctatctggaacagtctgtggtcttagcatcatttcttagcatcattttttttttttttttgagacgaagtgtcactctgtcaccaggctggagtgcagtggcacgatctctgctcactgcaacctccgcctcctgggttcaagtgattctcctgcctcagcctcccgagtaactgggactacaggcatgtgccaccatgcccagctaatttttgtatttttaggagaggtgagggtttcaccatgttggccaggatggtctcgatctcttgacctcgtgatctgcctgcctcaaccttgcgaagtgctgggattacaggcgtgagccactgtgcccggccagcatcatttcttttaaagaaacccatagagagctgggaaatgaccatagaaatgcaattgaaacaatacatttttgagtgttaaagaaggttccctaaaagtttactcaaaaaactgaaagctgaggaaagaagagataaaatccaaagaaccaccaaaggtttaattataaattggacagtgacattgccctgaagtttggagaggtaagttcagaacaaatgatgggagatacagactgggcaggaagggtggcattataacccggtggtttagagaagggcttctcaaagtttaatgtgtgtatgaatcacctgagaaaactgttgaaatgcagattatggttcagtaggtcctggtggggcttgaaactcagggtctctaacaagctgccaggtgatgctgatgctgagcatagggagagtttagactagcctgacttgaggaggcagagagcactaaaccctggttctaccacttactaactgtactcttgaccttgactgagacacttaatctcgttaggcgtcaatttcctcatctctcacaggtttgtggtgaagattaatggagataattacaggcatataagaagtacttgctaaatgctaactgctagtgctattaatgttattgaagccatcattccaggaggtagtcaagatgaaaagcactaagttggagattttaggtaatttcacagtggatggatccacaagtattacagtttttaagatacattggaatgattgaggctgagatatattcttatgctgtgtgattattgagtttaacccattaagtaaaccatatattttatgttcaccatgtctcattagtccattcaacagctgcctgcctaaatgccaatgccaataaagctgaattgtagcaatttctggacacagaggacttaaactgacataggcatcacctccatgtgagaaaattcctttggcggactatcatcaaaatgtgtttaaactcaaataattgtgtgcctctataataataggacattttccttccaatgaaatggctttttgtccaacggtagaaatatataaattacccggattaaaaagcatgtggagacaagaggatacactcaattcctgtcactgaacatgcagtggatttagagggagcccggactgtgatgtacagtgtgccctacaggtctttctggacctaaggggaaaaaatgtccttcaaaaataacgtagttattgacgtcagtaagtctgaagtaaaacaattacgtgctttcaagtcattttgttgcaaacagctatgcattgagagtcagctgaacgtctgacattatcctagaagttgtgcaaaggcaaaaagtttaagagtcagttcctagccccaagaaatatacaaatgatttgtcaggcaatgtatgcacacatgaaacatggcaatgttcagggcagcatgtgattgactgccaaagtgtctcgagcaggaagtaccaagggaggatggagatggtaataatcagggttgggtggagaatatctgaggaaactgcacttgatttgggccttgaagagtaattgactggatttagatttatctagaaaggtcgttcccagcagaagca

SEQ ID NO: 33532 - DNA, 2300 bp, Homo sapien
attcccttatttgatcctgcccacatgctgctgattggtccattttacagagcgctcattggtccatttttacagagcactgattggtccgttttacagagtgctgattggtgcatttacaaaccgttagctagacacagagcgctgattggtgcgtttttacagaggatgattggtgcgtttacaaacctttagctagacacagagcactgattggtgcatttacaatcctttagctagacagaaaagttcttcaagtccccaccccacccagaagcccagccagcttcacctgtcattatgatgaggctagaaagagtctatttccgagccagttatcagcatgggtaaagagaactccttttaaaatttgaattacatagtagctaaagacatgttattaacgatacattggagttctgctatacagaccattgtcatgtacagatatgaaaatgtcttttattaattgaaagtactgctataaatttttcaggtgtcagaataatgcatgtactgttacagataatgatatattttgtcatattctttggtgttttaggcattgtaaatgcatagtagtatctattttgctgtgtttaaactactggatatactttctttttttattaagtcatagtgctttcttcaacggcttaaattattcaccacaatcaacactttcgtgtagcaagtccaaaatccagtatggctgaacttccattggagaaggggttcatgtcaagttggagacagcagtcagctctaactatctcttcaacattttcttctcctttccccacacctcacatttagagacagggacatgaagtaagagagtctgctatgattaaccttctaagcttcaccccgagcagagcctggttcagaacctgttgtgtggacatgctgggagaatacatttcagttttccatgaggtagatttcggtgtcatgctgttaggtaaccaatttgaagtgttcatagtaaatttttgtaagctttccagaggaaaagctctggacttgaagctagacatcctgagttttagttccactgcttactagcttcctgtctgaataagttatgacttctttgaacctctgtattttcatgtgtgcattgagaatcttatgtaattagttatttgtgatgttccttttttgagacagagtcttgctctgtcgcctgggctggagtgcagtggtgcgatctcactgcaagcttgctcactgcaagctccgcctcctgggttcacaccattctcctgcctcagcctcccgagtagctgagaccacaggcgcgtgccaccacacccagccaattttttctatttttagtagagacggggtttcaccgtgttagccaggatggtctcgatctcctgacctcgtgatctacccacctcggccttccaaagtgctgggattacagctgtgagccaccacgcccggctgtatattctctaacttttatgactttaagcttgatggtgttgccatacaccaaccccttctcactttaatcatagggaagatttctgcaatgtatgaagcatacaggaagacagctctgtgaaattatcattctaggagagaatcttgggagagagatgtaaagagattgtacattctattcttcatgtgcttgcacttgtttctccgtctctttaaatgtctgatatgaggcttcatggtgttttatgtgtgtggtcaaagttggagtgatcagaaggaacaatggagaggaaacaagtctagttactctggttcaatgatagtttaggcacagtagtagagatttgcaccttcaatccctgtctctatccactaacagtcttaagaaacacaatgatttcactgagttaggtaggtgctagatgagaaatctatcctgatcttttcataacaagtctcatcctttccctggatagtatcaaaggctcattaagcatcaaaactctctttctctgacccctctccccaagattgaaacagtctctttctctctcaattacaacatgtgtgaccagtttataggaaaatgtttataaacttaactacttaaaagccgctgatgattggaggagccaagatggccgaataggaacagctccagtctacagctcccagcgtgagcgacgcagaagaccggtgatttctccatttccatctgaggtaccgggttcatctcactagggagtgccagacagtgggcgcaggccagtgtgtgcgcgcaccgtgcgcgagccgaagcagggcgaggcattgcctcacctgggaagcgcaaggggtcaggg

SEQ ID NO: 33533 - DNA, 2300 bp, Homo sapien
cattacaattttttagtattgagcattaggttatttattttccttcttcctaaagctactgtagaaagaaaattcaaaggactagtaagaaaaatagctcaattgataacaagtctggtttgtcaatgacatgctaatacctgtaacagttactaattatctcagcagtgtgtctcagtttttatatttaatatattcttcatcattcttaaattaataaatagcaaccaattgttttctcttttacaagcttcatatggaaagaaaattgaaaaaaaaaatttgtattagcagaaagtgaatataagggacttcccaacctcccctccatatatttactgacaagcaactgacatgagtgatagcaaagcaatgtggttagtgaggaatggcgcagagtgtgcagtttccttttttctaatgttgatttgttttctgtgctgacacaatcctagaggttactgttcaaaggaagcatcgacaacagaagtgattagagtactgattaaaagaagatttttaagaaaatgaccaatcaccatcaatcttaatattggctaacaaatgtgtatttttctttctcatattattaagtaaatagtataaacagaataattctttattagtatatccatatagtgccttttgcaagtaaatatgattctggatattttatgacctgtaattacttgaaatcggaaagcccttttagtttctcttattacccatgtgttgctgagactaactgaagaaccagttaggaggtttgttcgttcacgaaataacatttaagaaatgggtacctgcttatcacataaaagaatccagttatttacttaccctgtgaggagacataatatgttagaatgcttgtacactgcagatgggaagaggtttttccaggaatttaaattgtgcaataaggccacacaatcttacttaaaaaaaatggtgaaggggttttaattacaccatgaagttttacaattttttaggtttttagttctggttttagaaaacagagtagaaggattacagagaaaaacttcaccattagacaagaagtcaaaatgattctaagggccgcgcaaacaggcttttccaagaattaatcatgaggtggtgcttggagaattcctttactccagtgactttgaaacccccttctcactctccactagtctttcaaaggattcatggtgaattgggtctaacgagtataacacggccggccgaaggcatgaagctcacgctaccctttcagggcggagaagttcccaggaggaagaatggagaaaaagatcgcagttaggcagtcctcccaacctcaccaaggctccacctctctccaaagccgcaaggctctgccacctgcgccgggagaggctgcaatcactgtctcctcctctttctttctcttttttttttttcttttttgcctggggtgcccgaccaagcgcagcccgcagtctgggcactgccaactgactccaactccttttatggtgagaggatggattcttcgttatttccccgcccaatctggtacccacccacccacccacctaccacgtccgctgggcgcacccaagtctaaccccggggcgcacgcgctagcgcagacaccgtatttcttctcctttctcggccaaccctaggtagaatcctaaaacaactgccctctcttccacgatctagatgttgcggcccgcggacaggaggttcaagaaatagtacactccgagcggcaggcagcgaggcggaaacggtcgccggtttcagtggtggccccactggaagccgagttcaggagcggctaagcggtcgccggggaaagcaccggggcttcccagggtcccctccgagttcccactccgcacctccgagggcgtgaaaaccacgggagccgccccaccccgcgcgcccagccccgccccagcccagacaccgccccccgccagtcttccctgcggcgcccagggaggacgcgctccgcccccttccaatccggccaatgggcgcccgggcagcgcgcggtttgcctccgcctccgccagggaaacttggaggaggagaaaagtttgtacagagggtggaaaggcgagagcggagctccaagcccggcagcccgagaggaagatgaacagccccaggccagagcctctggcagagtggaccccgagccgcccccaggtagccaggagcggcctcagcggcagccgcaaactccagtagccgcccgtgctgcccgtggctggggcggagggcagccagagctggggaccaaggctccgcgccac

SEQ ID NO: 33534 - DNA, 2300 bp, Homo sapien
gtaaacctctaggcagattaagaaacattgccaccatcttagtgtctttcataattaatatcggaagtgataaacggtcacttctgccctcttctgtaggtaacacagaccaaccgtggtacaatataggaaggcagtgcataaggatgtgaatgccaggagtgaatgccatcttggaggctggctaccgcagtcatgcattgatcgttttcaaatactactggttcacttatgcagcctgcacaaatattgatgtatttaagcaaacaatgtaaataaaagtcacaactgataatcacttatatcagaaaattctggagatactgggaagctgccaagatcattatggtgaataccatttttccaaaatcatattttttttttgcctaaaatcttgaattttatcattggcaacaaactcaatttttttttctttcctccctccctccctatttctcttttttcctttcctttccccttcccctttccctttccttgtttttcttgaagttacagattccctttgttcattttcaagaaaggtttgtcaaatacccaagtccgaataaccggtttgtcactcatcttagtaaaatttgtgttccaggaaaaaaaagtatttacttcagtttataatgccatctcacagtagctcttctttgatacgtcatacttcaatatgcagcagaagtactttgtgaggacttccaagtttttacaaagaatattaagtgtcggagtggttataataaagtaacttttacaacttcatcagggatattctctggtgacagcgttcatttttccatttttttttttttttttgagaccgtgccttgctctgtcatccaggctggaatgcagtggcatgacctcggctcactgcagcctcgacctcccaggctcaagggatcctcccaccccagcctcccgagtagttgggattcaggtgcgtgccgccaggcctggctaatttttgtatttttggtagagatggggtttcgccatgttggccaggctggtctcgaactcctgacctcccaaagtgctaagattacaggcgtgaaccaccgcgcccggcccatttttcttactgtgagcgtgtggtggtgaagagctccagtacggtttggtgtcattactgtaattcctgtggaggggccagcaccttgacctaccattgcttttccaccatcagtgcaaatgtcagcattgtgcaaagggcaaatcacgtcttcatattagtatgaaaataattttggctttgaaagggtgtcattgaccctcaggacaatcgttggtcgacatcagtggttctcaacggggcagggtgggagggatagtttttcttccaggggaaatttcactggggaaaccattggctgtcacaatcgactggtggtgacatcccgtggacagagaccagagatgctgctaagcaccctacaatgcacagaacaccccgtcccccaacaaagcattatccagtttgaaatgttaatggtgctgaggctgagaaagtatgacttccaaaaatgagtcttttgggcaggagagttggagaaattaacaatcttgattacctttattacatgtgctcgtttattttcaagacatgatgcacagctacgttctggctgtaattctgccttctgggtccaactcacttgtaactttaacgtgaagcctgcagttcagcctcgagcctccctgactagcctccccgcccggccgcctcgagccctttataaccgaattttgcctctctgttctctgcgtctggccgacctcatcagctaggctataaaccccttcggggaaggagcatatcctaatcctttgaatcccgtaaaataagttttcccctcaccttgttccccactgacgggacgcgaggctgcgcggtaccgcgggggcggctcctctcggtgcgctcttcagcccgcgcagcctcattttcccgcgctcgtgcgctgcggtcactcagggctgctgctagagggcgcgcccagccgcgtggccctgactactacaaatcccagaaggtcatgcagtgggggcggccgcggtgacttctgggatttgtggtcccggagaagagattggcggaggggaaagactgagtcgtctttcctttgcccgcttctgtggactgttcgaacgcccaggggtgggccaaacccgtttcttaggaaaccaggaatccagggaaggcaggtaggaatttgggcgtgataatttctgcttccagtgggaaagaatgtaaacacggggccttgggagccgttatcgggtaactg

SEQ ID NO: 33535 - DNA, 2300 bp, Homo sapien
ggccgggcagaggggtcctcacttcccagtaggggcggccgggcagaggcgcccctcacctcccggacgtggcggccggccgggcggggggcaagacagtagtcttacaaacagtgaattggattcggtttttaactcaacatgaatggaaaagaaacaaaaccaaaattaaaacactgagcaattaaagctgctttaaacagagactatgggaaactggataagatgatgtctaagtttctatccaattttttgatctataattct[450 bp omitted]tccagagagctatttctgttttacagagatccaaaatccaaaaattctgctttacagagatgccttgtgtagaaactcaaaagtcaaacagataaaagtgaaaaagccagacaccaaaagttaaaacagtaaccactacaccacctgccccccaaatacatcagtaatcaaagatttcttaactttttgcccttcaaacaatgtgcagtcctcaatacagtaggaacttgattaaggctagctggaactgttccctgcttatctggtgtaattctaagctcaaaggcagaaacttttgcttctcctgcaatatcttcctcggaacaaaacagtgcctaatgcatgttactttgatttcagaaacagagaggagaaaatcaggagagttgggtaattgatttttgtgggattaaaaatgacatttttagtttttttctttttttatactcttttcatgaaggtaaattttgtttttttgggccattgacactggcccaatgctatgacattccaaaattgagagaatataaactttttaaaacagaacacttgattttgactactaatcagaggagtggaattgagtaacaaactcaaacattttatgaaaaataaacagactttatgctatggtatggttccatttatgtttatataatagactaagtattactcattacaagtacaataaatatttgttgatccggttgatgtaaccgtaagccttgttctctctcagtccagtgaaagtatacattttactgataatctaaaagtattaattcctatacaccaaaagatctgcgtatcatccccctcttggaatacacattcacttgcacatatccccagcctgctcctcgcaacagagcttgctttggggaggaaatttcaggatcacctccagaagaaaacaccgacagcgctcctagagccatcgtggtgccctctagcaacttacgggctccaagcgaaaaaagagctcgggttggtgcgggggggcggggagcgggaaactccatcacagacgcaagtgaaaactcctgcggcttctagattccatccgagaaggaaagatgaaaatcaaggttagaaagcagtggcagggcggtgtcccctgccttgctttaattcacgcggctctcgtaacaagccacagatgtgcatcactcaagcgggcttcccagtcctcatctcccctctggatggtcttctgcgaccgcagagtggtagttagggaagatcgcagcgggcagaaactccgccaggggagaaaggagcctgggggcgacggtccgcctaatcgttccaggaagcccctccgcgtgccggtgggcgggcgctcaggcccgaggatgcggggcgaggaggcgggtactggtgattctcctggcagcccccgcccgccccgccagggggagcgtctgcgcccgacgtaggctgcggggcctgggctggcggcgcagggcggtgactcggctcggtggctgccctcccgcgtccccaccccctccccgcccgcccccggcgcggccctgcccgccccctccgccccctcccgcagcgccatgcgcagactcagt

SEQ ID NO: 33536 - DNA, 2300 bp, Homo sapien
gcaatgtgagaaagactacagtagtctccacttatccaaggtttccctttgcaggatttcagggtttgttaccccatggccaaccatggtttaaaaatagttgagtacaggacaataagatattttgagaaaaagagaccgaccacattcacataacttttattacagtatactgttatgattgttctattagttgttgttaatcttttatggtgcctaattcataaatttaacttcatcacaggtacacatgtaccgaaaaaacagtatatatagggtttggtattgtggtttcaggcatccactgagggtgttggaacttaacccacagaaacgggggggaactacagtatcactggttttgaagatgcaagggagcaataaaccaaggagtttgggcagtctctagaagctgagaaaggaaagaaaacagattctccctcctagaacggaaagcagctctggcaacattttatttttagttttctcagttttttttgagacagagtctcactccgtcatccaagctggagtgcaatggcgcaatctcggctcactgcaacctccaccttccgggttcaagcctccctccacctccaccccctgagtagctgggttggcaggcgcgcgccaccacgcctggataattttttgtattttttttgtagcgacagtgtctccctatgttgcccaggctggtctccaacgcctgggctcaagagatccgcccgcctcagcctcccaaagtgctgggattacaggcgtaagccacggcgccaggcccttggaaactatattgaacaagttccatgtgtgattccttggcacaatgaaatatgggatcagataacttgcctctgatttactacagtaacaacaacaacaaaatcactgtctgcttttccctttatattctaagctccagctccatgcctccgtactcctagcgacctctcgcagggaaagtcagcgtcggccaaaagcctccgggatcggaatgaggaggctgctggagaagttgctttctcctaaaagggattatcccaggcgcacacggtcattacacgccggggacgctcagtcggtgcgggtacccctgggcagggccagccccgcattccaggttctccatgtgcctagaagacagtaatcgacggtatagcaacagatctgactgctaacgtgcgaaaccgatcagtagtagcagtagcaccagcaacagcagcacgaaaagcaaaactgtaatctaaacggccctcagggtctaagcaggcccgacgaagactcgcccatccggtcgccagaaaactgggagtcccgcccgcctttccggcactgaaacgcgatcggccctgcctggtaccgcatcctcctcttgaccccacctacactacgacgacggacgctcgagaacgctgcaccgcgccccgcaggaagtgcttccctgggcggaagcttctgagcgtgatatagcggaagtgccttctcttccggtctttctggtctcggccgcagaagcgagatggtgagttgtgactgtggtgtttgtgaatcgcgttccatcctcgtcctttgtgcctctctgtttgctgtgcttggggggctggcaagattccggataaggggaactggtgggctggaaagaggcatgcggtggccctcaagagccagaagaatgactgctaactggtgcctgggggacctatcccgccgtaattgtggtgctagagccgcattgtgtcctttgcctcggtccaacctttggagacctttcacggctctagccttggttgggagccgagggaaggagtttgggaatgtttggctctgtgtaacaatgaaataattcattggtgatgctctctggccggagtctgtaaagataaggtgcatttcagaacattgcaactcttgcggagggttttaggtaacgtgaaatgcgggtagtggtctctgacttggcattcgtggaaagaggcttctcccgcagtttcgatctttacgattgcctttaaattttatcagtaattggtttcccggagaactcgagtaaatctagaagttgccaggtttcagaactatttattcctttaatgtgcagacgaagggaacgtcatcgtttggaaagcgtcgcaataagacgcacacgttgtgccgccgctgtggctctaaggcctaccaccttcagaagtcgacctgtggcaaatgtggctaccctgccaagcgcaagagaaagtgtaagtaacatttttcaggccaactgtgttagcttttgtttgtattgcacttaagtgggggca

SEQ ID NO: 33537 - DNA, 2300 bp, Homo sapien
aaaaaaaaaaaaaaaaaaagttgatacagtcactagccctgacctaaacctagcaattgtatagaaaattggagggtctgactagccttcatagacctctttaaagaaagccaagggtttacttgatcagggcaaaatttacatggtttgacatacaccaaaaagaaccaccgaacactagagagaggaggaaaaataattctctcctgtcttcaattctgggaatgtctggagtaaagagactgacataatgcctgtcacactgcttggttccttaatggttgacacctgtcctaccttttctacactgacctcatttctcatagtccccgtggtaggcagaataatggctgtctccaaagataacaaggtattaatcccctcaacctacgaataaattaggttatgtggcaaaggacaattataattgcagagggaattaaggttgctaattagcgaaactcgagataaggaagttacctggatggagtcaatgtaatcacaaggggccttaaaagtaggagaaggatggcagggcacccgaaccctttgagagaccaagacaggaagattcaggagttcaagaccagtctggacaacagtgagaccttgtctctactacaaataaaaataaaaggaaaggaaaaagaataagacagatgcagaataaagagtaatgcaatgtgagaaagactacagtagtctccacttatccaaggtttccctttgcaggatttcagggtttgttaccccatggccaaccatggtttaaaaatagttgagtacaggacaataagatattttgagaaaaagagaccgaccacattcacataacttttattacagtatactgttatgattgttctattagttgttgttaatcttttatggtgcctaattcataaatttaacttcatcacaggtacacatgtaccgaaaaaacagtatatatagggtttggtattgtggtttcaggcatccactgagggtgttggaacttaacccacagaaacgggggggaactacagtatcactggttttgaagatgcaagggagcaataaaccaaggagtttgggcagtctctagaagctgagaaaggaaagaaaacagattctccctcctagaacggaaagcagctctggcaacattttatttttagttttctcagttttttttgagacagagtctcactccgtcatccaagctggagtgcaatggcgcaatctcggctcactgcaacctccaccttccgggttcaagcctccctccacctccaccccctgagtagctgggttggcaggcgcgcgccaccacgcctggataattttttgtattttttttgtagcgacagtgtctccctatgttgcccaggctggtctccaacgcctgggctcaagagatccgcccgcctcagcctcccaaagtgctgggattacaggcgtaagccacggcgccaggcccttggaaactatattgaacaagttccatgtgtgattccttggcacaatgaaatatgggatcagataacttgcctctgatttactacagtaacaacaacaacaaaatcactgtctgcttttccctttatattctaagctccagctccatgcctccgtactcctagcgacctctcgcagggaaagtcagcgtcggccaaaagcctccgggatcggaatgaggaggctgctggagaagttgctttctcctaaaagggattatcccaggcgcacacggtcattacacgccggggacgctcagtcggtgcgggtacccctgggcagggccagccccgcattccaggttctccatgtgcctagaagacagtaatcgacggtatagcaacagatctgactgctaacgtgcgaaaccgatcagtagtagcagtagcaccagcaacagcagcacgaaaagcaaaactgtaatctaaacggccctcagggtctaagcaggcccgacgaagactcgcccatccggtcgccagaaaactgggagtcccgcccgcctttccggcactgaaacgcgatcggccctgcctggtaccgcatcctcctcttgaccccacctacactacgacgacggacgctcgagaacgctgcaccgcgccccgcaggaagtgcttccctgggcggaagcttctgagcgtgatatagcggaagtgccttctcttccggtctttctggtctcggccgcagaagcgagatggtgagttgtgactgtggtgtttgtgaatcgcgttccatcctcgtcctttgtgcctctctgtttgctgtgcttggggggctggcaagattccggataa

SEQ ID NO: 33538 - DNA, 2300 bp, Homo sapien
ttcccacttcaagtgaacacttttttcccattggctttgaaatctcagaaaggttactgtgagaaaggagcatatttagggttgagcattggagaggagactggtggtttgggacacctgttattaaagtaccttcctggtcaagttgaacaacaacaacaaaaaattggcaatctttatgacagtgccaatcaaattgtggacatgaggtgggatgcatcacttgaaagccatacttttgagatacatattttaaaactcttacctagagtataatggtggttaccagagagaggctgggagttgcggggaagggaagggtgctggtcaaaggatacaaagtcacagacaggaggaataaattataagtattgaaggtgatgtatatgttaatttgagtgaatcattccatactgcatacatataaaattactgaatatcccataactatatatgattataattggtcaaagtaaataaaaattttaaaactcttcaattttataaaactcttacctaatattaatttttaatatcatatgaggatttttttttttaagagcctaggctagagtaacttactacaacctcaaacttctgggccgaagcagctctcctgcctcagcctcctgtcccaagcagctgggactacagatgcgcaccatcacgaccagataatttttaaattttttgtagagacagggtcttgctatgttgctcaggttggcctcaaactcctggtctcaagtgatcttcctcagactcccaaagtgctgggattacaggcatgagccacctcgcccagccaggattttaaaattcttttttaaccttggagataccagaattgtattactcattatccttggttcctaatagcattggttcatgcatgttctgcttttatttacatattagctatttacctttaacaatatagtagccctgataggcccaactcctacattgtaggacatccatgatctcctccccaatcccatcccatccccaagctccccatatgcgaggtaaccatcattctgaatttcatatttatcattctttgctttttgttttgtataattttaatgacttcatgtatactcttaaatgtaagggtgtgtttattttcaacttttaaaaaggttgtcatactgtatataatcttttgggatttacagtttttccttactattgttatgatttctctatattgtgggtcactgaagttcattctttttgaatgccatgtaatattatgttataagaaatatcacagtttattcatccagtatcctgttgctagttatgcagatcgctttcaggttcttgtgaactatgaaggagtaaataaagaccaaccaggtaattttcttaaaataaataataataaaaaaccaaaaatgtaaaatattaaatagtaatgtttaaagtggaagtataaatctccctgtagtcatattctcagagataaccagtgttaaaatttgggatatctcttgtcttctttaaaatataatgcatatctgcatatacatattatatacatatactatatacacattaagttttttaaaacaaaaatgagatctataacttgctgtttccatagcaatatatcatggatatcattacttgtcaatatgtagagatgtactttatcctttttaacagttctttggtgtttcactgtcgacatgtcaatatttattccctaaaccccaactttggttattttcaattttgtactgttgtaaacaatgttgtaatgcagattcttgtacatacatcttcgggcatttgctcaattatttccttaagataatttcctagaactggaattgctgggttgaaggatatgaagttttatttttgtctgtcttcaactttatttatttattgctgtatattgccatattgcccaccaaatatcaattaataatttacattcttggcatcatagtatagttctctgagcagggaatacctagtccaacctgaagttcaagagcgacttcttggaggaggtgaccctgggtctgagtcatggtgagaatttatcaagacttcaaaagagcagataaataatccacaaggaccccggatcagagagtgctccgagctgggttgccccactgtgcttgtatctgcactctccaacactaggcatcattgacatgttaaagcttagccaaatagaattgttctttgtcattctttttttaacttttacttattcattaggatgatttcataatatatttcctggtttagaggaaacaggaacaatggctaccgag

SEQ ID NO: 33539 - DNA, 2300 bp, Homo sapien
gggttcagaagctaccttcatcatcagcgatgggtttccttaccccttaattggactaactctttttttttttttttttttgggggacaggctctcgctctgtcacccaggctgctcttcagcagtgcagtctcttcagtggtgcaatctcacttcactgctgcctctgcctcctgggttccggtgattctcgtgcctcagcctcctgagtagttgggattacaggcatgaaccaccataactggcttttttttttttttgtatttttagtagagatggggcttcaccatcatggctaggctggtcttgaactcctgacctcaagtgatccacccacctcagcctcccaaagtgctgggatcacaggtgtgaaccaccacacctggctggactaactcttaattgcagagttcgtgtgcaatgtctttcagagttcctcattagaactgaactcaaattgcccactggagtctcttgcttgataaaacaccctttattgactttcttttctccccaatctcactttcccacttccagtggtgctttctaagattatctcttaaaacaaaaacaaaaacaaactacttgcaattgaattcttgtttctgaatctacttctgggggaacccaaactaagagagccgctgaaatggaattgtatattgagaatttaagatgagtctatggcatctggaatttatgcagttggagctgaataaaaaatatttctttcaggagtcaggatctttgtctctgtgacaaaatttcttccacacaaatcactaaagctttgaacaaaagatgcggaagctttgtctctggaaaccaccattaatttatgaggggaggataggggttgtctttattattccagtgctttggatataggaagaaaaagtcattaaagctagaaaatcttcactaatggaatgtttacttataaaattattcttaactcaaattttctttcccgcttaacatttattctacctcactcataatgcactagcagctagtgttagaatatttggtccaacaatacaaataaaactgtagctcaattttttttttttttttttttttgagatggaatctcactctgtctcccaggctggagtgcagtggtgcgatctcagctcactgcaacctccgcctcctgggttcaagtgattcttctctctcagcctcctgagtagctgggactacaagtgcatgctaccatgcctggctaatttttttgtgtttttagtagagacggggtttcactgtattgtccaggctggtctcgaactcctgacctcttggtccgctcgccttggcctcccaaagtgctgggattacaggcatgagccaccgcgcctggccaactgtagctcagtttcaataggaaatctaaaatcttgcaaaataagcagcattttattaaatgtatgaaggtgatgttggggacttgctagaatcaatgcaaagctatgggaaaataaagacctggtagaataagacaagataaaaagcaaaggagagaaaatggatgtggataatgaccctgagaagaactttccaacacagtgatctgattatcaaaggattaagtgaagttcttgagaaaattagtgatgtcctcaaatatgtttacaaaaattgatattctttctgattattctgtgaaagttaagcatgaagggatgactattgggttgtattaggctgtactttggggaaaaattctactccagaacattctatttagattttgagtgacagaactgcatttaaatattttctttcataaaatatttaatctcaaagtctggcatataacaccttttaagagaatcatgaaaacatccacttagtttagtagattgaaacaagaaggaggctcatcccttgccttacagagtctcctttggttgaaaatcacttaaacattgaactgagaacatttgctgtgtttcctgatttatagatatgtttctaagaaacatatctataacttccaaacagtcccagctggctgtagctaaggctgtgtaattgataagatgcatctggtttcaaggcacagattaagtacaaggtcaggctcttgctgtcgttggagaatccggttggggtaggagctaaatctcaggaccacttgctctatatatgagtgccaagataatctagagcagggagaggcagagaggcaggcagcctgctgggctcttcctgctgttgaaaacttacccggcccttacagaggaaatcttcctcctctcttctgccctgaatgttttcccaaacatgaaggtaag

SEQ ID NO: 33540 - DNA, 2300 bp, Homo sapien
taactaaatgtctctctacctttttggtaccttgtttttggttagcttcctctttctaaagaggtatcttttaaaaaatgtatcctgaccttattcctaataaatctaaaaaatgtgtttctactttcattttcattatacaaagtcacatctgagcttttctggcctcttcccaacaagccatcattttttagaagatctatattaactttattgtttatctaaataatattctgctattcaggactgctttttctttaatccctttttgttcatatgggtattttaaactagttttctgggtctaaaaataaaaaaacctccatgaaattcatctcacttcgtttcttccctgtcggaactctgaaacgtaactccaatgaggtaataggaggccatcttcctccaccaccacctttctcttgttttcttttttttttctttctttttttgagacagagtcctgctctgtcacccgggctggaatgcagtggcacgatcttggctcactgcagcctcctcctctcagattcaagcaattctcacgcctcaccctcccaagtagctgtagctgtgactacaggcacgtgccaccaggcctggctaatttttatatttttagtagagacagggtttcaccattttggccaggctggtctcaaactcttgacctcaggtgatctgcctgcctctgctcccaaagtgctgggattacaggcatgagccactgcacccggcctctcttggcttcctaaaatcatcgcctgccatcctggaccaaaaacaaggaagttccataatttcacatactcaagagtagagctaggcacctctgtgtttaacctctctgagaaccaaggcccaaattcccaagctgcctgtaatccctttagaaaatatttggtgtcatggagaatagtaccaagccttggacaattaagattagaggtcccataattctaggctagtaacgcaaccaagtaaaatacataacaagcagaaaccctccctggctttctctatgagtacccctgtgtatcattcctgtggtcctggtcacacttccccactggctactcaaagacagaaatcaattctctggcatcacataaaccccagacccagggttttttaaactcatgtagtatggagagaaagcttcagggaaagaaagcaagttcttggaacatttagaggccgtgactatgatggacaagtgcctgggttccagccttcttttgctgaagcgggaagggtgggatgagagccaagagtgtgctagcagggaatggcctctgagaggatattcaccacgacatgcattcgtcaccacaggagcaggatgatgtgagattgactgccatcttcttatttgaggacctggcacccctaacaggaagaaggtggaagattttttttgctgaagaaataaaaaagagcctgatttcattccttctgcacctttgggatcccaaccccaagattggagttgtaagtgctctccacagacacctgcacctcctgctctccccatggctgagaagtaccaataagcctggtctagctgcaccaggagccagatctaaagtcaccccttagcgctgaacctgaaaacctcttctccaattctaggttcttcttactatctcttcccaagcttactcttccttgaaactgggaaggtgccagcaatgactataaagccattcacaccactgacttttagtgcttctttcccagtactattcagcattttttcccttctggaaggagatcctaacgttctggactgtgatgcagaaaactctgttttccaggcttgccgtgatgtcttgatggtctgcattccctttttgggcctccaggagctctatggggtattagaccgtctccttgatcaggatctaccaagggccagggatttctacaggcaattctgtgtgaaactggtgagtgtccaatagatgccgcctccaaaaaaggcaggacaagggtctagacaaatcgcagaagggcaaacaatgtagcaaggaatttctggccagagccagaactgccttggaaggatggcagtgatatcctgatttcacaggatatagtgacatagaggtatcctgccacaggaccctctgctccattcccaagtcctgactgggatatattctccttggttcctaaaattcatatctgttgattaatcccttaaactctgatggcttcctgattaaatgtagatcaaaatacccataagacaattttcagccaattaatttatggctgtgtgagtgctcactggcctt

SEQ ID NO: 33541 - DNA, 2300 bp, Homo sapien
actttgctgaattcatttattagttctaacagttttttggtagagtcattagagctcctacatataagactgtgtcatttctaaacagagatagttttacttctccttttccaatttagatacctttttaatttttccttgcctaattgctctggctagaacttccagcactatgctaaatagaagttgtaaaaatggtatccttgtcttactcttgatcttacaggggatgttttcagcctttcaccattgaatataatgttagctataagctttcacatatgtcatttattatattgaggtaacaaatatatctttaatggctgcctaatatcttatataaatatgtctcatcttacttaaccaacctcctatttctataacataattgttgcctgttttaaaaactataaataatactttgataaacacctttgggcaaaaaaaaatttctgaacttttaagtatgatagttgatagttttattcaataaatattattaagtggcatctatgtcatatcagtcagtgaactaggttgtaaaagagcaatgatgaacaagatatgaccctcccctgacagagtttcagcctactgggagaaacagatgtaagaagcacccacataatttctccaaatgtggtaagaggcaggataagagaaagcacaggttgccatgttaacaaaaatgagggaggtttgtagaaagctcaaataaatcaatcttgaagctgaattaagaattaaccagtctctagaagagtgttgtcaagtagaaatacaatgcaagtcacatatgtcatttaaaactgtctggtaaccacttttaaaagagtgaaaagaaacaattaaattaattttaatattatattttatttaatccaatatatttagtatactatttcaacatatattcattattttaaaattggataatttatattattcttcatactaaatcttcaaaatcccatgtgttacatcttaatccagatcagccacaactcatgttcacgagcttatgaggctagagacagcacagctgtagaacttgaaaactaatctctaatgatggcaagcaaatcagtggttgtcaagggggaggaaaagataacctgcaaaggagcatagaaaaaaaaatagagtatcatagaaagattccatattggttatataaccatcagtgttttcatgagtgtgaacatctctcaaaatttttttaatggatgcagcttactatacataaattatactttgatacattaatttcttttaaagcagtgagccagacaataaagacaagaagactacatagagctttcccagctggtactgaattttattcctctctaagagaatcttatttctctgatggtgtcatcatttttaattgctttgctaatttggtagctgactaatggtatcttattgtcttaacttacatttatttaaaagtaaatggagtttttcatgggtattgaacatgtgcattttttgaagtcatatctagactttttcatatcctcatgaagtctatagtaaacatttgaaagaaaggcagaaaggaagaaacactccattgtcatttattcacttgtgcattcataagaacctatagtatatgtgtcactatttagaacatgaaaagagacgtgaaattgataaaagtcactgctgcagacttacaatctagttgaggagatacatatctctctctatcattctctctctctctctttctcactctctctcacacacacacacaagatggagaaaacaagtaggtaatgctgtcacagatcatataatagtgttaaggaacacaaagtgagtgatgatttgttcatcaatctaatctaaagaatggaggcgtattgagtatgctcaccaatgcagtctgattctgtgttcccatctctccctactcctgtcaccacctttctcaacatcccaacgtgtcagaaaatgtgacacgttagttgcctggtcagatgtgattggcagttcttgggaattccactgggtatgttctgatggtcactgtaatatccattcctccacctggttctcatttcagtaaactgaaacctcagctctcactacaagaccaccttaacattcttgaggagaatattcggaggctgctgccccttccacctctggaaaatctgaaaagtgaaggccagacagacaaggacaaggagcacattcaagtatgcactagtgaggcctaagtaggatgacagtctgcagtggggccttactctctcaccccagcctgagactcacacacacatatt

SEQ ID NO: 33542 - DNA, 2300 bp, Homo sapien
ttagctgggatatttacttaaaatgcagatttccaggtcacacaccagacctactgaatcagcaaaactggacatagagaccaaaagtctacaatcaactaagttccaatatttctgatacatactaaagtttaagaccttctgatatagaagtgaatgatgaaaaaaataatctagggtccaaccctaaagggcctggaatgccaaacttttaccttatggttgataaaccaatgaaaattttaagcaagagctaaacatttaaaacgataattgtagggaatcagtagattcacacatgagtagactaagagcaaagagactatataggagatcagatgcaacttgtagcaattacagcaatgtcattgcaatagaaatgagacatgaaagggcaggagacatcttacaatgaaaaaaggactgagtctggtgattaaatatagatgacaaagaagagagaagagtacaagttgacaccaaggtttccattaggacaagagagttttctaagggacataaaacatactaaagaaaccacaatgtttcagacttccagagcaggcaggtcagagcctgaagcacagaggacagcagcagcccattcactatcctctcccaagcttctcaactggggaagtcacactccaatcctggagttttgggaagtacttgggggatttttggttgtcacattgacaagaggaatactggcacttggtaagtggggctcagggatgctagcattcccctagtgtctcgagcagtccctcacaacaaagaattgtcctgccccacattccagcaacgtccccatggagaaatactgaccaacactcactacagctaacacctgaaaatcaatgtgctgtgcagaggcttcctttaatgatctcatcttgacttggcccaaaaagcaaaataataacaggagaaaagcttctaaatcagagaaaaacatgcagtgaggaccagggagaaataatggaaaagaataagcaatccttgcatcatgccctgttttccacaggtgctatggccaaggatcctgacttttgtggtacctgcagaatacacagaagctctggagcccctgtttagtatcatcagaattctgattatggcagaggagaagaagcagcacagtgccaaggagtcgacagcacttgtcgtctctacaggagctggtctgtacattcataaacacagaaaagcttttctattatgagggatccatttccaggaaggctacagtgctttgaccttaaacccaaccccaatctctaacccctgcagtgatgatgaaaattgctttctctttctagtgaaacttccttcaccacagcagctactggccagacttctggtgagtgagttactaagaaccaaagtagaacaaatttaagctgataaggatagttcagttccaaataagtgctaatataaattacatagatactccaaacaaaaagaaacactaaaaaggcataataaattttctgctatactagtgacattcatgaatatttattattgacatgattaccttcccactctgaaatacttgttgaactttacttataattttaaagtaagcatatattgaatctcattcataagtaccattaaacaaattccacatctgttatttggatttcccatctctctctttggccccatatggatgatttactcaagcactatttcctcatgcctttatttaattaattgatatatctaagtgttaattctttccacttatttttggttggtgctttccatgtatttttttcacctttatcctcagggaaaaagaaatgggagaagggctatctaagtattagcttcattctagaataaataagaatagactgtgatgatttgttaaaagattatccaatgcagaaatcaaaggaattggaacaatggtaaaaagggaaaaataagtggggcttttaaacgcccctgaaattgatgagctccttctcttctatccttcaggtaatatctatgcctgccagtttaggggagttacgtggggctggtgcaatagggcttttgaagatactgcctgagataattcacccaaaattggtagacctatggaaaacacgtttacctgagcttctgcagcctctggaaggtacaagggattggggccaggtctttacccagggggcaagaacataaagaaataatgcaccgtttctctgtgtaaagccattaatgctcattttaggcaataaaaatgatgaacttgatatgcaaggtagatagctatttttttcttcttaactcct

SEQ ID NO: 33543 - DNA, 2300 bp, Homo sapien
agaaaaggtgtacctcttctctaggtagactactgagagtctttatgctaattgttttggccaccatataactgcttccctgttcaaaatggtttttttcttcccgctctcttttcaaagacctgttcactaagggattggttctcatgtttctatcctccagagaagcaacacaataaacaaattaaaaccaaattattatatatactataatgcaagttcataaaacttcactctaatttctagggccagatatatttcagaattgacaatttttcagcttttagaaaaacattactctgatagaaacccataatggaaatccatgaatatttctgcaagaaaattaatgcatatccacacagcatagaataagattacaaacagctttaaaaccgttcagtttgggttttgccaccaaatgagttggcactaaatttaagaaacaaaaatccagttttcatagttgtttggactctgaaattgtgaataaacagttgtctgttatctttcattgagtattttaaaagcaaagcagtgttttaggccaaagttacccaacaattcataatctatggtgatagacaatatgcctttgagagccaaggagaaagattttggctaaagagagcatttctggtgactctttcataacctatcactcactttcttctccctctatttatacaggttgagcatccctaatccaaaggaagtctgaaatgcttcaaaatccaaaactttttgagcaccaacatgacactcaaaggtcatgctcaaagaaaatgctcattatagcatttcagaatttggattttcagattaggaatgctcaaccagtaagtttaatgcaaacatttcaaaatctgaaaaaaatccaaaatttgaacatttctgatcccaagcattttggataaggattattcaatctgtattaacactattcaatttatgttcctttttcaaaaatgttcccacttaattatccttaagattatagaataaaataaggtaaatttcccttctgcaaaacatagtaaaatgttgctattgcattgttcttaccctaggtaagaaattctgttcttctcctcatccaaaccatgtgtgaaaagtcctatattgaagctcgggaaggatggccattgattgattatgtcttctcccagtttgcaacgttgaacaggaatctggtatgcagaggctacagttttgagtgatgcactataaaaagtacagttcgctcaactatgtttctttttaaaaaatgattaggatccttaatctgtcacaggagtagagtaaaaaataaataaataaattttaaaaaaattaaaaataactggaattcaattaaataactgattttgaagtcatattttaatcttatcacttttattgataatttttacagcctctagttttctcagttctttttttttttttttctaaaatcacctctaacttataataaacacaagataggttaaatcagttttccctaagttaacccagccaccaaaagcttggattggggttgtctggagagggacacagagactggattgcttccgagaaagcaatagagatatcaattcttgctgcaacggtgtcttagttcattcaggctgctatagcaaaataccatggaacagtgaagtaagttctatgaagtgcatttctaaaatagcacacttctgaaatcataaataagtttattagggttctaaccctttgctgtacacaaacagaaatgtatctgttatatgaatgagaaaaagctgtatgctgatggagcatgcttttaaaatcctttaaaaacaccatatagaaaggaaaatagcataaaatgatgttttataaacaaaaaatatttatttctcacagttcaagatgcggggaagtccaagattgtctaatgagtgcctgcttcctaacagatggtgctttctcactgtgtccttacctagtggaagggactagctagctctccagggtctccttcatgagggcatgaattccaaacactagggactttctcttatgacctaatcaccttccaaagaccacacctactaataccgtcaccttgggcgttcagatttcaacatatgaattttgggaaaacacaaacactcagatcacacaattgaggtcagctttcttttgataaataggctgaaaaatacaagcttatgatctctgtgattttagcaaattagtcacaactgaaataacagttcactccacaaagaagcatgctttgaaaaatttgccctgaagaaaatggcaaaggcctg

SEQ ID NO: 33544 - DNA, 2300 bp, Homo sapien
aaaaatcattctaatatcaacattaacaatagaggggtatggggtggactaagataagactacctgctaggaggctatagaaatattccagctcataagtggtaaagagatcaattaacatagtgttcgtggaactgatcagaggagtcagatgctgaagaatagaatgaccaggacttggcatcagttggatgcttattaggatggaggaacctgggatggtttcctaggtttctgactcaggtgatcttgggatcatcaatttaaacgaggaggaattacaaatgtgggacagtacaaaatgggtttgatgtagacattttgatttgaacacctatggtacagtcaagtggagatattagtaggtttgaggatattcaggtttggagttaaaaaggaagagcaaaaattggacttatagatttgggtatcatcattgcataagtgacaaccaaataagtggatttagatggagttgtttaaagagtttatagagtgggaaagtggctaaaacagagttctggagggcatcaatattaaggggaaagcaagggagaagaactcatgatggagaatagggaatgtgctaagagtgtaggagagtcaagtagaatgaggtcttagaagcttagaaaggagaagttttcaagaagcaaagatgtagtcctgagtgttacagcactcaagaaaaatcttgacaagtgtccattgcttggaaatgtgtggtggaagaaccacccagctaatacatagtatttaatgaaataaatgatagttgccattagccactaagttttgagatgatttgttgtaaaatgtagctgatacaaaaaatttatcaaacatcagatagaaaaggcagaatatagaactctataagaatgatgtcaatttttaagaaattaaaattcatggaaaacataggaaataagtcaaataaaaaatatactaaaatataccagtgtttatccatgggtcctatgtgtattatgttttcttcaacataacatttgtgatttctacatttttataatcagaatttatcacatttatatttcatactctggaagttgatgattttccacactgaatggcagcaagattctagtggattgagaggtgaatgggaggtgagaggtagagatagcaaataaagaccataccttggaaacgctttgctccaagagcaggaaagagaaacagagtcaggtgggggtaatagttagggtcaaagtgaggtggaatcggtgaagattcttttttttttttttttttttgagatggagtctcactctgtcacccaggctggagtgcagtggcgccatctccactcactgcaagctccgcctcccaggttcaagtgattctcctgcttcggcctcccaagtagctgggattacaggcgcccaccaccatgcccagctaatttttgtatttttagtagagacggggatttcaccatgttggtcaggctggtcttcatctcctaacctcaggcgatccgcctgcctcggcctcccaaagtgctgagattacaggcgtgagccatcctgccagcttgaaggttctttaagatgaggtaagttctagattgcttaatatactaaaagaaagtgagtattagagagaggtttaaaaaatagaaaagctctgtctcaaaaaaatacaataaaataaaataaaatctagtattacaaaaattagccaggcatgctggtgggcacctgtaatcccagctactcaggaggctgaggcgggagaattgcttgaatctgggaggcggaggttgcagtgagctgagatcgtgccactgcactccagcctaggcaacaaagcgagactctgtttcaaaaaaatacaataaaataaaaaataggagagaagggcaagtattgaaatgagtatcagtataaatacatatgtaaatacaaatatagctctgtcccatgcaatgatcttaacctgaacattttttaaagattttaaagaatttaaagaattatttcttggctgaaagcagtgaggaaagttttcaggagtacctaaagctcctggtgttctgaaaacctatgaaaaacataaggaagtttcagaaacggtatttgtttgctgcctgtacagactttgagcatcgttaaggcccacgggcccacggtgagcttgctgctgcatcgggaagacttccgtggatacgccctgggccaggtgccctggctcctgaaccagtataaagacaaagagattgatttccatgtcactcaggtaagagccataccctaaaggaactgaatcagagaacc

SEQ ID NO: 33545 - DNA, 2300 bp, Homo sapien
ggagatatacctaatgctaaatgacgagttaatgggtgcagcacacaaacatggcacatgtatacatatgtaacaaaactgcacgttgtgcacatgtaccctagaacttaaagtataataataataaaatttttaaaaaagaaattaggcttatctcatgaaactgacaaatcaaacaaaacacagcctaatttcacttttaatatattttataaaaatctaacacgtcatctgaagaataaaaggataaatatcaaagtttagattaattgtagtatacattaaaatcatctacaattaaactattaaaaccataaaatttaaatttttataacgtttctgtattatttctatgtatctattcttctttagctttatattttacctttactgccttattaatatttttgtctgataacatcatgtgggaacatagtaggcctgggattgggtagcttcatttgacaagttacattgaaaggggatggctaccacatatccagtgagacactctaattccttagcaggctagatttaggctccctcacaaatatctagaaacagtacttaattagttagcacatgccatcctattcactttgagaattcgtgtttaggatcctcttagagtcttagagaaatcaaatccatattgtgttagcctcatgcaatgagaagaggaagaaataatgggaagatgtaacaagcaggcgactgaaaaatgaaataaaatgacagcaaatcagctattttgaggatttggggattttaaaactatctgcagtattggtttcaatgagtgaatttactttgtctgaaaggattttagcaaaaagttgtgttttgattgcagcgatgaataaattaaaagtcaaaataaatcaattatctcctaacttctctaatctctatgaaatcaaggaagtctttatatacagacatacagaaaaatcatttgtcaccattcacaaaaatattaagaaaatggttgtaacaattacctaaatggctagctttcttattattgattctgctgtacattgttttttaagactctaagagcacataatttctaacatcattttttcccttatagggaatctgttgttttatttactacaagtagacttaacatcttatagatgttaagagtttcgggatgcctctaatcaccccagtacctccctgactaaccaaacttggcctattcttcagtgagtcatgatgctggggaagagctccttgcccaaccacaacaaacattcttcagttaactgctatttactgatccactaatgaatgtttgggcaaggaccttggtcagtgcttttcaaagttcagtgaacctaagaatcaccaggggcgcacattaaatatatagattgctgccccctcattctaatttactgggtctgaagtggggcctgggaattcacattttaaataaggataccaagtaaatcccatgataaagtcacctggagacaaaactctgaaagtgatgctgacttgggaagcggaaaatgttgaggatctctttaatacagtgcaaaatgtctatgagaagaatgatgaattcaaaggtttagttggaagcagttgacctttgaatctggaataagcttcaccgatgaagttaagatggccaaaaaagcagcagcagatgaaaattgtcatgagctcccctcctcagcccattctacatttagccctatagactagcagtactgccttccctttctctatcatcctccatattcacatagagtctggacatatattgaagattgtcatcacatagatttatagttggggaccagatttcaattcatgctagataagttgaaaacattatggaaaattgatctagataaaaaataatttgaaaacaaaaagaaagctgaagacagagaaaaagcctgagcctggagtgaggccaagatcctgaacatgccagggaggaattaatggagagggaggtagagaggtcttcactttgctgctgtcagttggacattccatccaactgcccctgaagtgcattccagtccactgagcatgctcagttcatatgactgattttcactaagtgtaacaatcaacgagttcaccataaagcctttcccaacatcaggacagtaaagcaactactgaaaaccattcctgaatttgtgatcaatggactcaagtttagggagaggagcacctttggtctgcaacaatggtttgaatcccagtctctaattacttctttcccaaatactctggtcaccaaagggacaatatttggtgagatgcag

SEQ ID NO: 33546 - DNA, 2300 bp, Homo sapien
agattttgtgtgagaaggtcttctgtgttaccagccaaaacttcagaaggcctgcagttgctgaagcaactcagccagtgccagtaaacttcatagcagactttgtttttcagcagcacacatctaaatattgtttagagaacacctatattctttgcatgcacagagtcagacctgagcacaactgcacacaagtattcaattcctagctctgaaacaatcacctactcatcagtcccaattagcctacttctacttcccaaagccactggacactttgttgtatgtatcagaccagaaatatttctctctgggttgcaacttttcctataagggccagacggtaaatattttaggcttttcaggctggagagcctctgttgccagcttcttaactctaccattgtagcacaaaagcaaccataaacaatggccaattgtgtgactttattcctataaaacgttatttacaaaaacgggcatcaggctagtttaccaatccctgctctagaaaaaggactcatgagtgagatatgtcatttaaccttccaaaagaacccaagatggagaacccaaatacattgttgaaaagattctagattcttagttggtgctgggtcaattctagtgtttggatcacagacattcgcattccatctcaaggatttccccttaccatccttaactctctccacctgtgtttttccagtgccacagcatacaatcttacttctctgtcctcttcatagcccacattacaaataaagtcctctttaagctcatcctactggcacctaactttgcatctctctgtattatgacttccagtatttgcctttagctccaaacaccttgaactcaggacaaatgaattttattttaggacctcaaagaccaattaaagaaagaaatatgcaaattaaatgacatatattcttgtccaatcaccaaatatttcttttcctgtttatcttctcaggtaatcaagggtgaagctgctatcccagccccaaactagcttcaacactggtctgcagcacaccactctactttctctttaggcccaaatttcaatctttaaaatctcaatgtagtataagagagagaaaaaagactggaaatcagatcatctgtattccagttctgacttactctggccttgggaaagttactaccatgtatattaaactatgtgacctttgagtggtgggttcccagctgtgtttcaagtaatctttagacttgctgagatcatcatttcccaccatgtgataaaaatctaagctgtctaaggaatatttgttttagttgttttctactgctttgaaaaaagtttgaaaaacacttgttttacaaatgagggaccagtgttccaatgaggtatagtgatttattgaagctcacatagctggtagctgcttagtgcagaaacaagactagaatatgtatccacattctcagtccctatagttttttttcttttctattgcactattttgttctgcttcaccttaggatgaaatccattttacttcaatctaaagttaaattgcaaccatttcagagaagcgtaatcatcattacatataaagagcccatttgatcattgctattttaattctttccaaattaaattttctgtttggttttgctggcatatagaaacactttttactataataaacttgtgttgataaatcatactaaattcatttattaattctaatgtttgtagattcttttgaattttctacatacacaatcacattgtctccaaaaacatttcttaaatagttaccaataactattctataatcaaaaactaagaatctatacattcctaaggggggcagcaattttaagcaattaatctaaaggattctttaaaatggaaagagagatttctatgcagtagcaatagctactacaatagcccttgaattgaaaactcactgaaaattcaggactctgtgtaacatccaacacccagagtttcagggttactactgattggtgtaatcatttgcaaagttcaagttccagagaacatttattttgacaaccctctaggtgttgctaggcttctgggatatgacagcattgccttgtgttagctagcaataagaaaagaagctttgtttggattaacatatataccctcttcattctgcatacctattttttccccaataatttgcagcttaggtccgaggacaccacaaactctgcttaaaggtgagtaatatgatgatttcattttcaatcttaatatttcaaaattgttaatcatgtttccaaca

SEQ ID NO: 33547 - DNA, 2300 bp, Homo sapien
ctgagtactaaggcgatgtttacagagaaacaactgagaggtctaggaggaggggaactctaggcaaagttgagagtgatggtggtgaggagagataaggtaagacgggaccaaaagcaaatcttggctgaagcataaccttgtctgaccttgaattttgaggaaatcaaatgaccttaggaaggagtagacattgttcaaataaattacgtgaaatttgtatttacagttttttaaaaagtcaaataatcttaaaaacagcaaatatctttcacccaatctaccttaagttttgattcatccttctcacatggaacagtgaactatctatcagcctataaactacctgcacgtggtcacttgttctattggtcactgcaaaaactgtaaatgttggggaacaaattccatgagatggccatggcttatttccaagtttggtcactttacacccttgtaaatgacatcatgtttcaattcaatcccaaaaacaaagacaaaaaattacccagtcatatacttatgttataatagctttcttccttaggtcgtagtgaagaaaagatgaaaacacttcagccaaaataaaaaaataaaactagttattttaccacctgatctatgagtaaagaatcaagtacgttgaaaatccctccgtttgaaggaatgcttttcagatagtgggtaaaactaatttgttttgcagccttcaccttgtactggatattcaaacatattacctagttaattaaatctcttcataatatgataatgcttgtttgcacactgactccaaacagcagtcacgtatgaagtttgtcataaccaaatggattacagaacacagaaaagcaaaatttctaataatctcaatttttctaaatcaaagaatgcctctccatgttttctaagaatggaaacaaaagaaaaggttgaatttcaccccaaaactgggaagtcagttacacaagccctatccatacagatatacacagtcttaaaaatgagacttttaagatatcttttgagttatcccagaagacacaaacttcctgctcactatgcacacctagaggacctcaaagaggaagaaatagcgaaataaaaagtcctttctatggaggtaggaaggaggaagcagcatttacaataaaaaggcacaatggtttcaggtgttaaattcctccttgatcctcatactacaatacaaatctgagcttttgctccattttaaattacttcaagcagtgcctaccatcctggagtgtgactgtagcctttaccaattgtttgctataattttatctgtctttattttatctttttattttccctctcctccctgcccaccttaattctcaattccagttttgtagaacatactttaggaaaagtggattttgagagtaaagaagaaaggaaagaaagaaggaaagaagggaaagagacagaaaaagaaagaaaaagaagaaagaagaaaaaagaaaaaagagaaagaattttcttgctcacttatatatatacaggatattttgttttgccagcagtttatcctccaaaggagtgtgtcttgcttattatataattcagtatattttattcaacagaatgttttttattcattttctatgtaatctaaaaacctgtcaaaaacatagaatttgaaagtatttcgaatgcagaaaaaaatcaccgcattctgatgtagtgacattgctatttaaaaacgaaaatcaatctcattaaaaatgaagtgaaagataataattttggattgataagtgacaattaaataagttttaaactactgtttttattatttgaaaattttaattgtaagatttgtttttaaatatttgagatgcaactccaatctttctgaatttgcgatttttaaaaattggaatagtttttgcaatgtttaatttgtgtaaaaaagcactaaaagataaaaataagcaggagatgggggtaggaagataaaacagaacaacacagttgtgtctggatttgcattgagtctctgttgcaatttcttttaaaaaggaaactaaaatgtagagattctcaatccggtttagcatacataggagtttctccctaaaatatacccgtctctcttaattttgtatgtcttcaacataacattcattaaattttattctgaaactgagtcttaaaaactgaaatacttttaaagagagatgtttctagcttaaatatttcatcatatagtaagattcctgctgagagctcataataagaaatatgaaaccagttactctggacttggattttga

SEQ ID NO: 33548 - DNA, 2300 bp, Homo sapien
tgaaatgcaaatcagatgaaacagagaagggactgttagtttgttttgccaaaagatagtatgattctttatagaggggaactttcctcaccagttaaggtggtttcattttgtaaaaaatgctttgtaaatttttagggccacataagctcaatatactttaacagggcatgtttctaaaatgtgtcttattaaaaatgtaccccagattcaataattatttcatgcttttgaaaaaaatacttcataagtatagaaaagacaaagagtggtaaatacacatatcctgttatcttaaacatgtatgcactctcttctggaagcttcaccacaaatctctgagttcttattaccactttataatggagaaaactggggctagcagagactagaggacttgcccaaactactcagagacagagcagctgaccactagatttgaattttcctcattgccttgcaatcatgccctgagaccaccagcattaggtggtgtttgtaggtttcttacagaagggtggtgtttgtagatctcttgaccaagagtcctatagtaagctaaactatcatcctaattaaaaggatatgtgggttctattgtactagcatgtatattaagatttatttggggaaaattttcagtatatctcttcctcatcactaaagataactgtaccatgtcctcttgaaggtatgaatttattttacaaggggcatggaaaatttgataaccaaaataaggcgttgcctctcctctatctttcccatagtgctccccatttgggggtgaatattcttaggacttagcatcattgtagaaaataaggtaggctctaggttttttcttattttttaatgctatttgggattaaatggatttactaaccttgaataattattctcatgtttcatggctctctttgtctcctatgttgattgtcatttccgcaatctaatagcatttcccatagaaaaataaaaatttacacaaccctggcatgaaagaacagaggtctgtttattgcatttccatttcctgggttgcaaaagcccagcacactttcagttcatctcttataattcctattcaggccactgctgctctcattacatttgtaaaacttcatctctctccttttactcatctgagagcaggtggacccagacagttctttggaggcccagtgagtgatttctcttgagagaggcacatctttccagtctgcaaaggaatgaaaatgcagacagtcacatagatcactttgaatggtgccaaatacattccaccaaatgctactggcaataattagagcatgtcactgggagatgtggcgattttcttccagcataaggctccagtcttaccctgagtgccatgaaactgacaggacagaggcagtgttctccatggaaataatgtagacttctcatgatctgagaaaagaagggggagtagcatttcttgactttgaaatgtctggagcaaggtacccaggattaagtaggaaccacctagaatttaccatgcccttcactgactcatacttaccagctatttcacaaagtaggcaaaagagtgaataaagataatcattttttaataaacagggttgtggtctctggctgaggaaaggtataacctgttgtagattacaaaaaggaaagctctttgataaggacggaaagccctgaaacccagcatgagaagtctgttcctcaggaggcaataacatcccaaagtctgctaggattttaggttcaagtgcaagactgtctttcatacaaacaggacgagaaagtcacagcaaaggatcgagcaagccatgggcaaagcagttggaaaaaaatgaatagaaaagaaaaataagaaaccagggaaagctgcagaatggcgaggaaaggcagagacgcctaggaaggataagacgggaggagggggttggggagggaggggagagcggagagagctgagcacggacgtcaggaacaaaagctccagcggagtctggcggaggcactaagggagcacggggtgttttgaataattattaaaattagcatgtgtctgcgccatcctgtgggtgtggcgcagagaggagtgtaaactctagcggggctagagcaaacattggattagcggcagcagcctgccagcctgcccgaggagtgctgggaccagcgcgctgcacgccgactggcacgatggcctcgtctcaggggaaaaacgagctgaaattagccgactggatggcaactctgccggagagcatgcacagcatccccctcaccaatttagccat

SEQ ID NO: 33549 - DNA, 2300 bp, Homo sapien
tgtacacccacacccacacatacacatacgtatcataacataatacaaaaaaacaaaaaaaaatacaaaaaaacaaacaaaaaaatctttcctcattgcatgactggaatcagaccttttgtttaaaggctttgaatccaattctcccagtttttaaaagtgtggaagttaaactgtaagattccacaaagaaaggtttccagaatataacatatttgccagaaactgcctttcaaagcaagtgggaaatatccttactagttcggaaaagttcagatatttaaaagaagtaaaattttgcacaccaattaaaattgaagtgcctttgtgtaactagaagtgaaatcagcacataagaactttttttgtaatttgtaatctaatttattcaagttgaagagacttgcacattatttaaaaagtataaaatgaagtcacagtcatcaaaaatacagtacagtgtgttttgaccatacagtaattagggtgattttctcaggagacttagtcacatagcatgcaacatttaaaatgtgtcttcctcagccaagagcaacaaagtgagaccagccaagagtcagtcatatgaccaccggcaaagttgccaatgcagtttttccatttcatgtgccctgtggaagggcaaaagtggaaaagcagacccaatcgcaatgggcaaaagtggaaaagcagactcaattggaatgctagtttttttcacattgtgtaagttaaaggtacaacagctgctatatgctaaattatcactagttatgggactttagttacagtacttgaatttccccccaatccaacttcttaaaatgtgttgaaataccaactagcaataagttaatttctccagtgtaattgaatagtctaacttggtatcttactccttaactgattttgactaaaattataatatttacaggaaaaaaaaaagttcagagttaaaagaataccatgaaagggcaaatgattttatggacaaactttgaactgcatcttcactgttcattaccttactgtatttgctaaggaagctaagatctcatttaatttttgtgtgctttgctttggttcaaaactaacatcacattctcagaacttggtcaggccttaatcaaataaaatgctattgagcttccacttggtctttccactctgctaagtgcaaagacagttctggagaaatcagtcgtggctcatgtcctcaaggagttggtcaaaagacaaggcttggcgaatatgtacgtgccatgtcaatgaactgctacaatggaataaacttataataatgcctaacatttattgactcctcataataaggccataaactttgcatgaattaactcatagaaacgttatgacgttgtatcacaagcaatcctaatttgcagatgaggacactgaggcttagggaagttatctaacttgcctaaggttaaagcaatatactgcttttatggttgcatctttagtaatctctggggttgctgggactccagtgcgagaaagagcccgaaattcgcaaacttggatgatggggaagaaaaggtgtgctaaactcaggtcacagaggtccagtcttaatcttgttcctctgcaagccttgttgctcacacctcttgaccgacagttcgaggcaagtgctcacagcaaacttactctatgtaagccaaggccagatgtggggagaaggggctgagaaatgttagaaacgtgaacgcagtccaggcgggagaagagaagggggcctcgaggggtgcccctatgcagcccacacacacgccaggcactaacttggaaaagcaacaagcttggcgggagatcctcccgcggccggagggccctgaaccctaggccaagactcatccacaacctagggggaggcggccaccagcgccccatcgaagctaaagggctgacagaagggctgtagcggcaagtgtgcgccaacacagctgcacacgcccagacacctgaggcgctgagaggaacttccccgcgatccgccccggctgcacagagcctcttctccccgccggggccccgcccagcctcacttcttttaaaagcagcagccagcagcgcgccggtggcgtgcggctcgaaaggccgggaggacgtcatcgacgcgctgtcgagcctccagcccgcccgggtttccttcgcagtcgcgcaccgacgctcaaacgcgcgctccaacccgcagcctcctcctgcctcaccgcccgaagatggcggctctcaaactcctctcctccgggcttcggctctgcgcctctgcccgcgga

SEQ ID NO: 33550 - DNA, 2300 bp, Homo sapien
gggtttcactatgttggccaggctggttttgaacccctgacctcaggtgatctgcctgcctacatctcccaaagtgctgggattacaggcatgagccattatacctggcctaaaatgttttcaatagccacatttatggagagggaacagataaagctgtggttgtaataaaagggccttttgaatatttgactctaaatgtttattttaaaaaggaacccttgattcaaatggcgatccaagatcacttcgaaatcatgagcaagatctcccagacccaaatctcatggctagaaaatggatgacctgattacatagatcctaagatgtcttttataaaagcctgagaagaacagtggacctgagagtaaaacacttctgcagagataatttgtagatccacagtcaaaatatttcagctgtgcctttgtctgttgcccacatgtccaggtaattcttttaagtagtttaagaatggtaaattacacattttctaggagactgaaaattcctaatcaaaggttaattattttttgaaaattattttttgaaaagtttagtaaaatcttctgaaggcttcatttagttctacatcttgtagaagattcagaaggcatcaggtgtaaccttctgctcttttctctatccattgctggctccctactttcattttgaatttatccctatttccctatttttccccctttgtgtacagatacgatcattctccaccctaccttccagcacttgcccctcttcaactaccaccttctccatcccttgttgagaaagccttctctcaacttcttgtttatacttagattctttttttcctcacctacaattcccacactattgaataattgtctactcccacagaccacatcatatccccttgccatcttgcttgttgacaagagtgcatatgtgccaggcactgtatgaggcaccaaggacacaaaatacatgattcctgtcctctatatttagggtgaattgtcagaagaaactggtattacaaaggtcagttagagagtcattgtggtcaatcacttataaatcacaatacactttttctctatttttagtatttttctattacatataaaaaactaccttccatgagaaacaataggatggagattattcaagatatagtgtgtcaaactgagaaatgaatacacagagttaacgatttgtttgaccagaggcaagaaagcattcacagaatgcaaagtgaagttagacttgctgactgagtgctttgaaactcccgattgagaggatgaacctcatgcacaattagcgccttaagggaaggtcttgagatgaaagaaaaatgaaaatagttttgtggccgcagaatttactaccactggacgcaagatgtctaaagtactttaaatgtgaactccaagggaggtcagagataaattcgactgctaaaaatcagatttacaaaagcaatattcaaccatgtagactggcaactccactagtgtttggagctccccatccagatgtacaacaaactcttggagacttggatgtgttacacagggggccggtcgggtttccatttaggaccaggagattataatcactttattttagcaacctccttactacaaggccaaaactgacagtcctctctccagaccctcgcgtccgccctccagactgtgcttcccgcgccggacagggaagtgggagtgcggacgacaatccgcatcctgccagccagacgtcaccaagctgtcttccaagaggcaggcggagagagctgacttccgattgggtcagccgaggggcacggctggctccctattggcttacaggagggggctagagagaggcgtgtctcaacgtcacacccgcccctagtctccttgctgctcaggattatgggagggaagggaagtccaggagggaaaaatgacccggaaagacctttgccggcctgggccagccctcttccggagctgatgtctcctcccaccaaccaggagaggtccgccctaggccccgcccgtgccgggggatcaggtgattgcgggccaacacggtcacgtgaccggggcgcacccgccgattgtggccatggcggccgcagtctctagtgtggtgagacgagtggaagagctcggggatctggctcaggcccacatacagcaacttagcgaagctgccggtgaagatggtgagggagcggaggagagggaggcgggcggggcagacggcgctaaggtactggcgctcgatggctgtgagggctagaggctgaggcctgtgttcctttg

SEQ ID NO: 33551 - DNA, 2300 bp, Homo sapien
acacgaagttatgttttctctatataaaagacactagaaaggcctggaaaccatgttcaaataccattcccgtcaaaatgagccagagttttctggaaatatagctaattctggcttgagcaggacaatcaaatgactgacggaaaatttttctttaattcagctaataaaaggaattatagaactagaatactaacattttataacttgtaagcaaataatattcattgataaatgctctatctttgaggtgaaaaacttacaggaaatttgaatggatcagcccagtgaaaccactgatcactccgaacattagaaaatgagaatgacttgtagctttcagtctcagtatataataccatttacgaatgtgttaaagacactattgagatgccattaatagtgtgcaggccgtgttcagtgggtcacacttgtaatcctagcactttggaaggccacagcaggaggatcacttgagcctgggaggtcgagaccagcctggaaaacatggtgaaactccatctctactaacaaaaaaaaaaaaaaaagaagaagaagaatatagaaaaaagaaagtccagagtggtccagaaagaccaacctgctttctttaacaaatatcaagggaaaataaaggagggggagctatacaatgaaacttaagctttaagagtatccgtaatgtgtgacccttgttgggctatgattcaaacaaatcaaatgtgaaaaattattttcaaagcagatggggaagttaaacactgactcggtatttggtgattttaatgaattaaaattgcttaggtacagtggtctgtttcttaaaatctgttttttttagggacggatactgagatatttacagatgataggtctgggatttgtttcaaaaggatccagaattgggggtgtagtattaggtgagtatagcaacagcacaagattaaccaggtgttggtaatggaatcttggatactgggcacacaggagcatattattcactctccttttataaatgttcaaaattttccgtaataaagtttttctcattcatttaacagatatcattttaatactttatacttgaactgattttttttcttgctctagttcgttttttgctctcaaagtaaatcgtgtcctagaaagtgatgagaaatgccatatggttaatccgtggtccttgtccagattgcctcccaaaaacgaggctgcaattttattggttattggcccctaccaacaacatgcaaataataaaatgtaatgaaacttaaacttgtatgttacagagccttgcagaaccttagttatcaggctttcttggattctgttgacatttagatcctcagagatttactttttgaatgtatacatacccagttctatgtaacagattaacttgtaatacgttctcttaaagcacttttaaagtaagcccaaagtaagtagaatgggcatctggtttgagaattaaaaaactcactagtgggatttcaacaccaccacatctgggttcttctagccgttttttgccgcccttgcaaattttaaatgtgcttatatttttgcatagtgggtccagacttctcattttggcaaaaggttctttgtaattggcccgctgactgcctctctagtctgtttttgctgatactcaagaaaataaatggtaacttggtgattgaggaaataacacacacaaaaaacaccccatacgtagtatggtagtgctgaaaaggaagcaagtggttattaagcccaagacagtggcagaggtctatcgaacaagcggagtcgcctaggaccaggcatagtggaaatgatcccggagagaacatcttgaatgaagccaggaagtcagcgggccagaggttgtacaggggctctgcggttggcgtggctgaggttgaggccacaagttactggggaagttaattgttgacaggagcttcgtactcggctcacagccacgcacagtgggcttcctcccagtacccgcccttgcccctgggcctaaccctgccctggaggcggactcgcgggagaagcgggaggcggaacgcccgagggcgccctcggctggcgcggagctgcgcaggaggctgacgcgctagcgtggctctaagacgcgtcacccacgctgcgggcaagccatggcgggaagcgagccgcgcagcggaacaaactcgccgccgccgcccttcagcgactggggccgcctggaggcggccatcctcagcggctggaagaccttctggcagtcagtgagcaaggagagggtggcgcgtacgacctca

SEQ ID NO: 33552 - DNA, 2300 bp, Homo sapien
tgctgtgcagttatcatttaatgaagactgcagtatttctaagcactaacacctgatctggccactgacttagctcttatttgctccctgtttctccctaatctgtttaactatccatgtctgacaaagtcaggccaattcttcagtgtctagactttaactcttgcgttcctttggcttcccttctcttcatcccctaccctgtgaaacctttacctactctgggaattggagtgtgtgtgtatgtgtgtgtgtgtgtgtgtgtgtgtgtgtgtgtgtgtgttgcagaggggacttcaatcttctaaatattttccatccttcttttagactgtggctttggaaaacttttctacttttgttatctgattttgaactgctagggcttaggggtacaagtgactgaatcacaatgggctaagtggagcttatttcaaaatgattttttaattttctgactttaaataaaatgactacttgtggaacatgtttagcacaggcagtctgtggatgtggggtgcagcaatgatgctgcacatctctgtctcatcagtcactggactgttacataattgcttgttcataagtctttctcccatagaagactaagtgttccttttagtttaaattttaaattaaataacatcaatttatcatttcaaccatttctaagtgtgcagattagtggcactaagaacatatatgttgttatgcaattattaccaccatgtatgtatctccacaacttttaaatcttcccaaactaaaactctatacatattaaatgacaactcccaattccctctcctttcattatctggcaaccactgttgtacttcatgtctctataaatttgattactctaggtaccttaggtaagtagaatcatacagtatttgttattttgtgactgttttatttcacttagcataatgtcacttagcataattataaggtaccttgattaggtacattaggtaaatagaatcatacagtatttgttcttttttgaatcttttatttcacttagcataatgtcctcaaggttcatctatgctgtagcatgtcagaattttcttcttttctgggcaggtgcggtggctcacgcctgtaatcccagcactttgggaggccaaggtgggtggatcactaggtcaggagtacaagaccagcctggtcaagatggtgaaaccccatctctactaaagctacaaaagaaaaaaaaacttagccgggcatggtagcacgtgcctgtaatcctagctacttgggaggctgaggcaggagaataacttgaacctgggcagcagaggttgtagtgagctgagattgcaccactggactccagcctgggtgacagtgtgagcctccatctcaaaaaaaaaaaaaaagaatttacttcttttctaagactgaaaaatatttcactttaggtatatatcacatttgtttacccattcttccactgatggacacttgcactgcttctaccttttggttattgtaaataatggtgctatgaacaagggggttatgaaatatttgtttgagttcttttcaattatcttaggtatataccctgaagtaaaagtgctgcactttatgataattctgtttaatattttgaggaactaccatactgtttttcataggggctgcatcattatacatttctaccagcaatccatgagttttaattttcccatttcctggctcaagatttgttattttctgctctttctttttctttttttttaaattatactttaagttctgggatacatgtgcagaacctgcaggtttgttacataggtatatacgtgccatggtggtttgctgcacccatcaacccgttatctacattaggtatttctcctaatgccatccctcccctagcccccaacccagtgacaggcctcagtgtgtgatgttccctttcctgtgtccatgtgttctatcctgatgggtatgaatacatttttcctgatgggctagaataatgtcttcatctgcaaacttgctgtgattgggatgcaatttgtccctattaaaaattcatgttgaaatttgatctctaatgtggcagtgttgagaggcggggcctagtgggaggtgttttggtaatggagacagtttcctcaagaatggattaatgccatatcatgggagtgagttctagctctctcgggactgcattggttattgtgagagtgggctgttccttctcatgtttggtctcttctcttggcacatgcccattaccagaaagcagtgaggccctcaccagatgtggctgctca

SEQ ID NO: 33553 - DNA, 2300 bp, Homo sapien
agctctcatggagaacctctgctagggcagtgcagaagggaaatacagggttggagcccccacacagagtccccactggggcactgcctagtggagctgtgagaagagggccacactcaactccagcctttgaaagcagctggaagggggctgtaccctgcaaagccacagtggcagggctgcccaaagccatgagagaccatctcttgcatcagcatgacctgaatgtgaatcctttcacatggagtcaaagattgttttggaactttaataattgccctattggatttcggacttgtatggggcctgtagcctatttgttttggccaatttctcccatttgtaatgggtatatttactcaaggcctgtatgccccttgtatcaaggaagtaactaacttgcttttgattttgcaggctcagaggtggacaggacttgccttgtctcagatgagactttagactgggacttttgggttaatgctggaatgaattaaaactttggggggctattggaagggcatgattgtgttttgaaatatgggggcatgagatttgggagggtctaggggtggaattgtatggtttggctctgtgtccccattgaaatctcaccttgaattatagttcccatagtccccacatatcacgtgagggacctgatagaaggtaatttaaccatggaagcaattaccctcatgctcatttgtgacagggagtaagttctcatgagatctgatggtttttaaaggggcttttccctcttttgcttggcactccccttttctgctgccatgagaaggacatgtttgcttttctttctgccatgaaggtaagtttcctgaggcttccccagccctgtgaaactgtgagtcaattaaactctttcctttataaattacccagtctcaggcaggatttttttttttgatggcgtctcactttgtcacccaggctggagtgcagtggtgcaatctcagctcactgcaacctctgcctcccgccaaattcaagtgattctgctgtgtcagcctcccaagtagttgggattacaggcatgtggcaccatgcctggctaatttttttttggattttcagtacagacagggtttcatcatgttggccaggctggtcccgaactcctgacctcatgtgttctgcctgcctcagcctcccaaagtgctgggattagaggtgtgagccactgcactggcctcaggcagttccttatagcagcgtgaaaatggactaatacagagtcagcatagaaatgaaaatttctctcacctggggtctgcagcagctgctgctatgaatggaattgagtgtcaagtccttctggctagctgcttttgcctttcccaaatcataagccaaagaatgggaagaaggcacaacactaaaccactgctgagaaaagtgccaaatttctctcttctttccccttctatctctcattttaaaaaacaaacaaacagaaacaaccacatcaaatctcaaaacctgcctatggcttgtatatatctgttaacacttttatcttggaagaagaaaagaggaaagtttagagctctactatttttagaagtagtggaagaaaacattatgtcccttttggtaagtttctttccgaatattttcttgaaagtaagtccaaatgaagtgcatgtgttttgtttttaagcagacaatctctaccaaaatattgcatgtagtggtagaattgattttccctcatctttaattaaacaaataactatacataatgttctgggtaagttatgtcagggcccttattattttccagattagggagaaaatcctaataaagaagcaattttagtgatacagtttggccactggtattatctctttaagattcaactcagtttctctgaaagtatcactattccctgtatgccctctgctctgagacccaaatccagctggattttggtgctgctttcatttaaaaaacttcctaaagttcatgggatgatttgataatgactctttgcgtcagagctctgtgttacaaaaaaaggtgaagtcttactcaattcaacagtttttatgcaaagtcctcacggggaagagactgatgccctgcaatgcctcaggactctccagaatgttttcaccagcaaaaaggccctcagcagatgcagcctctcgaccttgaactttctagcctccaaaatggtaaagaaataactttattttctttataaattatccagtctcaagtattcagttacagcaacagaaaatgagctaagagaattactgactatttgaag

SEQ ID NO: 33554 - DNA, 2300 bp, Homo sapien
agcagagtggaaaccatgagcaaatgcagtttcattcttcagaaggtaaatgtgctctggcatgccttaacttataacaaattaatcaactcaatacctgctacattttccctcacaatttggaatatataaagaggcacatactactatggaccaatacctggtcatatatgagattgaaggacctttacttacgaggcttaaaaataaagactgcccttcatgtcagttgcaggtttatatctagttctatagtattaactgaggtgtcttttcctatgttttctgtgcatgatgactttttaaaaatcaaagacagagcagcagccagagtagtctagtttcatggcacacagaatggaggatattgctgaacccagatttaaaaaaaaaaagaagtcaattcttatttttttaagtatggccctgagctcatctcagagcataaacaatagaatttagaatatcttttatgactccgtctggcacctcctaaactagatcaagattctctagctcagggaagaagggcaaaggatgagaaggcacagagaggatataaacagagaggttggtagtgccaggctctgaagaaggtccaacttggaaggtcatttcagacaggcgtggagtcagcatttgaggcctgtctggtctctactcctgccaggactaccctgtcagccagcttggcaggtatggaccacccagcaggagtttttcttgactgtgccctaatcttttactttcccaagtttctctatatgggtacctccccttttaaaagctccagacacagccaagcaccactattgctccagcaaagtatgaagccccagaaatcaatggtttggggaagagtcttaggggaactaaatgcctccttatttttagatgccatagaacaagagcagttcaggatcaataaccatcccaccccatgataaaacacgccccttccagaatctttcctttttcgttcattctaggtgtctgtctggaacagctggggtatttgagccacagctgagcttctgaaagcattctaaggaacagtttttcacttatctgattcctttgaaaataggggtatcttatgtgatatctgctatcccagagtctttggtcctctgttccttctcaagtcttggctcccgtgtactacttcaaagccctatagatattttattctaaagaaaagaaacttggttcctttaagttgtttaaacatttctttctgggtataaacttgggtttgtgtctgggagctctgttaaaaaaaaaaagtctttagtaagccaaagctgttagaagcttataagtaagtgacattacaattgaccgtcagtaaatagtggaaagattgcatgactagctactccttcagatctgagacaacctggagctagatttttgtactctctactcagaaaagcatatagtgacttggggtttgatgctgtacaaaaatgacatgcttatgcacaactttaactttctgcaacacttttacaacttcttgtgaatgaagtaggcagggctcgcatttgacagatgagctatgtccagcgtgaggcagagttaaaacccttttcctggctcaggaacttcaggctggggcctgtgtctgctctccctgcatccctgtcctctagcagatacctctctgctaacatgctgagtgtccttggtaaattactcattctctctgtctccgtcttctaacctccacaataaagtccttcgtagttttaactatcttttcactgtgccccagtgagcaggagtttggaacttgattgttgatggaaaggcaatatttggatggctaaacacgctttccaaggtatctcgctgatcttcctctcattcctggagatagctaacctttttgtaagtgtttctttgagtctgtggactgcacttaacgctcttgtaggtcctgctttcatttggaacgggcaggcggagaggaaggaagtgtattgcaactaccaatattttcctctaggaggagccgcgcagctcagttgagagtgacacgcaccaactccagctcctcgccgggaagacttcatcccagcaactcggaatgcttggcccgggcggcactcggcctctccgcagcagttctcgaactggcctccttgaacgtccgcttcgccttcgcttctgcaacctggatctgggggactgcgggccaggcgcggcgtgacccctggtgaacggtggccgccttttcccacccctgccctcccatcctcccttcccgtttcaccccgccccctctctcctcccca

SEQ ID NO: 33555 - DNA, 2300 bp, Homo sapien
tgataaaacacgccccttccagaatctttcctttttcgttcattctaggtgtctgtctggaacagctggggtatttgagccacagctgagcttctgaaagcattctaaggaacagtttttcacttatctgattcctttgaaaataggggtatcttatgtgatatctgctatcccagagtctttggtcctctgttccttctcaagtcttggctcccgtgtactacttcaaagccctatagatattttattctaaagaaaagaaacttggttcctttaagttgtttaaacatttctttctgggtataaacttgggtttgtgtctgggagctctgttaaaaaaaaaaagtctttagtaagccaaagctgttagaagcttataagtaagtgacattacaattgaccgtcagtaaatagtggaaagattgcatgactagctactccttcagatctgagacaacctggagctagatttttgtactctctactcagaaaagcatatagtgacttggggtttgatgctgtacaaaaatgacatgcttatgcacaactttaactttctgcaacacttttacaacttcttgtgaatgaagtaggcagggctcgcatttgacagatgagctatgtccagcgtgaggcagagttaaaacccttttcctggctcaggaacttcaggctggggcctgtgtctgctctccctgcatccctgtcctctagcagatacctctctgctaacatgctgagtgtccttggtaaattactcattctctctgtctccgtcttctaacctccacaataaagtccttcgtagttttaactatcttttcactgtgccccagtgagcaggagtttggaacttgattgttgatggaaaggcaatatttggatggctaaacacgctttccaaggtatctcgctgatcttcctctcattcctggagatagctaacctttttgtaagtgtttctttgagtctgtggactgcacttaacgctcttgtaggtcctgctttcatttggaacgggcaggcggagaggaaggaagtgtattgcaactaccaatattttcctctaggaggagccgcgcagctcagttgagagtgacacgcaccaactccagctcctcgccgggaagacttcatcccagcaactcggaatgcttggcccgggcggcactcggcctctccgcagcagttctcgaactggcctccttgaacgtccgcttcgccttcgcttctgcaacctggatctgggggactgcgggccaggcgcggcgtgacccctggtgaacggtggccgccttttcccacccctgccctcccatcctcccttcccgtttcaccccgccccctctctcctccccaagcctgacagcccgcgagctgccaagcagggcgcagccatgggaagaggaggagggctagggagcggcggcggcggcggcagcggcagcagcagctgctacagtggcggtggcggcggcggctgctgctgagcccgggcggcggcggggaccccgggctggggccacgcgggccggaggccccggcaccattggccccagcgcagacgcgaacccgcgctctctgatcagaggcgaagctcggaggtactggagtggggctccgggagtctggctttattttcctcctgttgtgccagggggcctgagggtgaaccctgggactctagttgtttatgaaaacgggaggatctgtcttatatatttacacggataattttttattccggatgacttggctgtgctcccctcctccttgcgaagaagttgttttctgctggtgggttgttgtaacccaatctagtgtgtgtgtgtgtgtgtgtgtgtgtgtgtgtgtgtgtgtgtgtgtgtctggaagttggtgagggcggcagggagttgcgggcgacagacgaaccatcacactctggcgtctgctctggcccgcgagtagtgtacgtggaggggtttactccggagacagttttgttaaagtcataaaagttttgctagtgtgtttctgtttgccatcatctgcctggctgcggcaggaactgccgaggctgctgctgttgcgcggggaagaatccccggcagcgcgactggagagactggggaggtcgagctgtgcgcgtggacacagcgcgcagagcgcgcggtcttttgcgcgtttgtgcgggccgcagccgcacgttggcaccgatggaactggggtcagtagagtgacagccaccagtccgcatgaactggggtaagtggaaattgtggcgagccgacctcccccagcttttgacacactagtgg

SEQ ID NO: 33556 - DNA, 2300 bp, Homo sapien
tgcacaactttaactttctgcaacacttttacaacttcttgtgaatgaagtaggcagggctcgcatttgacagatgagctatgtccagcgtgaggcagagttaaaacccttttcctggctcaggaacttcaggctggggcctgtgtctgctctccctgcatccctgtcctctagcagatacctctctgctaacatgctgagtgtccttggtaaattactcattctctctgtctccgtcttctaacctccacaataaagtccttcgtagttttaactatcttttcactgtgccccagtgagcaggagtttggaacttgattgttgatggaaaggcaatatttggatggctaaacacgctttccaaggtatctcgctgatcttcctctcattcctggagatagctaacctttttgtaagtgtttctttgagtctgtggactgcacttaacgctcttgtaggtcctgctttcatttggaacgggcaggcggagaggaaggaagtgtattgcaactaccaatattttcctctaggaggagccgcgcagctcagttgagagtgacacgcaccaactccagctcctcgccgggaagacttcatcccagcaactcggaatgcttggcccgggcggcactcggcctctccgcagcagttctcgaactggcctccttgaacgtccgcttcgccttcgcttctgcaacctggatctgggggactgcgggccaggcgcggcgtgacccctggtgaacggtggccgccttttcccacccctgccctcccatcctcccttcccgtttcaccccgccccctctctcctccccaagcctgacagcccgcgagctgccaagcagggcgcagccatgggaagaggaggagggctagggagcggcggcggcggcggcagcggcagcagcagctgctacagtggcggtggcggcggcggctgctgctgagcccgggcggcggcggggaccccgggctggggccacgcgggccggaggccccggcaccattggccccagcgcagacgcgaacccgcgctctctgatcagaggcgaagctcggaggtactggagtggggctccgggagtctggctttattttcctcctgttgtgccagggggcctgagggtgaaccctgggactctagttgtttatgaaaacgggaggatctgtcttatatatttacacggataattttttattccggatgacttggctgtgctcccctcctccttgcgaagaagttgttttctgctggtgggttgttgtaacccaatctagtgtgtgtgtgtgtgtgtgtgtgtgtgtgtgtgtgtgtgtgtgtgtgtctggaagttggtgagggcggcagggagttgcgggcgacagacgaaccatcacactctggcgtctgctctggcccgcgagtagtgtacgtggaggggtttactccggagacagttttgttaaagtcataaaagttttgctagtgtgtttctgtttgccatcatctgcctggctgcggcaggaactgccgaggctgctgctgttgcgcggggaagaatccccggcagcgcgactggagagactggggaggtcgagctgtgcgcgtggacacagcgcgcagagcgcgcggtcttttgcgcgtttgtgcgggccgcagccgcacgttggcaccgatggaactggggtcagtagagtgacagccaccagtccgcatgaactggggtaagtggaaattgtggcgagccgacctcccccagcttttgacacactagtggttgtaaaatcaaccaggcttaaagttttgacagaactgccagaggctgcgggtcaatggggtggccgcgtgtctagggagagggcgctggcggcgcagagggtgcggggcagggcacttgcgagtgcgtggggaagtctatttggggcgagtgctttatatatagcccgaggggatgcctgctgagaccgagctgcgggggctctcggtctggcgcggactgtgtgtcctgaatgagtgtacgtgtgcgctgtgtgtgcgcgcgcgagtgtgcgcctggggaggcgtgtcggcgcctgagccagtagggtgtgcagggtggaagaggccacagaggtgccgcctgtctgtttgtgccgccaggagaccttggaagggacagagaaaggtaacggaaggccaaagtgttgggaagtcagagtagtttctgcataggattaagtattaagggctttaaaataactaaacgcattgccctgagtggctgaggactggaagtgaggttttggggagttctcaggagaactgcatgggagggcgt

SEQ ID NO: 33557 - DNA, 2300 bp, Homo sapien
tcaagtctcagcaatggtgggcgcccctcccccagcctcgctgccgccttgcagttcaatcttagactgctgtgctagcaatgagcgagactccatgggcataggaccctccgagccaggtgcgggatataatctcctggtgtgccattttttaagcccattgggaaagtgcagtattagggtgggagtgacctgattttccaggtgccgtctgtcacccctttctttgactaggaaagggaattccctgacctcttgcgcttcccaggtgaggcgatgcctcgccctgctttggctcgcactcggtgtgctgcacccactgtcctgcacccactgtctggcacaccccagtgagatgaacccggtacctcaattggtaatgcagaaatcacccgtcttctgtgtcacttatgctaggagctgtagactggagctattcctatttggccatcttggctcctcccccagatcacacacttgtgattcttgctggcattcacacttactctctctttattttttgagacagggtctcactttgtcatccaggctggagtgcagtggtgccatctcagctcactgcagcctccacctctggagctcaagggattcgagtagctaggactacaggcgtgtacctccacccctggctaatttttgtattttttgtagagctggggttttgccatgttgcccaggctgatctccaacacctgggatcaagcagtctgcccaccttggcctcccaaagtgctgaaattacaggtatgagcctccatggctgggcacttactgtctttttaattatcagcttgcaaatgagaaatctgcccaaggagcctgagcttggtgaatacaagttcatttcagccccattggtgagtttatgattctatgagactttaaagatgtattttatttggacatgttaaaaaaaaaaaaaaagaaccgtgtgtttcttcacaacatccaaaataattattttattggtattgataattattattgaggaatagggaagtcatgtatgttatcaaccacttcctaaatgatacctagttaacacgttaggggagggaatcgaatctgaaagtgatacccatttagtgaagccaagcaatgtagcaagagttgagaaaaacttataaagggacctcttagcccatgtccataacattgtcgttaacataaagataggttgccagagaaagggtaactgtatggtcaatttagccaggtctgaactctcaaaaatcaagcactctcattctgttagggtgaagtcagagaaaagaaccttcacaaggtttgaaaacacagttgtaacatactgggctgtgttccagggctagcatttgactctgatttttatcttgtgcttagaaccagcctactgttgtctctgtgcagagagagtactaagtaggtactgaataatacttgctgtccagcacatagctctgtgcagaacgagcactaagtaggtacttaataatgcttgctggccagcacatggatggatcatgtttataagtgtgtatcataaacactttgccttgaggaaattgttttctttttagagttttcatactgtggacatccttaaaaagcccagaaaatgtatctttatggattgacatgtgacttcttacatatgaagttagaagccaatgaaatgctgttctttggactgaactttcaagactcatgtgtgtggtgtctaattcattaactaaaaatatgattcatatttaccttatgtaggactacaggtatccacatatccaccattaggatattctttaaatctggtagtttggaagatttccagacattgtaaagagtaaatgcatcagaaataagcattttccagaagagggaggtatgaaattgtaatgattagcctgttgcttagtcctggaaatgtgaaatcagataaaaatgaaaaagatgctttccttgcattctcttccagaaatatgcagcctgctgctcttttgtcttcagtgtgaccatgctgccctgaggagagcccagaactgtttttaaattcaaaaggacagctgctttctgctcactcaggtccactgaggcatgctccaagacaggaaaaaggtgcttagcggggctctttgatagagattcaatatatgaattttactttgagaataaaaagctcacccacttttaaaaggttaatcaaaagctcattgtagtgtattcttcctttcctatgcagtttcctatggaaatggaatcagtttaaattctggcctcagaacagcaatatttttcacaga

SEQ ID NO: 33558 - DNA, 2300 bp, Homo sapien
cactttttaaagatgaaatcatgacaagttcatttagtttctcattgaaagatgcactctaaacctactagaattctttgaaaaaaatgctaacatctataaactggaagataaacttgcaacccattctaaactagaaaaattaagctaaacttttctgacttattcctgatgtgttggttcatttctattttctctatggtaggctctatggagaaatatatacatatacatatatatgtgtatatatatatacatatatgtgtgtttgcatatatacatatatatatatataatattccaactttcttagtctctacatcccaaaatcattagatagtcaaagcttctgtatttcaaatgttggaacatccagaagatttggaagtacagatgaggcaggggatctagggagctccctctccaccttacacattccagtcaccacatattttcaaaggactcctgaaatttgcctaggatgggcctaggtggaacttaatacatacatacatacatacatacatacatgcgcgtgtgtgtgtgtgtgtgtgtgtgtatatatatatatatatatatatatataaagaaaatagagtttcttcccccaaggagccaataataaatacagcaaaagaggtaatacatcaattcagtcttaacaaatgccacagaaagctagcatgttccatagagtaaggaaaggtagatcacaactgattgatacgatcagtgaatgactcatggagaaggtagcattttagcatttagggtcttaaaatgggcttgtttcaaaagttattatgacatgagttacatggaacattttatatttgctaattgggtagaacccgcaattcagcaggtcattttcaatatttctatgtgttgctactaatgttagggaaagcttatttgagcagcagagtgaagactacaacccccattttccactttaacctaattttcttgccattatgccacactacctttcaactagtaaagtatgggttatcatattactgtttatattttttcacttgccaaattttggagtctatcgaaaaatcacattaacaaaaataaacctcccatctcccactcagaaaaaaaaaaaaaagcagatgagcaaagttggcagtggattcgctttcaaactattactgaacaacattcaaaaattctaataattaacatttctgaacacttactttaagcaaggatctccattaagcaccttataaatgcatcacttcatttaatcatcacaaccgtcctaagaggcaggcttcttttttttttttttgactgagtcttgctgctgcgggtctcggctggaatgcaatggtgcgatctccgctcactgcaacctccgcctcccgggttccagcaattctcctgcctcagcctcccaagtaggtaagattacaggagcccgccaccacgcctggctaatttttgtatttttagtagagacggggtttcaccatgttggccaggctggtctccaactcctgacctcaggtgatccacccccctcggcctcccaaagtgctgggattacaggcgtgagccacagcgcccggcagaggcaggcattataattaatctcttatacagatgaagatgcttaggtgcatgaaattaagaacttacccactatcacccacggaaaaagagaagagttggggtttgaatccacgcaagagcccacgcccttaatcattaagctaccaagatataactctgtagatgggaaaccatatctattaactggctctggaattttaaaaggcaattttataagttacaaaaatagatatggataattatttattcaatggagctgactcacaattcagaacacccaatgtgatttattctttggttggggaaacaattattgatccggtgttgattcatgttctggaaaccacatgaaaatacctaagcagccgcagatgctgagcggagctgggccaagttggtaagaactgctggtggtaggagctccagcatagcgcacagggcgggcccagagaaaggcgggcccattgttgggggattcggcttccggaggaggggacagcattcaggggtgtaccaggccccagaggcagcggaaagggagactgtggggaactaggagcaacagcaggtacactccaaattctattgacggttcgaaattcccgctttctccatagagattcctttcttcatatttcattacagtgctctgggtccattacaggcttttcttttcagacacctctctcacatccgcgggtcctcggccc

SEQ ID NO: 33559 - DNA, 2300 bp, Homo sapien
caagtcaaaaccagaacaaaagtgccaatacaggcacgccgtgggtgatcaggccacacttccactcagatggagtggggcaagttccaaagactagtcttaccaagtttcagatgtcgcgactccaagtgccagttctttccggtgttcagccaccgtgttaatcctctgcaggggcctgctatgcgctgctctggcaaggcattccaccggggcaatttcctacccgggagcgttctttggatcgcgtcactcaggctgactggagtcccctgcagggacgctccacaggacaggcctaagccgcctaacgggttagctctgccgtctatgtctatcagttacctcgtttcctggtcagggaaccaagaaatgtagcaggacgagctgcagacaaaacctttcagacactgagttgtagaaagaagggctttattcagctgggagcgtgggcaagccactgccttaaaatccgagctccccgagtgcacaatttctgtcccttttaaaggctcacaatactaaagatttcacatgtaagggttgtgattgattggagcaagcaaggggtacatgacaagggctgcgtgcaccggtggtcagagagaaacagaacagggcagggagtttcacagtgttcttctgtacaatgtctggaatctatgaataacatcggtttcgaagttatgaattgatttttaactactgggtttaggccaggcaggcccaggcctggtttgggcctggcaccgggctgcctgtctttgatttcacatccttgtttttttttttccttaaaacaggtactgagtataaaacaatatgagagggtctctctctttcctcaatatgactacttaaattggtcaaggaaatgaactacagggaggaatatctgctttgtacaaagatttttttaatgacactctttaaaaaaatgattatgtatatgtgcattttaactggattctcaaagagatatgggaccccaaaaggcaagtaacaactgctcagggcaagtaaagagaacttggatttcaaatggtaacctcctaatttgataggaagtttcttgaaaggaaggataacatctgagtctctttgtagttcctgcaccttgtacaacagtattcagcatacagcaatcagtgggggattatttggaaaaaaattaattgatgaaaaaagcaaggcctactcgaaaaccattgctatctaggaatgacatcatttgacattgctccttacctcacctacagtgagcatgccaacttacaagcgttaccagaaagaaaataccctcttctgaaatagtaggaattagctatttcatttgtacatcttgaaatttccacactctttccatgtccaactactacctttaatttttatttttatggtattcacatttgtaaagattttatattcgatcctcaaaaaattctggggatgcataggtcttccaggaagtacgacttcagtgacaataaaaatgaggtctgatttccctcagataggaagtctatttttctatttccttaaattaacaagaaaagagcagtggtcctgtgaaatcccatatgaattcaagttataaacatagaacacaatcgacgtgtaagtctgtaacaacaggagaccagagtaacttgtaacagcaggtgacttttctaacaaaggtcacactgtgtgggctaagctagcacctcatcactgcaagaagcaaaacaaaaggaaaaaaaagcttctctctctcttttttttttttttttaaagcagcagcataattcgctggctcagcaaatgtttttccctgttatagtttgggaaagaaggcaacttggaggccttgtttacccttagcccttcctcccgcccccgactgtaccattaaatcctagattctagggtgactgaaaaggatagggaataaattagtaattgtcaaaatgttttccccatattatgcatggcagcacttgctactttcttttaagttgataacaatcagctcaggggtttgctctgcttgcaaggtcactgcaagaatgaacattgaactttggactatacctgaggggtgaggtaaacaacaggactataaatatcagagtgtgctgctgtggctttgtggagctgccagagtaaagcaaagagaaaggaagcaggcccgttggaagtggttgtgtaagtaggaacttcgtgttttctgatactttattcttttaaagtttggtaaatattttttgagtctgataaattgtttttttccatagaatagattcagaaaactggtggat

SEQ ID NO: 33560 - DNA, 2300 bp, Homo sapien
atgatacacatggctgctttgctgcctttcaatgcatccctcactgtgcaccaaaggaatcttttaaaatacaaatctgatcatgttacacacaaactcccacaaagtctacatggcctggcatggtgtagcctctgtacatgtttcctatttcattgcttacctttggctccagctacataggctttgctcatttccttcaatctgtcctcctccctcctaccatgtccttgcacgtgctctttcatctgcctccaattccacctggttaagttttacacttctttataattgctgctaatttttacctccccagggaagcttttgccaaattctatgaactgggtgacttctctatttttctattctttgctatttaacacttactgacattcattctagcattgaactataagctctataaggatagcgatgtattttcaagtgtttagaacgatatcagcacttagatattccagaactacttgttcagttaagaaaaacacaccctaaggacagtgaccaagacactacaaacaacatgtcttctgttgctgggattcccgaggatttttgccatacatctttttatgtgacttctgggaaacaggaggaagcaaatatcatttgggagagcagatctattaaaaaaggagcttttcacatagccatcaaatggagatagaaaacaggtctctaactctttgaaacattttttcccttgactatgatgcaaataaatttccagttcttgttcctggccaatttcagctcaacttagtttagtgaaacataataaatgttttctgaggacctttttttgtggcaagtattatgatggtagctgtagagtatacaaaactgagtaaaacacactcttggcccttagaagttcatagcctggaagtataattttaaaaatacacaaatagtagaggaatatgttaaaacaatgctctgaaggatccagggagggaaggatttcctggaccaccctattcctgcatcttcgcagggtgggacaagggggagggacctgttgtttttcagaggccatgtagtacaagttatgcaagtgaagaagtcactacagacagtttattttctcttgcagctttaggtctatttatagtccagttcctggggtaaaagtagcttattaaagcattgtattatttgatgcataataaagtttgtatatatagctaatacttctattaaaatgtatgttgaattaatagcttttcaaaatctaccatttgataatgtatcaattctatagtaatcaaaagctaagaaaaggaaatagaagttcattacctagatatttccattaaaaacaatcagctgtttaattcagctagagaatttattagttttaaagactcttgccataaagtaaaacaagaaatgtgagaatacaacctttcaaatgtttccaaagcagtttcaaagttcctgaatacatattttatttagtgagtagcacctatatgcatagaattcagataagcattatgggaaaacttaggaaatacaagtttaacagcaatacaaaaaccacatagcagtaggagagaattggacttaagatatgtgcccaatgaatagtgcaaattttaagtgccatattaaggagggagatctcacaaaaggggctttgaggtttgaaataacaatgccagctaacaacctttatatatatatgtgtgtgtgtgtgtatatatgtatgtgtgtgtgtgtgtgtgtgtgtgtatacacattttagagatgggggtttgtcatattgacccagcctgttcttgaactcctgagctcaagcaatctgcccatcttgggctaccaaagtgctgggattatgggcctgagccaccatgcccagtctctagctaacactcttataagcacttattcaggcattctgctagtcattgatgtgtgttttcttattcaaccctcacagtcacatacacactgttaggtaacagaaacctgactgaaatgggagagttctctgaccctcttatgggacttgcaacaggggtgtggcttgtttgcttggccactgcacattcaaaccccttaagggagggggagcacacagacaggcaggtgcaggagacggggtgagcgcttttgggctctagccccatggcagcatctaggggtgtgttacaattaatgctcttttagcagttgctgttcgcggatggctaagtgttaaaccagctcagtggagagtcagggtggcagccttttacgccctgtcctcttggtacccgggtctttgtctagcatcc

SEQ ID NO: 33561 - DNA, 2300 bp, Homo sapien
cggagctcgtgggcagagggcacccagatattatgaaactcaatagtaacgaatgcacgaaaattagtagacaaatgaaaaccggtaaaattctagagagcacatagaaacaaaacaaatcgtaattccgacagaaaaacagcgagaaaagaagtcgaaatgaaacggatactaagcaaaccttacagagaacgagcgctacaaaacgcagggattaaagagttcttcaggggccaaaaaccatctgtgtccgggaaatgagcattgctgccaccggaaaactgtccgctaggtctctgcactgctctggacctcgctagcaagaatctggcggcgctgagactcagcaagcgccggcacctagcggatagcgctggtattgccaaacaaatatccgtttaggcgccataacggtgctgctagaaagaaactgcggattcttaggaggggtgcttccatcccgaaacatactgtctggaggaatggaccgactctgtttaaatgtgttgtgacgttttaatgtgttttaatccgtttaatgtgtttaatccgtttaatgtgttttaacacgttttaatgtgttgtgacaggaaaagagccggctaacggtattacggaagtactagttggcacagaggctcggtgcaattaccgttctgcaccgtaaaacgggtttaggaagttcctaggagatactagcggtgccagaaccgagaaagtgacgacacagacaacttatggactccgcgtacgggaaacgttccgttgggcgctaagaacggtgcagcaactgaaaaaccgctcagtgggcgctactggcaaaagcgttgctgcaaaaccgccagctccgcattagaagcagagccgccagacagaacccgggacctgaaaccaccgaagcggagaccgagcttggctccccagctcctgagagaatgcaagtcaaggagtacgaagctgtgatactcaaaattagtagaagaaaaatgaataacatttaaataagataaaattttaaaataataaattctaaaattcaaataaaaaggcaaagcaaacacactggaaactaccggtagcattgttctcagagcaaaagacacaaaaagagcatttaaaaataagcaaaaattagagagaaccaaccctacaaagcagaaattacaagtattgccaaaagaagcaattctgtgattaggatatccctgttagatctaaaccggtacatgttacacctaagtctacatttcttaggacaaaaacaaaaacaaacaacaacaacaacaagaaaccaacaaaacccagtcatggttaaacctgtttacgactaaaaaatcgtagtagctgatatatcccgacttggtccacaagaggaaaaagtcgcgttcggcggaaattgctatcgtcaaaccgagcttcgtaaaccagaaatcgcttttgccggcatttcctgacttccatgggagtttaaaaaacaccaacatagctaaggcgggacttgatgttgcgcagctagccttggtgtaagagctcccaggcactgctaaactggtcatcgctaaacctaaatgaatcgcattcgctggtacacagatttctacaggagttgaacatctcctgcgcagctaaagcaagccgtactagtaggaagccggaacttgccacgacttagaaacttgaggctttgggaggccaaggcgggtggatcatctgaggtcgggagtttgagaccagtctggctaatgtggcaaaaccccgtctctactaaaaatacaaaaattagccgggtgtggtggcgggcgcctataatcccagctatttgggaggctgaggcaggagaatcacttgaacccgggaggtggaggttgcagtgagccgagatcgccgagatggcgccactgcattctagcctggacgaaagaaactctgtctcaaaaaaaaaaaaaaaaaaaaaaaaaaaaagaaaaagaaaaaagaaacttgaggcagggctaactctgcgtttgttatgattaggctacaggaaacccggagttgctgggaaatgagtcacagggtcactcagcctttctgtggcgaaacatcgacttcctacgacctagaaatcgccgccagggctaggctggtgtttgtcctaagtgggtacttgcttgggttgagaaatcacattttggctattccccgacttgaaccaggggatagaaatcgtagtcaccggctgggcgcagcggctcatgctgtaatcctggcagtttgggaggccgaggcgggcagattattgaggttaggagttcgagacc

SEQ ID NO: 33562 - DNA, 2300 bp, Homo sapien
atgtatattgacaattctgaagacatttctaattttattttactgataattttaaatgcagcttatttgtcaaagatttacttaaatcaagtgaacctgaaaaatcatttgggcttaaagtttctatttttctgataaagtatttaattgaagccactaacaagggctggaaagcagtcccaaattacagctgtccaatgagtactctcccagtactggataaaaagggagaggccaccgcccacaaccttctgaacccagagcaggtggaggctggggctttggcgccacctctgcggaatcccaagcccccttcgcacagccaagaaaacgttgctccatcgcttaagccttagagcaggacacaagcgtttgtgctgatcaacgaggcagagccttcagcactcccattagcctggacatttatgctttccggaggccgtgggcggaggcaagccaggtattatgaaactcaatagtaatgaatgcacaaaaattagtagtcaaaagaaaaacgataacattttagagattacatagaaccaaaacaaactgtaattccgacagataaacatagcaagaaaagaaaccgaaataaaacagacactaagcaaaccttgcagagaactagctttacagatcgcagcgcttcaagggccacgaaccatctgttccaggaaatgagcattactgccacctgaaaactgtccgctagggctctgagctacttaacgaccgaaagagaaactggcggcgctgggactcagcaagcgccggcacctagcgaatagtgctggtgttgccaaaaaatacctgttttggtgccataagtggtgctgccagagagaaaccgtgctcttgggaaacagcggtgcttccacgcctaaacatcctcttcggaggaatgaacccactccgtttaaatgtgttgtgtcagaaaaatgtgttgagacattttaatgttttaatcctcttaatgtgtttaatccgcttgcagtattttaacccgttttaatgtgttgtgacagaaaaagcgccagctaacggtgctatgaaattactagtgcgtacagcggctccgtgcaatcaccgttctgcacagtaaaacatggtttaggaagttctttagcagatactagcggtgcgagaaccaagaaagtgacagcacagagaacataaggacctggcgaatgggaaacgtcacactgggcgctaagaacggtgccgtaactgagaaaacgctagtcggctctactggcaaaagcgctgatgcaaaaccatcagctccgcatacgaaggagagccaccagacacaacctggcacctgacagcagggagactgagaccgagctcggctccccggatcctgagagaatgtaagtaaagaagcaggaagctgagacgctcaaaattagtagaaaaaaaatacataacatttaaataaaatcaaaattaaaaaaataaaggctaaaatgcaagtaaacatggaaagcaaacacatcggtaacatcgttctcagagcaaaagacaaagagagaatttaaaaataagcaaaaattacagagaaccaatcctagaaagaagaaattacaaaccttgctaaaagatgcaatcctacaattgtgatatctctgtcagatctaaaccggtacatgttacacctaagtctacatttcctacgaaaacaaaaacaaaaacaaacaacaccaacaaaaaaaagcagtcacggttaaaccttttttactacgacttaaaaatcgcagtagctggtctattcagacttggtccacaagaggaaaaagtcgcgttcggcaggacttgctattgccaaacggagcttggtaaccagaaatcgcgtttgcggacatttcctgacttccatgggagtttaaaatacacacaagcttagctaaggtgggactcaatattgcgaaaacaaacttggtataagagctcccaggcactgctaaactgatcatcggtaaacctaaaaaaaatcgcattcgcgggtacccagatttctttttcttttctttttttttttttttttttttttgagttggagtctcgctctgtcgcccaagctggagtgcagtggcgcgatctcggctcactgcaagctccgcctcccggattcacgccattctcctgcctcagcctcccgaggagctgggactacagggacccgccaccacgcccggctaatttttttgtatttttagtagagacggggtttcaccgtgttagccaggatggtctcgatctcctgacctcctgatccgcccgcctcggcctcccaa

SEQ ID NO: 33563 - DNA, 2300 bp, Homo sapien
ttagctccacagatccgtgaacagcacgcccagagtacagagaacgcggcaaaaccaacgcgaagaatccactccaggcagtctgagaaacccgggaggtggcgccacggctggagggcaggaggatggcggcgttccaaaaggcacccgctgtcacagacctcggtgtcctgctgtctgtcccagggatggagaggactgctccagggaagctgctggagcctgagtctgtcgggttcctctgcctgccccacctcttctacgggtgcctcttgctgcttctgtgtccccggccaactgaactcagtgggcttcgctgtacttggttccaaggtgctctggactccaggagagagtccgttttgccagtagactccgggcagccgccagcaagggctggaaagcagtcccaaatcacagctgtccagtgagtactctcctagtactggatacaaaggaagaggccacggcccacgatcttctgaactcacaataggtggaggctggggctctggcgccacctctgcggaatcccaagcccgcttcacacagccaagaaaatgttgctccatccctcaagcctcagaccaacgtttgcgctgatcaaggagggagagtctctgcactaccatcagcctgagtatttatgctctgcagagcccgtgggcggaggccagtcagatattaagaaactcagtagtaacaaatgcacgaaaattagtagacaaatgaaaaacgataacattttagagagtacatagaaccaaaacgaaccgtaattccgacagaaaaacatggcgagaaaagaaaccgaaatgaaatgacactaagcaaatcttgaagagaactagcgctacagaacgcaggtattcaagagcgcgcaagggccaagaaccacccgtttccgggaaatgagcgttgctgccaccggaaaactgtctgctagggctctgccctaaccaccttgcaaacgagaaactggcgcgttgaacttagcaagcgccggcacctagcggatagcgctggtattgccaaacaaatatccgttttggcgccgtaaagggtgctgctaaagagaaacagcatgctcttagaactaagagcggtgcttccacacctaaacaacctgtttggaggaatgaaccaactctgtttcaatgtgttgtaccagaaaaatgtgttgcggcatttaatgtgttttaatccgttcaatgtgtttgataggtttaatatgttttaacccgttttaatgggttgtgacagaaaaagcgccggctaatggtaccacacaattactagtgcgaacagcggctcggtgcaatcaccgttctgcacggcaaaacggggttcaggaagttcctaggagatactagcggttgtaggagcgaaaaagtgacagcactgagaacctaaggaccccgcgaacgggaaatgtcacgttgggtgcagcaactgagaaaacgcccagtgggcgccactggcaaacgtgctgatacaaaaccgccagctctgcataggaagcggagcctccagacagaacccggaacctgataccagcgaggctaagaccgagctcggctccccggctcctgagagaatgaaagtcaagaagcacgaatctgagacgctcaaaattagaagaaaaaaaaaatacataatttaaaataatgaaagtctgaaatgcaagtaaaaatgaaaaacacatcggtaacattgtcctcagagcaagacacaaaaataattttaaggtaagcaaaagttacagagaaccaaccctacaaagaagaaattacaaatatggctaagcgatgcaatgcctaccattagaatatttctgtcagatctaaacccctgcaggttgctcctgtcataatttcctacgagaaaaaaaacaaaaatatccacggttaaacgtgtttagctacgtctaaaaaatcgtagtagctggtacatcccgatttggtctacaagaggaaaaagtctcgatgggcaggacttgctattgtcaaagggagcttggtaaaactgagacatcgcgatcgccggcatttcctgacttccacgggagttttaaaaacacacaagcatagctaagacaggactcgatattgcgaaaccaaacttggtataagagctcccaacactgctaaactggtcatcgctaaacctttaaaaaaaaaaaaaaagcattcgctggtacccagatttccacaggagttaaacatttcctgcgcagctaaagcaagtcttaccagtaggaaaccggaacttgctaggactaagaaacttgaggctaggct

SEQ ID NO: 33564 - DNA, 2300 bp, Homo sapien
cacctctgcggaatcccaagcccgcttcacacagccaagaaaatgttgctccatccctcaagcctcagaccaacgtttgcgctgatcaaggagggagagtctctgcactaccatcagcctgagtatttatgctctgcagagcccgtgggcggaggccagtcagatattaagaaactcagtagtaacaaatgcacgaaaattagtagacaaatgaaaaacgataacattttagagagtacatagaaccaaaacgaaccgtaattccgacagaaaaacatggcgagaaaagaaaccgaaatgaaatgacactaagcaaatcttgaagagaactagcgctacagaacgcaggtattcaagagcgcgcaagggccaagaaccacccgtttccgggaaatgagcgttgctgccaccggaaaactgtctgctagggctctgccctaaccaccttgcaaacgagaaactggcgcgttgaacttagcaagcgccggcacctagcggatagcgctggtattgccaaacaaatatccgttttggcgccgtaaagggtgctgctaaagagaaacagcatgctcttagaactaagagcggtgcttccacacctaaacaacctgtttggaggaatgaaccaactctgtttcaatgtgttgtaccagaaaaatgtgttgcggcatttaatgtgttttaatccgttcaatgtgtttgataggtttaatatgttttaacccgttttaatgggttgtgacagaaaaagcgccggctaatggtaccacacaattactagtgcgaacagcggctcggtgcaatcaccgttctgcacggcaaaacggggttcaggaagttcctaggagatactagcggttgtaggagcgaaaaagtgacagcactgagaacctaaggaccccgcgaacgggaaatgtcacgttgggtgcagcaactgagaaaacgcccagtgggcgccactggcaaacgtgctgatacaaaaccgccagctctgcataggaagcggagcctccagacagaacccggaacctgataccagcgaggctaagaccgagctcggctccccggctcctgagagaatgaaagtcaagaagcacgaatctgagacgctcaaaattagaagaaaaaaaaaatacataatttaaaataatgaaagtctgaaatgcaagtaaaaatgaaaaacacatcggtaacattgtcctcagagcaagacacaaaaataattttaaggtaagcaaaagttacagagaaccaaccctacaaagaagaaattacaaatatggctaagcgatgcaatgcctaccattagaatatttctgtcagatctaaacccctgcaggttgctcctgtcataatttcctacgagaaaaaaaacaaaaatatccacggttaaacgtgtttagctacgtctaaaaaatcgtagtagctggtacatcccgatttggtctacaagaggaaaaagtctcgatgggcaggacttgctattgtcaaagggagcttggtaaaactgagacatcgcgatcgccggcatttcctgacttccacgggagttttaaaaacacacaagcatagctaagacaggactcgatattgcgaaaccaaacttggtataagagctcccaacactgctaaactggtcatcgctaaacctttaaaaaaaaaaaaaaagcattcgctggtacccagatttccacaggagttaaacatttcctgcgcagctaaagcaagtcttaccagtaggaaaccggaacttgctaggactaagaaacttgaggctaggctgaccccatggttgttatgattagaaatccgaggccactggaaacccggagctgctgaccaacgagtcacagggtaacttcgccttcgcatggggaaacgggtgagttcctacggcctagatatcgcagccagggctagaccggtgtttgtcttaagtcaggacttgcttgggctgagaaaatacattttggctattcccctacttggacagagggtggaaatcccaggcaccgcgaaatcgaaacttgctaggactaagaagccaacgacgcgcgaaaccgtggggtcctgcgacagagacgccggcggcgccgccacaggactgcgttctggaggccgagccggaacccgtgcggcggcgctgggaagagactgtgcccctgcagctcccctgtcaccggctccaaggagcgtcgggctccccccgcccagccctgcagcacccatccggcaacgccagactcggcgcaacgggggcagctgcgactttaaatctctcagatccgcggcctgagggc

SEQ ID NO: 33565 - DNA, 2300 bp, Homo sapien
aagatcaaagcaaacgcctggggagtgagtgacaattgcgaccccaaattgggtctcctgacttgtcaaggcccttctctgggctcctctgcacctgtcctctgcccaggttgatccagaaaaggatggaattggttgcatggtgttttcaggatccgattgggagatgatgcgttcgcgtgggaacgctcctggtagggtctgtaagcctcttagggggattacatctggatgtataattttttttgggaaatgtgaaagcttatgggaaaaatacgttttacttccaagcagtggcagttccttatttcctatgaggaaggagtttatagccccactcttgactgaaaagtgtgagagacaattcaagcgcttgaaaattcacctgttttgcatttccggaaagacagagaaagcgtcagtgatccatttcacagatcaagggtataggaaagtggatggcactttgagatgttcattaggtttggagagggagcagacatctgccagcaatcccacctcttgtgctggagtcttgcagttcatttttctctcctgccctcttccaaatcctatgtccaatatcaaggatatctgacagttaaccatcagaatcaacgagcgttcccacagagttccgtcctgcaggagaggtaccgggacaggggcgggagacctgaagctgcgatcagaaaacgctgtgccttttacgctcctaaggaaccttagaccgagagtttcaagtttcaaaggcaagcagttgttggcccctcctgtaggatcctgtgggctctggaccgggaagagagcctggcagcgaggggtgacctggaaaagcccagtcacagagggtggatggctgtttcctgcgtaggaagctgttggcgaccagaatggtttatactttgttcctgggaccaacaggatctgcttggttctcggcgcataagcccactactctccccctgcgtaatgcactgggtggaatgcaagaacaatacagacttcctgcgggcctcggtggcccacgcctgtgatcccagcactttgggaggcccaggcgggcgaatcgcttgagctcaggagttcgagaccagcctgggcaacatagcgagaccgccgtcactaatatatatatatttatatatatatatttcatatataatatatattttatatataatatatattttatatataatatatattttatatataatatatattttatattttatatactatataaaatatattatatataatatattatatataatatattatatatcttatatattatatattatatataatatattttatatattatatactatattttatatattttatatattatatataatatattatatattatatattatatataatatattatatatattatatataatatataatatataatatattatatatattatatataatatattttatatataatatatatattatatattatatatatattatataatatatatattatataatatatatattatatataatatataaataaatatatatttatatattttatataatatataaaaatatatatttatatttatatatttatttatattatatataaatataaaatatatattttaatatatatatttatatatataaatatatataaattagacgggggtggtagcactcacctgtggtctcggctactctagaggctgaagcgggaggatcgctggatcccaggaagtcgaggctgcactgagccaagatgacaccactgcaccagcctaggcgacagaggaaaaaagaaaagaaaaagacatcagacttccctaagcccgtgggggacagagtgggtagagccagtagcactttggtggcaccgagcgcgcagttggtcggtcgctgcaccgttcctttcccagcgccggctgtttctcactggcaacgccacgcctttgtcagcgttatcggacgctctctggcggcaaccttctcacggccaaaaattatcttttgcaactgcacagacatttgctacgggcagctgatcgctgggtcccagcgccgctggtttcacaatttcgcgggtgccccccaccatccccagcccgcagcataatcggtgaagggagcctgcggtttctccgccgcgccttcgcccgttgcgtcctgcgaagccagtggaatcggtggtcacaaggttggtttcaccaagtcgggcgtttcttggcactggcaccgctctgcgcttttgctggcccaggccggtctcagcaccgttaggt

SEQ ID NO: 33566 - DNA, 2300 bp, Homo sapien
atccaagactgggtaatttataaagaaagaagttttaattgactcaaagctctgcatggctggggaggcctcaggaaacttacaatcgtgatggaaggcacctcttcagagggccgcaggagaatgtgtgccagcaggggaaaatgccaggcaattataaaactatcagatctcgtgagacccactcactaacacgagaacagcatggggaaaaccaaccccatgattcaattatctccacctggtctcacccttgacacatggggattattacaattcaaggtgagatttgggtggggacacggagccaaaccatatcagcatctctcctgattttccaaatgcaaatgtcttatagtctcttgctgaggaatatacagttgccgacttgccctttctctgaccaccccacacaaacaccatattggaatcagacagaatctgaatgccggaactagaatgcctcctcctttagggaagtaagctccataactcctgtccacattcctaacctggaagagtgaccccttccctccagaggtgctgatcccaccatttttgctaaaataggaagctagggtggaaacggagagaggaatggtgggtgagatattttgttttttcaaaggctctgcacagtatcttcaattagataaagtggctgtaacttttcttctattgacactgccctctttcctttattctactgcctgcaaaagaaggcaactgaagaagcctcaagtaccagggcaggttttggctagctgaagaaagggtaaggtataggggggaagactggaggtgaccatcttgggagtgggtgagaagtgagagcccaaaatgggtcttcttacctctctggtacattctgtgctcttctctggtctgacatccgcccaggttcatccagaaaaagatggaaatgatttgaacaggataagctagggtgaggattagacacgatgagttcagctggagacactcatggtagagtctggaggtctctttgggggatcacttccaaaagtgcagatttttagaaaaacgagaaaggttctggaaagggatgttttccttctgctcaatggcagtttcaggtttcctgtaagaaaggagtttgtagcgtcagtatatttgacaaatgtgggagagggaagattcaagagcttgaaattgcattgcacttcccaaagatggagaagacatcagggatgaatttcaaaggtgatagaaatcgggaactgccctttgaggatttcaaggggagagggagcaaaggcctcaccatcaatccacacgtcctgtgctagagtcttgcgattcttatttcccctaccctcctgcaacgattattcccatatatcaaggccatctgacagagttaaccatcagaattaaatagcagttcccacagagttccatcccctggagaggtacctagctgccggggcaggcctgaagcctcggtcaggaggcattgagtctttcactctccacggaggtcttggactgagaacttcaagttccaaagggatgaggtgtcggcttcgcccttaggagcctggagggctctgaccaaggagaagggcggagcccagccactggaaggtttgtttcttgcagtggaagacggttggcgacccggatggcttttgttaccagggccagcccaatccgcccgattctcggtccctatactgcctccttttcccatgcgcatcgcaagggatcggttgatggggccctcagtatgacttcgctaggaaaaataaaggtcttcttaggcgggaggggactgatttgaggacggagggtgggagtagtgccagcagcactttgtcgtagtggcactgggtgggcagttatcagttgcagtccgctcgtttctcagtgcccacggtttctcactgacagtgcagctcgtttctcagagccggcggatgttcatgggcagcaccatcgagccagaagcagtatttgtcctggtaagtcatttctcaactgccgaagtgtactaggttccagtcccgctggtttctcgaatctgctagtcccacacgagcaccaataggtaaacccagccggcagtttccggctagcactttcgctatttgaagacattaggaagttatgtggtggctccgtaccctcctttctccatccgaggccggggtcctaaagtcggtgtcacggtggcagcacccagcgttttgttggctctttcgccagcagcgccgagcggggggttttctgtcacagcacttgttgcaccgaatttctcggtcgcagaacctctcttt

SEQ ID NO: 33567 - DNA, 2300 bp, Homo sapien
gagacgatgtttcaccatgtcacccaggctggtcttgaacacctgggttccagcgatcctccccgactgggcctcccaaagtgatgggattacaggcctgaaccactgcgcccagcctatctctagattctgaccagctctctaattccattttcccccatggtttcatctacattactaacagtctcccagttgatctctattcctagcagcttgtcccatttaatctgttctccatattggggctagaattatctctttaaaaagtacatcttaggatgtcaccatgcggcaaggcttccccttgcaaaaagaaaatctgacatcttcaacactttttataaggcacccttgtgcgtctatccagcaacattgtttcagtttcctgaatgctataatcttggtgcctttgcatgtgctatacttttggctaagaacacttagacttcacatcacttaaaaacattttttgttttaatacagatggggtctcgctatgtgcccaggctggcctcaaactcctgggctgaactcctcctccccaactcggcctcccaaagtgctgggattacaagcgtgagccaccgcgcccgcccacatctcttcttacaggtcaactggctttccttgacacccagttacttcgttcttcaggtgttgcaaaactcatcagcaagcacctaggcaattactgttcaaaatatctatgcagtctactagacttaagattcagaaaggcagaaaccacatataccttgttcacagctggacttctcagtgtctagtactaggattctcaatacatatctgttgaagttatgatgacattattaccatatagctatttgagttcctccgtaatcccaattctcaagttctttgagagaaaaaaataagtaaatctcaattatagaattatcctcaaaatgtatttatatataatatttctttggaggaattaaggaagcagtcacatgcagctgactgtgggtcactggacttttttttttttttgagacgttgtctcgctctgtcgcccaggctggaatgcagtggcactacctcagctcactacaacctccacctccccgcttcaagctattctcctgcctcagcctcccgaatagctgggattacaggcgcccaccaccattcccggctaatttttgtatttttagtagagacggggtttcgccatgttgcccaggctggtttcgaactcctgacctcatgtgctccacccgcccaggcctctcaaagtgttgggattacaggcatgagccaccgcgccggcctggactctttaaaggagtggggaaggcctgcactaacgggatccggtgtaaataattctgagcagctccaggtcctgagcccagcaagcacgtgctgcggcagggcgcggggagggcgcgcttcgcggaggaagattccgggcggcccgaacgtgctcgcgcccgtagctgccgctgccggggccgcggccgcccgggtgcccaaccgaacgcacgtgcgccagcggggcccgagcagaaggggagccccggctctcacgaagaaaatggagggcgacccacgggttaggggtcaggaaaggcgtggggcgcattatgccctgggaggggaaagcacggaacaagaggctctgagggacggagaggaaggagggcgacccacgagctaggtaaggcgggccaacccaggtctcggaaggaagggggcggggcaggacggggcgggaggggccgcgcagtagctgggctgtgaggacggttggcgagttcattccgggctcgggtcgggaagtgtccgcccctggagtcaagctggggagggtgagaggttgaagggcaatgacttaggttcccagcttctggccctgccaggctctgcagtagcccaagcccaccgctgcccggtttcttctcagagagcaagccctcgcccttcgtgagcgccaaatccccgcgctcggccccgcccatccactgaggggtgtgggtaggggcgtggcccgttcccttgctggtcggcgcccggaaggcgtccgcgtcagccggagctcgacgcggtgacggtgtgcgtcgacgtaagtgacgcgcaagcctgggccgctcctccttccctcagtgagtgccggcccggtcggggcgggggagaagagggagggcgggggagggagaggcgacccgagagtcgttgtgggtcgcgggccggaccgggtcccggggcggtgggagccccggccgggcagaagggcttggcgggccgttagaggaccgccacggctgtcgagtccc

SEQ ID NO: 33568 - DNA, 2300 bp, Homo sapien
ccctgtcttttcttttcttttcttttcttttcaaaaagggaagtggtgttatttgtaataatttacacttcaggaagcaggctctaaaaggttacttgcccagggttgtccaactagcaaggaattaagtttgtgctattaattaccatgctttttcttctgctactgcagtaactcctcccctaccaccagcatcaaaatctaaaacagcaggaaataaatgtttgcctacgtaattacagaattttagcttcttttagggttcttgggttttggttttatatctatttcattgtgtacgtattctttgttctgaatgggttgcctagaaactccttttttccctttgatgcctaggggagtaaagaaaacaaaaaagagttaagaatattctttaattttggtatattccagtttagcattatagctgatatatttacagctagagtatcttttaatatctataatcaggacagagacataattatgaaaatccacaaaacttaataaagtgagaatctaactgcccagatgatagtggtttctactacaaagcaagcctccatgaattcattcacacctgaggtttattaaatatgtgaccccaggcgggttactttacctcaattgcatacttttctcctcatctgaaaagtgggttcataggattataaagactaattgcgataacatgcagagtgcatggcatgatatttggtgccttgtcaaagcttgataaacagggtccagtctaagaaacattagggagacctcttctctacaaaaaatttaaaaaattattagctgagtctgatggcacatgcctgtggtcccagctattcaggaggctgaggcgggaggattgctggggcccaggaggtcaaagctgcagtgagccatgattttgccactgcattgtagcctgggcgacagagcaaggccctgtctcaaaaaaaaaaaaaaaaagtcagtttatcatattgaatatctataatatatcatgtactatgttagacccaggagatgaagaattaatgaataagatgtcccttaaagaagtcggaaaatttcataacaggtgagcaacaggcaaataaaggagtgcaaaaagtattacaaagactattactgtgaaatggtatcactgaagagggagaatgagtggtttggtcttccttaggaaagatttcaaagaggagttttgagtctgagcagaattttttttttcttttttttggagatagattttagctcttgttacccaggctggagtgcaatggcgtgatcaggctggtctcgaattccccacctcaggtgatccacccgcctcttcctcccaaagtgctgggattacaggcgtgagaccacgactggccaagtctgagcagaatttttaagtcttaaaaaataagtggcctggccggatgcggtggctcacgcctgtaatcccagcactttgggaggccgaggcaggcagatcacctgaggtcgagaggtcgagaccagcctgaccaacatggtgaaaccctgtctctactaaaaatataaaattagccgggcgtggtggtgggcacctgtaatcccagctactcaggaaggccgaggcaggagaatcgcttgaacccgggaggcggaggttgtagcgagctgagtcacgccattgcactccagcctgggcaacaagagtgaaactccgtctcaaagaaaaaaaaaaggaaaagtggcccaagctggaatatttgttgctggtagaatgagcacacattacctggagaagtagaagtagagcctggtcttctgaagactagtcaccttgagatttaggtctgtggcacacacaagtcttcagtatttgaattctagatagataagaaagcaaaatagacacacactttatttctgtcatttggtcagattcaggtttaaataattaatttggttcagtatcttaagcccttaactttggggttacagtactgtctagcaaggtcacctggctgtggagaaagccctgggcatatagttagttagaaaacttgagttttagccctggctttaactgtttgtgtgctgtgtgaccttagatatcttggcttccttatttttcatgtcacataattttggagtatgtcatggacatttgaatattttgttacaaaactggatgctgttaaaatcctctggaaaatatttttggttttttggtttcactttagcgggcagttaacctggttaggttcagactgcctctgtgggctgtggatccagtttgaacttacttttcaaaaccttcgtattgc

SEQ ID NO: 33569 - DNA, 2300 bp, Homo sapien
aaaatgaattggagacttagacataagaccaaaaaatgtaaatctcctggaagaaaacatgaggggaagcttcaccacatcattcttagtaatttcgtggatgtgacgtcaaaagcacagccaacaacagaaaataagacaggtgggactacatcaaactaaaaagcttctgtacagcaaaggaaacaactgagtgaaaaggaaatctaaggaatgggagaaagtatttgcagaaccaaataaatgataaggaatgaatcccaaaaatatatgagaaactcccacaactgatagtaaaaaatatctgcccaattaaaaacagtctaaatgatgcagaaaaaaattaaattaaaaatgtttttttaaatgtgctaagaacttgaatagacatttctccaaacagatggccaacagatacatgaaaaaaaagttcagtgtcactaggcatcaaggaaatgcaaatcaaaaccactatgaggtatcagtcacttcacacctttcaggatggctatcaaaaaaaaaaagacaactagtattggtgaggatataaataaattggaatccttgcacaatgttggcaggaataggtgcagccattatggaaaacagtatgaatgttccttaaaaaattaaaataccatacaattcagcaatcccacttgctgaacatttatccaaaagaactgaaatcaggatcttgaagttttagcactcctatgttcattgcagcactatttacagtagccacgagaggaaataaatattcgtcaacagattaatggataaagaaaatgtagtatatgtatccaatggaatactattcagctcttaagaacaaggatattctgcatatgcaaccacatggatgaaccttgaggacattatgctaagtgaagtaagccagtcacagacataaactgcatatttctatttatatgaggaatctaaaatagtcacttccactcatatgagctatctcaaatagattgaaagagtggaatacgggttgctaggggctgggagggaggaggaaatgggcagttactaatcagtgggcataaagtttcaattgcgcaagatgaataaactggaggtctgtacaacattgtacctagagtcaacaatagtgtacacttaaaaatgtgttaagtgggtagatctcatgttcttattacaataaatgttaaaaggtttcattgaacatgtgacattagagttggacctttaaggggtgggtggtaggatgagtataaccagagatgaaatgattaagcatccaactaggagggtgttaataaaggcaagtcaggctgggtgcggtggctcacgcctgtaatcccagcactttgggaggctgatcgggcagatcacttgaggtcgggagtttgagaccagcctgaccaacatggggaaaccccatctctactaaaaattcaaaattagccaggcgtggtggtacatgcctgtaatcccagcagctcgggaggttgagacaggagaatctcttgaatctgggaggcagaggttgtgagccaagatcactgtattgcactccagcctgggcaacaagagtgaaactccatctcaaaataaataaataaaggcaagtcagctattagaaagtgcagggtttgtttgagaaatagtatatagtgtgtgtgtgatgtcgtttaaaatttggaaaggtaaataggaaaataatgtgaagggccttgaaataaagtcagagaggtactaaattttgtttgctaagttgtgaaaagctattgaagattttggagctgagttggcacagctgtaatctccctggcaagaaatgtagcatgtctgacatgtaatagccaattcatatatttgagtgatagaatcttactgttctccaagagcctcaggaaatttaaagtagtttaagattttccagctaggtagtgctgaaatttggctgtaatattattgtattgctaatgagaatttttccagaaaatagttttcaaaaataaatactcaacaagctccaagccctgggcttttctttctttactaaacattgtaagatttgagtcaatatgattacatgctctaatgtacatcttctttacaggtgttagtaaaatggcctttcgccatttaattgagttcacatatacagcaaaattaatgatacaaggagaagaagaagccaatgatgtatggaaagcagcagagtttctacaaatgctagaagctatcaaagcccttgaagtcaggtacttaatttctttaatggggttcagatagtcatattcagtcatgttcattct

SEQ ID NO: 33570 - DNA, 2300 bp, Homo sapien
ttaagctatcaattcacccctgctgtgaaagatactgaaatcggcactctcaaacctcttgatttaattatatttgcattatcataaagtcagtgtgcaggttagtgcaagagaaaattcatgaacagaaggtagatctgaagaaattacctagaatgtagcacaaaatgttaaaaatctagagaatctgagaaaagacatgaaatagaatgagaaggtctgacacacatagtataaaatagagattcctgaaagaaagataaaagttgggaagggttctgttatggactaaatttttgtatctcccaattcatatattgaaatcttaactcccaatgtgatggtattagcctaaagtgttcagtaaccttttaagctactagaacctatcatcacctctgccttgtgcatgctctttggggtgtgatggtgaggatctatgtcacagagagcctctgtcagattgggtgtttgaggctcttggtttctaggcaatttctctatgaaattttattctgtttatttgaattcaagggtcttttatatctttaaaaatatgtagagtttctccctgcattttattgcattagaaagaaaatagactgatggcatgtactattttaaagattactcttaaaaaaaaaaaacaacaaacctcttgtcttttgaggaggggatgtctctttaaaaacaaattttctcgagagaacccttgttctacataaatagatgaccactctcagaagccaaggaagcagttgtttcaggttctttcaattttctttccaatctcaaccgtcagtgcacggagctgtccaaggtttttatttcttgcccttcccgttcctgacccctttaatcatcacacaaacaggcagcagagacaaagtaatgaagaacaccaactctggagtcaaacaaactgggttagagtcccagagccagcattcaacagttgtgtgatctcgatcaaatcctgtaacctctctgggcttcagtttcttcatctatcaaaacaaggatgacagtaacagtacctaacccatagattatcatgaggatttaatcagttactctttgtaaaagagtttattacaatgcctggcaaatagcaaaaaaggaattttggggttccctagtttctaccataaaagaattgtagacatgggttatgttgctacttaacagttttgctcttgtaaatattgctctggcaatcaatacaggatggagagcaggaggaagtagaaagaatgctcgcagaactatgacttagggtgtctagtcctggctctgccattaatcagttgtgtgacccttgctaagttaactgacccctctgaactcagttttttttttctctctctgtaaaaggaagggcttaaacttcagtaaataaccggtatgttttatttagtattttgcgaatcccatttccaactctacgttcaatccagtgacggtatttctagtttataaactagaaaaataatctttggcatctgagggtcacagccgagagtatctccctagcaggagattagggagccagtgacaaagtggcaccaggggaaccgatgtatgccaggaatccagacagagggtgacattagcacttctttctgcagaacctaaaccctgcccgactcacccggaggagctgtcacggtggtttgctggaaaccccctttctgttgggaggattactgggtcacggtttcccaaggacatggaaacccttgctgaagcgctggaaccgctcggcacgaggcgtacgtcggtgggagctgtgtcagcccgctttcggccgtgtagctgctcccatccagactctagaaggggtcctctttgcgtcaggcccaatcacccccctccccgagcgactgcactgggtgtccctgcgccgcgcgtcccctccctctcgcccctccctcctggctgccatagaaaccagcttacaaggtccaggccggcgtccgggtgcactacaggccccccgtccctccttccccacgccagcccctcgctccggattggtccttcaggaaacgctgtggggcgtctcggtccccgctgcggagccggcctaggccggagggcggggtttgccctgggccgctgccggtcaggtcggccgcccctgacagctccgggagcctcaagcgcgacagcggcgccctcacctcgggacatccacacaccgaccgctcctgctccagaggcaacaacccagcgcgcctagcctggcgccgtgcagcgaagcccaagagctggcctcgccacgaaggtaagcgaggggc

SEQ ID NO: 33571 - DNA, 2300 bp, Homo sapien
ttactcttaaaaaaaaaaaacaacaaacctcttgtcttttgaggaggggatgtctctttaaaaacaaattttctcgagagaacccttgttctacataaatagatgaccactctcagaagccaaggaagcagttgtttcaggttctttcaattttctttccaatctcaaccgtcagtgcacggagctgtccaaggtttttatttcttgcccttcccgttcctgacccctttaatcatcacacaaacaggcagcagagacaaagtaatgaagaacaccaactctggagtcaaacaaactgggttagagtcccagagccagcattcaacagttgtgtgatctcgatcaaatcctgtaacctctctgggcttcagtttcttcatctatcaaaacaaggatgacagtaacagtacctaacccatagattatcatgaggatttaatcagttactctttgtaaaagagtttattacaatgcctggcaaatagcaaaaaaggaattttggggttccctagtttctaccataaaagaattgtagacatgggttatgttgctacttaacagttttgctcttgtaaatattgctctggcaatcaatacaggatggagagcaggaggaagtagaaagaatgctcgcagaactatgacttagggtgtctagtcctggctctgccattaatcagttgtgtgacccttgctaagttaactgacccctctgaactcagttttttttttctctctctgtaaaaggaagggcttaaacttcagtaaataaccggtatgttttatttagtattttgcgaatcccatttccaactctacgttcaatccagtgacggtatttctagtttataaactagaaaaataatctttggcatctgagggtcacagccgagagtatctccctagcaggagattagggagccagtgacaaagtggcaccaggggaaccgatgtatgccaggaatccagacagagggtgacattagcacttctttctgcagaacctaaaccctgcccgactcacccggaggagctgtcacggtggtttgctggaaaccccctttctgttgggaggattactgggtcacggtttcccaaggacatggaaacccttgctgaagcgctggaaccgctcggcacgaggcgtacgtcggtgggagctgtgtcagcccgctttcggccgtgtagctgctcccatccagactctagaaggggtcctctttgcgtcaggcccaatcacccccctccccgagcgactgcactgggtgtccctgcgccgcgcgtcccctccctctcgcccctccctcctggctgccatagaaaccagcttacaaggtccaggccggcgtccgggtgcactacaggccccccgtccctccttccccacgccagcccctcgctccggattggtccttcaggaaacgctgtggggcgtctcggtccccgctgcggagccggcctaggccggagggcggggtttgccctgggccgctgccggtcaggtcggccgcccctgacagctccgggagcctcaagcgcgacagcggcgccctcacctcgggacatccacacaccgaccgctcctgctccagaggcaacaacccagcgcgcctagcctggcgccgtgcagcgaagcccaagagctggcctcgccacgaaggtaagcgaggggctgggggactcgccgccagcacccccaccccgccacccttcctctgctaggctgcagacctgggtggctgaggaggaggcgcctctcctccccgcgacccaaggaagaaaggaagccctgccacggggtgtctgcgaagtggggtcagaagaaggttaggcgctttctggggcgtacccccacacctgcccaggccgatccgcaagcgagaggagggggcattagagccagggcgagagcgtgctcgcgcgtgtgtgcccgtgtcatgtgtggtgcccgtgtcatgtgcggcgcccatgtctatgtgcgcgcgtgtgtgcacccatgtctctgtatggtgtggacactcgtgtctgcgtgcgcgtccacacgtgagccgaggagcgcagcttagcgcctagcgttgcgcacagcgggtgcgctggaccagagccctaaggcaccagaccaaatctggagcgtttgttacaagggcagaagaccggcgtgatctccccacgcgcgccggccggtgctgctggtggagagaactgacatctaacgcatgtggcccaggagaacaaaaccttccattgcaccccacgccgcgactctccccagcgaaaggtgcttcttttggaagaccgca

SEQ ID NO: 33572 - DNA, 2300 bp, Homo sapien
tcttcaccctgactcatttcataaccatttttcccgccatcactgtctttaaattagtccatcggaattagtttagcctgtgcagtctaaccctagccaataagggaacgacacagcagtggggaccacgtgcgtcaggaataagaacccctttccctccctcgtccaagtgtgcactcaccattgctccatctgtaagggtgcacccttctatagaagtaccttgccttgctgagaattaaaaagaaaattttatattcgactgctatttcttttgcagcatggaaactttatttataacaagatcttctgtatctaattactaaccctttttgttctccattgcttggcttcccagtaatcaataatcatgctcactttgcttaattgaagattaacgtgatcaaaaagacggtctgttccttgtagaaatttccggttgtgtaagatggtcattctcatgaccgtctggctaatcatttcccattatgtactcctggagttggaattatttgcgattcctaacgacaaaactgtatcttctttcttgtgtttgtccttactgcctttcagcatattccaatatgccaagaattttaatctcctaccccaccccaaattgctgttgatcataatcaggcaatgtctctctctctgtttactatctagttactttacatacatatgaagtgagtcatgggcaatactgtggaatggaaatcattactgagtggtcctcttcccccaagtcatttatgccaccacttcacagtggttccatttccaatatattttgccactttgctgctgagaatgtgtcttactaggttagcatctatagtggttaaaagaatctcccataacaataattgtgtgaatcacagaattaccaatgaccccttatcaatagcattcctgttaattaaattgagatggggagagatacaaacaactccgaacctcactcatggtcccccaccaaagctaagtattatggcttctctctctgaccagatagaggcagagtttattgcaaagccacaagtgtcctcctttggattcccccaaatagtgtttcagtgaattcctctagcttgaattgctcctctctatttgctgggggagttaggcagtccgtatccgatggatttactatgccgacaattacgtggcctttccacagccttttacttggcaggtaccacatatgaagcttagaagatacagtgggcaacaggccaaatggagtccctttcctcagagtgcatggcctggcaaaaatccttgaattcagtatcaacttcccttcacaggcaaggctctgcaccctccccacggatgcctaatcctgaaaccattttgttttaggtttagttagaaagctttgtctcaagagcacttttgtttgttctgttttctttaagtcaaggtagttttgaataaaggagacaatatttgagtatttacaaatcgggtatttagactatttacacatatacaagttctgggtgaagtattctgctccaatttgcaatctacgcacactttgctagaaaacgttaagactgaattcaaatcaagtacagtatttcagaaatctttcaggtgaagcctagttctggttgctaggcaacctgacagactcccaagctgggaccacctcgcctcccacatttgaccatctctccagcggtgggacgcggagtacccattggcccgcatctcctctcacttagtcccaattggtcggagaacctctcactccgctcccgttggctctcgccgtatctcgcagctccgtcattggcaactgggctctcgtgccacctcacgtcagtctctcacaccacttcctcggccctgagactttgtccccgcctcttctccccgcccttccagccacgagggaaaatcctagcgagtcatcgcctctagtttccttttgattggtagaagccggactggggggcgggcgctgccgggcaactctaccggccgcgattggctgtgggagccaccgtcccgcctcccagcgactctcggcggtgccggagtcgggtgggttggcggctataaagctggtggcgaaggggaggcgccgcggactgtcctttcgtggctcactccctttcctctgctgccgctcggtcacgcttggtgagtgtcccgcgctggggagtagaactgggctgcggaggtgccgcgggcggggtgtgggccagacagaggcggtgtccttgactaggcccgaaggagctggggctctgggtcaggacgtaggcgtggactttgcccgggag

SEQ ID NO: 33573 - DNA, 2300 bp, Homo sapien
gaggatcgcttgaggccaaggtatgggggaagggatgcagagcttccatgccttccctgggcacgccaccctctaagaacctccacatgttcagctatccagaagctctccaaactctgcccttttggggttttacaaaggcttcattacataggcatgattaacaaccatgtagaaatgtgattagacaaaaagcacataatctaaacccagcaagtcctgcctgttcaggcttttcttggcctgtgtagcattccttcctctagagtatgggacagaaccctttctggaatgaggatcttatgacccacaatcagattagagtcctgccttgggcaggtgaaagaaaaacagaaggtcagagagagattccgtttcctgaggcctgttcctgaagcctaaagtgccccaacattataatataaaaaaaagactgggctgggcacagtggctcatgtctgtaatcccagcactttgggaggccaaggcgggtggatcacaaggtcaggagttcaagaccagcatcttgccaagatggtgaaactcactccagcctgggcaacaaagcgagactctgtctcaaaaaaaaaacaaacaaacaaacaacaaaaaaaaactgtaacaagggttatgggagttataagccaggaaccatggataaaagccaatatatatatcataacaccacaacccgagactgagcaatttataaataacagaaatgtattctcttacaattatggaggctgggaagtccaagatcaaggctccagtgatttcagtttctatttccaagatgatgccactttgctgcatcttttggagagaaggagcattgtgtactcacctggcagaagagcagaaggtaccaacccattcccacaagccctttttatagtagcattcatccattcatgagggtggagccatcataacctaaacattgtccattaggccctatctcccagcactattagggattaattttcaacatgagctttggagaagaaaaaaatattcaaaccacagcagtaatttgaaaacataaaaagaaatgggtgaaattaattttaataatatattttatttaacccaaaaagtccaaaatactatcatgtaatcaataaacagtataaacattattaacaagatattttatatttttttctgtacccagtctttgaaatccagtgtgaattttatacccatagtacatctgagtttggactactcatatttcaagtgctcaagagccacatgtgggctagcggctaccacataggacaacacagttctagaggaagcatggcatgactttggaggtcatctagtctgacttgttatttacagcaaagttaagtacgttgcctgaggttatacaacttattagtagatgaggaacaattagaatccaattatcttcatgctaccccatgcttttattcacaaagctgattggcagcaaagctgcactagcgctcatgcctcttcacacctgctcttgggctcttttctacaaggcattgccccccttcctgtctttctcctaaataagctattgtaaaaagcttcactggaaacaatttggctgtgaaccaagactaaagtggggtttaatacttccatatctttccacaaagatacattttttatgacttgtcacccttgtccccagaaactcatggtttccataagctacttaaaaactgattatgcaatgggtctcaacataagtgtccatcagaatcacctatagagcttttacaaaattcaaatgactggtctcctacctgggagttctggtttacaaatcagggaaaggggagagtcatttagattgattttttttaatgttccccaaatgattctgatgcacaccccacctcacagtgaccctgccagctgccagatctccattgacatcccctgacccccaggcaggatgaacacaagttaggagcttaataagtcgaggaggagcctggtcttaaggaaagaaacatgagaaatagataccctgaacacctcccagggcggggccacctggcttacttttcctctgcactttctctgtgcccaaggacacctttagcctcatttcctgatcgaacagcctcacttgtgttgctgtcagtgccagtagggcaggcaggaatgcagcagagaggactcgccatcgtggccttggctgtctgtgcggccctacatgcctcagaaggtgagtgggggcactggacacttaggccttcactggaaaggggggtatctcccaaatctgtgctggaaggattgaggtgggg

SEQ ID NO: 33574 - DNA, 2300 bp, Homo sapien
tctaatttttaaaatttgcatttccctaataattaatggtgatgaacatatttcttatacttattggctatctgaatatcatcaatggtaggtacccattttcacatcttttgtccatttttgtattggtttgttttcctattactctgttttgagagttctttatatattctggatgtaagtcctttatcagatataagatttaaaaattgttttttctttctcttaacattgtctttcaaagatcagaagcttttaattttgataagttcaacttaccaattttttaatggatcaagcttttggtattttatctaataactctttgcgtgacccaaggacacaaaaatactttatgtttttttccagaaattttatctttttatgttttatttacatttaggtttgtgattcattttgagataatttttgtatatggagtaagatatagattcaggtttatgatttttgcatatggatatccatttgttctcacaccatttgttgaaaagaatattcttcctccattgatttatctttgcacctttatcaaaaattaattgaccaggctgggcatgatggctcatgcctgtaatctcagcactttgggaagccaaggatcacttgaggccaggagttcgagaccagctaggagttcgaggcctctctagagacagggagaccttgtctctttgaaaaaaaaaaaaggcatggtgacacacatctgtggctccagctactcaagagactgaggtaggagaacttcttaaacgtgggaggtaaagggtgtagtgagccataactgtgccactacactccagtaaaactctgtcttaaataaaaaaaaattggctgggcacgatggctcacgcctattatcccagctctttgggaggctgaggtgggtggatcacttgaggtcagaagttcgaaaccagcctggccaacatggtgaaacccatctctactaaaaatacaaacaaaaaaattagccaggcatggtggcgggcacctgtaatcccagctacttgagaggctgaggcaggagaattgcttgaacccaggaggcagaggttgcagcgagccaagatcacaccactgcactccagcctgggtgacagagtgagactccatctcaaaaaataaatacataaataaataaaattgactaggtatgtttggttctatttctgatcccactctgtattctgttttgttagtctgtatgtctgtcattataccaatactacactgttttgattactgtagcttttttttttttaagacagggtctctgtgttgcccaggctggcatgcagtagcacgattacagcccactgcagcctcaacctccggggcttaagcgatcctcccacctcagcctctcaagtagctgggactacaggcatgcaccaccacgcctagctaattttttattatttgtagagacagtgtctcactatgttgcccaggttggtctcgagctcctgtcctcaagcaatcctcctgcctcagcctcctaaagtgttgggattacaggtgtaagccactgtgcccagcctactgtagctttataatgaaacttaaaataagatggcataagtagtcctccaacttagtttctgtttttcaaaattgttttattcttctaggtcctctgcagttttagaatatatataatgagctatgtatagcttttattgtgtaatagaagttgagtcattatcaataaatcagttattctttagtctcaggattaaaacaaaacaatgtaaaagaaaaaacttcatgtgtcacactttaggtagacaaatattttctagctaggtaaataatgtcaatattctgtgccatgtgagaactcagcatagaattatgattgcatttttatatcaattaaggttatttggttcaaggcatcagaaatgtaaaggggatttgatgggaaaatgttggggtagctcattgaagtggagggggagctgcaagatctagggtagctctgagaacctttagacgttggacataagtactcactgtcatcatgattctattagcctttctcctttgtgtctctctgggattttattttcctaggctatttcgtgtagtggagcccatggcctccaagaagaggaactttctctaccacaagacaaattttggaaaggaatctgattggctcagcctggaccactttcattactagattagtcaccattattagggaaatggaaaactctaattggtgagctctggagtttaatgtgagaaagttttcccaaaggaagggattactg

SEQ ID NO: 33575 - DNA, 2300 bp, Homo sapien
gtctttaactttgccatgcagaaactttattgtgtagtcatgcctatcagatttttaaaaataattttgagctcttctagctaaaagctttacattattatatagtcattcctatcagattttttaaaatatttttgggctcctctagttagctggactatgtagaattctgttgacaaattcatataagtatcccaaatttgataacccagttgatcacaaaagctatctaaccatggaagttttccaggcagctagtcaaccaaattgattccctttcttaatttaatcagagaaagagtctatattgtaaaacatggggtgtgacgttttaaaatctaaagttgtttatataaaattacattatacagactgaaagttgattatccaaactaggttttgtctgatgattgattttcttcagtggtatttagtaattatagccttttctacctagtgattaccgatatggacaggtcatttcctgttcaatgtaatatatttgggaggttcctcttccaatctattgtgaaggaagatagaacccatgttcatctatacagatgttcctttacttatgatggtgtccatgtcctgataaacccatcgtaagtcaaaaattacataagttgaaaatacattaacgcccacaaacccactgtagagtcaaaaaaataataaattgaaccatcgtaggttgaaaccatctgtatatactgaaaaggccacatactcttctgtcttctccagccttgcagcttgagtgtggtcatatgacctagacttagccaatcagacacatactttacctcgctccgaattttgtattgagagcaagaaacaaatactgccaagaatcttttatagcagcagcagacaaggcagcactggcagcaatgccattggaaatacctggtgacaggagtttggtcagtgcaagctgggcttggtggcagggagatcttcatcggaccagttgtctggtgtccttttttttttttttttttttttgagacggagtctcactctgttgccaggctggagtgtagtggcgcattctgctcactgcaacctccgcctcctgggttcaagcgattcttctgcctcagcttcccaagtagctgggattacaggcacacgccatcatgcccagctaaattttttgtattttgtttttagtagagatggggtttcacggtgttggtcaggctggtcttgaactcctgacctcatgatccgcccacctcggcctcccaaagtgctgggattacaggcgtgagccaccgcccccggcctgtgtctggtgtcattttaactgaagttcttgagggatagtttcaaagcctggttttcaaaacctgacaagtctgtgatttcccaatttccttatttgttgttgttgttgtttttcagacagggtcttaccctgtcatttaggctggagtgcagtagggcgatcgtagttttttactgcagcttcaaaatcctagacgcatgtgatccttctaccttagcctcctgagtaactaggactacaggtgtacaccaccacgcctggctttttttttttttttttctagtacagacagtctgtgttgcccaggttggtttcaaactcctggcctcaagcaatcctcctgccttggcctcccaaagtgctgggattacaggtgggagctaccactcctggcctcaaaaattttaatatttttttttttttacttatacaaaactgtttttgcccttccttgcacttggaaccatagctgataacgagatctgggtcaaatattacatcattcctctaccaattcagaattatgtacacatttctccccaccatatacgtactgggtctggttctcgattttgtattcacctttatgtactcacattatgctacttttttttcaaaagtttattagcatgtactctttcaaatgaaatttaaaattattttgtgaagttcctagaagaaaatccctttatgattttgattaaaattgcattaaatttatagattaatttggagagaataacaccatcagtgttgtcttcttatgcaaaaaaaaaaaaaaaaaaaaaaaaaaaaaggtctggcttttgtatcagttaggatccatcaaagaagcagaactactttgtgagctaaagacctatggaattgtgggaggtggcagagcggtctgcagacttgcctctgagtctcttgttcagcctgaagttgctgcagatctactagactggcagtcagacagggatactggatgtggatgagagaaaagacaaactgaaaccct

SEQ ID NO: 33576 - DNA, 2300 bp, Homo sapien
ggcggatcacgagatcaggagatcgagaccatcctggctaacacgggtgaaaccccgtctctgctaaaaatacaagaaattagccgggcgtggtggcgggcgcctgtagtcccagctattcgggaggctgaggcaggagaatggcgtgaacccgggagggggagcttgcagtgagccgagatcatgccactgcactccagcctgggtgacagagcgaggaaccatctcacacaaaacacaaacaaacaaaaaacagtagacaataattttattctttctgtggggtcaagacttagctggcggttctggcccagggtctcatgaagttgcagtcaggatgtcggcagtggctgcggacatctgaagggttgactggggctgaaggatctgcttccaagttcactgtgagctttttccttcctctttcatcagcaagctgttttgtactttccattggtaaaatgcattcgcattatacccattatatataatatatgtgttcctattcgtaaaccgtgatacagttttttgtaaacagtaaattttgcttgttgaggtcgctttaaatttggatcatcatgtaaatacttcaagtaatcttttgatttttcactttgctcacgacactttattagcaaactaatccttttaaaatctgaactcatcatgtaaaatgtagagttagtaggttcggtgtggtagtttctgcctgtagtcccagcactttgggaggccaaagtggaaggatcacttgaggccaggagctgaagaccagcccgggcaacacaatgagaccccatctctacaaaacactttaaaaacaaaaatctagccaagtatagttgtgcatttctgtagtcctagctactcaggaggctgaagcaggagcccatgagttcaaggttacagtgagctatgatcgtgccactacacttcagcttgggcaacagagataccttgtcaaaaaaaaaaaaaaaaaaaagtaagccgggcgcagtggctcacgcctgtaatcctagcactttgggaggccgaggcgggcggatcacgaagtcaggagatcgagaccatcctggctaacatggtgaaaccccgtctctagtaaaaatacaaaaaattagctgagcgtggtggcgggcacctgtagtcccagctactcgggaggctgagaggcaggagagtggcatgaacccgggaggcagagcttgcagtgagccgagatcgcgccactgcactccagcctggtcgacagagcaagactccgtctcaaaaaaaaaaaaaaaaaaaaaaagtaagattattaacatttaaatatatattgtgattattaaaaattgcttcatgagtgaaagaaaatataatgcactggctttataaggacatcatgaaatttgcagttaagtggatattggctttttatttttgtcttccttctggaatgagggttgaaaataaatttgtaattgggtcaggctcagtggctcactcctgtaatcccagtgctttgggaggctgagacaggaggaacacttgaggccaggagtttgagaccagcctggacaacatagagggaccctgtctcttaaaaaaaaaagaaaaaagaaaaaattgcccaagcttggtggcacttgcctgtagtcccagctactcaggagactgagtcaggagaattgcttgagcctaggagttagaggctacagtgacctagcaccatgccactgcactccagcctgggcaacagaacaagactttgtctctaaaaaaagaaaagaaaatttgtgataatatataaacaaagattgagtggcagcagagcttttgtgttaggcgtctgtgtagtctgtgcccagcctaggttcttctcatacctgaatggccttctttctcattagggctaacttacaggccatactttattgaaggaggggaatattgctgctgccgctgctctgggttggccattaattcaagttttcagtgtccctgtttcagtccagctaagtggataagggcatttatttttagttgaaagggacattttatcaactttaaagttatatgcattaaatatttaaatatgttgacttctttatccattcaggtgttgaatgtttgttttctaaaggagacaatgattcataatttgtgacactgtaaatcctgaggtttatagaaaggattcatgactttgtaatggaggtatgttttgcattttttgtattttggtcacatctcttggttgagagtacctggaaatcattatttccagatcctggaagaatctatagaaaataatccat

SEQ ID NO: 33577 - DNA, 2300 bp, Homo sapien
acaccaaacacaaccagaaatgttctaattttctgatttctataaaagacctggctcttcaaataaacgggaagcagtaacagagaaaacgagaaaaatggggagaagagtgtagatcaggaatgataatgtcactaagttaaaggggcacaatgcctttttttttttttagttcctctgacactggattccttcacatttcaattctcaaacaagtaccatttcctcaaaagggccttccttactacctgactaaagttagcatctcccaagtctattacatcaccctatttacttcctttatagtacttattacaatctgtctagcttgtttccttgtggctcacaccctccactagaacttgagctccatagtcattctgtagcacactgagagcactctgtttgtataaatgaatcagtaagctgggcacagtggctcacgcctgtaatcccaacactttgagaagccaaggaggggggaacacttgagcccaggactttaacaccagcctgggcaacatagcgagatgcccatctctacaaaaaacttaattacctgcacgatggcatgtgcctgtggtcccagctactccagaggctgaggccggagaatcccttgagcccaggaggtcaaggctgcagtgagctatgattgcaccactgcactccagcctgggtgacagagggagaccctgtctcaaaaaaaaaaaaaaaaaaaaaaggaataaacatctacaggcagtagaccgactacagagaaaagaactactattacattgtttgggtttgcatgaagccatctatgttgttcctcaatagctccataaagcctagattataagactttgtaccacactgccaaaagggtaatgccaaattattactgcattcagaaggagaaaatttgtccttaacatggctaaaagcactcaaaattataaatacatttgctgaaagatactttaaattctcatttaaggtgtgtgggagttaaaaggtgtttaattttccctgtcagttgggtgttttacattggctaagaaccaagactgtgacaagaaatgagttctatgattgagaaactctaagattctgggggtggcctaggagtttactttgagattgaaatttattttctatggtcaactgtataattacgatgataccaccccttgctttccatctgacacttggtttgagaaactgtaggtaggaaagggaaagaagaatgtccctccttgggcctcttcttttgggcctgtgcttcctagagtcaaatgtcaagctggtatttccttggtgctaagagcaaccaccactctgaggcagagacgggatgggacctagccaaagtcccagtaaacaaactgtatcttgtaagcgcaatttaattagggtcaaactattctgtatggacttgctttttcgacttctgaggatttagtagtcatgattaagtgctgtcacgctactgcgatctacaaacagtagctccacaacatccgcccgcatcgtggcaaagaattatcaagaaatccccaagggggcggtgaggagccgccggtcggccaggtcgcccggtccctcagtctggtgaaaagctccgttgcccaccctgagggcttcgcggaaggaagttggccgtatcgctgcaccttagagatgcgacggccgaggctcccagctcaagcttctggtagtaaggcctgtgtgcctggcattcggggaggccacttttctatccccagcttccgggccaccacttgggtgcgtcgtggggatgtcggcagctacgtttgcggcacagctccggctaaactgaaaaacgaatcctcaggtttgacaaaactaaactaaaaagacacttttctcctctcactctgacgtcccaaaagtttcctttttaggggtcggggcctacggtgggcgaggagaaactcgaggtatctacccaccgcaccaaacaactcatgcgtcgcttcctttcgacttggagctggccagtatcccggcgtcctctcggccgacgctgcggtctgaggccactctggccggcagccgacgtctctatggctccgaccgaggggcggagccgctgctcgagctgctgctggattgaactcagagaagccggggtgggtatggctgagccgctgcgtgggactgaggggagggggccgggtggacgccgcggaactgcgtcctgaggtgggagaccggaggtgggggaccactgagtctgatgtctggagggtccggttgcgggtcggagggcgtgctggaacagccgccacgcg

SEQ ID NO: 33578 - DNA, 2300 bp, Homo sapien
tcaaggaataggaaggctctaggagagggtgagagatgagagtggccagtgaatacagcagccagacacacacaatatatatcaatcgacttgttactagtggaagagatctgagttaccccaagttaccagcagcctatccttgcaggtccatagcaacttcagtcctggcctcctcagagaagaaagaatttgactgacagacataaagcagaaaagagactgaagcaagttccagagtaggaatggaggtttatttaaacaggcattagaacaggaaagaaaggaaggtacgcatggaagagacccaagtgggcatgtgaaggttaaagagagaaggccagccgggtgcagtggctcacgcctataatcccagaactttgggaggctgaagcaggtggatcatgaggtcaggagttcaagaccagcctggccaagatggtgaaaccctgtctctactaaaaatacaaaaaaattagccgggtatggtggtgggcgcctgtaatcccagctactcggggagggggctgaggcagagaattgcttgaacccgggaggcggagattgcagtgagctgaaatcgcgccactgcactgcagcctgggcgacagagtgagactccgtctcaaaaaaaaaagaaaaagaaaaggagagagagagagagaaggtcaagtgccgcatttaaccatgatcttaggatgggctccctgcatgctcagagccctctttacccttgggaagtgagcacacacagtgattttatggatttatacacatgcccatctgaggctttcttcctttttccggtggagtgtatcagaaaaatcatacttcatcacttttgtctcttaaccggcatgcccaggaagttgcttctctctggggcctgcattcaattaacattttgatgttaacaggtgtgggccatcaggaaatggcctttccctggcgctgccaaattttcatttttagagaggccatgtgataattgctgaaccatcacccaacatttctagtgggtgggtggcaggggagagccctctcctgccttgctcatgcctaactacctgtaacagattcagttcgccattttataatgtatgagcatgatctgtggtcccccaaaacaattacagtagtgacatcaaagatcagtgatcacacagatcactctaacagatacaaaaataatgaaaaagtttgaaatattgtgggaattaccaaaatatgtcagagacacaaagtgagcacatgatgttggaaaaacatggcacccatacacttgctccatcaaggttgcctcaaaccttccatttgtagtaaactcagtatctgcaaagcacaataaaatgcacaataaaacaaggtatgcctctctatgctctcacaaacctctgtattttatcttagaaacactcacaactgtaataaatgattgtttattctttctttccagttaatctctagctctgatcctcacccgcaaagaactgggccaccttccctgctttatccccactatgcctaaacacacagtgagtgttccataaacacttgtttagtggcaataaatatagcagacacatttatttgccactttataaggaaaaaaggtgcagatacatagacgacctattttctgataccaaattaggaagagttctccatctttggccaagtttttttttttctaaacagctttactgaagtataatcgttttttaccttatttaaaaataagtaccactccactaaaacgcgctctgtggttagttctcggctggaccgttcaaaaggctgatccttacagcctttattattaatacaaccaggtcgggactgcttttgcgtgggtcaccagaagtaaaaaatcaaagaggagccaaccccattccgaacaaggaaacacccgtccccttcctacaccaattcctgctccgcccttcgtagggaacgcagcgagggcagcctccggagtggaggggcgggacttccggcccttcctgttgtggaggggcgggacttcctgtcttccctgttgcggagctctgaagcggctccctgagggcgctggttttgaactggtcttgtgcggtttgcgctttctcttagtggttacagttggcgctgtctccgctttcctgtttcgtggcgggcatcttggccaaaacactctccctgccaccttattcctctagggttgtgatttttttctttcaccaagaaatatcactcgctggtaatttgtcaaactgaagaaacccctgaagaagcagtcgtgggcaggcgccgacgctgcg

SEQ ID NO: 33579 - DNA, 2300 bp, Homo sapien
tgggaaagtcccagttgttagaaaaggtgctgttcatcataaaagttttaaggggaaatgaaaaggtggtgagtgcaaacaaaagcttggggcagagttggggcatctacttcagtggaacataactcattgttagttttttagcatagtttatgggtctttcctgtatgataaaaaagtccaggcaagaagtgactggtgaccacatacaataatgaatttgaaaatattaaaattgtaatttttaaattgtaatcttgtctctgcaatatatgctgagtgttaccacacagttattattttacagatgaggaaagtgaggctcagagaagctaaaccccttacttactcaaaatcacacagacagcaatagtcaagagtggaatcccaactaagctctggcagactgaatcctaaactttccgtacaccgaagagccacacgtactgctggcttccttccctgacttcattattttgcctaacatcaatagcatgaaccatttattcatgattgccctcggtgaagccattttctcattcgtttaggggaagacattgttttctttattaatgagaagagaaaacggttaacaagagtttgtgtccctaattgaaatgattcttaagatgaaaagatagaaaaacatgaaaccctgcttaaaacaaaaggctaaaatcagaatttatggagatggatcaatccaacagtaaagaaatcaatttttccttccttgtcgttacttatattcatctatcctttatttggcattaatactgtcaggcctgacaaaaacaacaatttacatattaataaaatctagaattgtgctgtgcaacgcagtagccactagccacatgtggctcttgagcccttgaaatgtgccaatcccgactaagatgtgccataagtgtaaaatatacactggatttcaactagtatctaaaaaacagagaaaatatttaatattttaaatcgcatgttaaaaaaccattttgaacataatggattaaataaatttaaattaatttcacctggtttttgttttgttttgttttgttttttgagacagagtttggctcttgttgcccaggctggagtgcaacggtacgatctcggctcactgcaacctctgcctcctgcgttcaagcgattctcctgcctcagcctccagaatagctaggattacaggcatgtgccaccacgcccggctaactttgtatttttagtagagacggggtttctccatgttggtctggctggtctcgaactcccgacctcaggtgatccgcccccctcggcctcccaaagtgctgggattacaggcgtgagccactgcgcctggccacacctgtttcttttcactcatttaatgtggcttctccaaaatgtaaaattacataagtggcttgcatttgtggctcgcattatattttcattggacagcactgatgcaagatgaaaaagagggcagagttacactgaaaggtagcacattttcttgaaatttctggaggggaaggttaacgggaagagaacgaagcttgttaaacgtaggtgtgacctactgtggtaaacacctagggtgaattaaagaggggacacatattttgattccgtttctactcccttcccccgatgctaacggagcaggtgacagtctcccagggaccactcctcagcagtccgcgggtctcggccggagccgagtcattgaacacacctgtgcgccagcgaaccctggcgcagggtccacgccccctccccccgtgtttttatttcccgggcgtcaactgtcggtctcgcacgtctctcctgagaactaccgagtaggtcgggcctgcctgtggtaagcgtccccctcacccctcatccctcatcccccccagcctggccccggaaccgagatgcccctgcccgagcctggctgcgggccggcaggtggccaagacgccactcggcgggcggcctgctgggcccggcggccggccagccgcgaactggaggatcctcgcgggcgcgtcccgggcctccgggccgcagggggccgctgtgacccgcctgcgcccctgccgcgccgaaggcggggagccgggttttgggggagaactggaaagccgagggtagccgagcggggcgggcgctctggagcggcgggtgctcgggctgccgtccgctccgccagaagcaccgagcagccgagccggggcccgccgccctcctcctccatgaggcccgagtgaggcgcggcggctatagccgacccgcggcgccttccccccgcgtcctatcgcgagcgc

SEQ ID NO: 33580 - DNA, 2300 bp, Homo sapien
gtaaagtgaaaatattggaatgtctatctcacaggatatgaggataaaataaaatgataaaataaaagctcttaaaaggtgactgacgcataataaatattagatatttttattatcatgatgcaaaatccattcgtgttatctccaagtccaccatccacacattataagaatagggcaaaagttatacagtaacaaatacagagaaggcaaaggatatcttacctaattttcctaacaagagggtgtgaagatgtcgtgacatcaccatggatgcagaatggccttatcttcacatgggaaagtcccagttgttagaaaaggtgctgttcatcataaaagttttaaggggaaatgaaaaggtggtgagtgcaaacaaaagcttggggcagagttggggcatctacttcagtggaacataactcattgttagttttttagcatagtttatgggtctttcctgtatgataaaaaagtccaggcaagaagtgactggtgaccacatacaataatgaatttgaaaatattaaaattgtaatttttaaattgtaatcttgtctctgcaatatatgctgagtgttaccacacagttattattttacagatgaggaaagtgaggctcagagaagctaaaccccttacttactcaaaatcacacagacagcaatagtcaagagtggaatcccaactaagctctggcagactgaatcctaaactttccgtacaccgaagagccacacgtactgctggcttccttccctgacttcattattttgcctaacatcaatagcatgaaccatttattcatgattgccctcggtgaagccattttctcattcgtttaggggaagacattgttttctttattaatgagaagagaaaacggttaacaagagtttgtgtccctaattgaaatgattcttaagatgaaaagatagaaaaacatgaaaccctgcttaaaacaaaaggctaaaatcagaatttatggagatggatcaatccaacagtaaagaaatcaatttttccttccttgtcgttacttatattcatctatcctttatttggcattaatactgtcaggcctgacaaaaacaacaatttacatattaataaaatctagaattgtgctgtgcaacgcagtagccactagccacatgtggctcttgagcccttgaaatgtgccaatcccgactaagatgtgccataagtgtaaaatatacactggatttcaactagtatctaaaaaacagagaaaatatttaatattttaaatcgcatgttaaaaaaccattttgaacataatggattaaataaatttaaattaatttcacctggtttttgttttgttttgttttgttttttgagacagagtttggctcttgttgcccaggctggagtgcaacggtacgatctcggctcactgcaacctctgcctcctgcgttcaagcgattctcctgcctcagcctccagaatagctaggattacaggcatgtgccaccacgcccggctaactttgtatttttagtagagacggggtttctccatgttggtctggctggtctcgaactcccgacctcaggtgatccgcccccctcggcctcccaaagtgctgggattacaggcgtgagccactgcgcctggccacacctgtttcttttcactcatttaatgtggcttctccaaaatgtaaaattacataagtggcttgcatttgtggctcgcattatattttcattggacagcactgatgcaagatgaaaaagagggcagagttacactgaaaggtagcacattttcttgaaatttctggaggggaaggttaacgggaagagaacgaagcttgttaaacgtaggtgtgacctactgtggtaaacacctagggtgaattaaagaggggacacatattttgattccgtttctactcccttcccccgatgctaacggagcaggtgacagtctcccagggaccactcctcagcagtccgcgggtctcggccggagccgagtcattgaacacacctgtgcgccagcgaaccctggcgcagggtccacgccccctccccccgtgtttttatttcccgggcgtcaactgtcggtctcgcacgtctctcctgagaactaccgagtaggtcgggcctgcctgtggtaagcgtccccctcacccctcatccctcatcccccccagcctggccccggaaccgagatgcccctgcccgagcctggctgcgggccggcaggtggccaagacgccactcggcgggcggcctgctgggcccggcggccggccagccgcgaactg

SEQ ID NO: 33581 - DNA, 2300 bp, Homo sapien
ctgcggaaggccgcagggtcctctgcctaggaaaaccagagacctttgttcacttgtttatctgctgaccttccctccactattgtcctatgaccctgccaaatccccctctgcgagaaacacccaagaataatcaataaaaataaataaataaataaataaataaaataataaataaataaaaagaaacatagaaaagctaccactcacccactttatgggaatgatcttctgtcttcctgtggagtctgaagagtcatgggcaagttcttatcaggtctaaagctccactctcctttgcattgcattacctggtctctttggctttgggggttcaaggaattactttgacctattagagaatttgaccttgtgtatgcaatggctggtgggtcactggtgagggctgcagttttggaggtagctgacagtggttgcaattaatagttattactgtatgtaggctacttgttgctttgctctattctataaaaaagacatagttgaatacatggagactgtgggaatactcaccaccaaggaataactatcccatggtggatgggctgatcacagaatgggctgattgatatgggtctcccacccactaatacctgacacacaatctgtcactctcactaatgcctcacacacccccaccagcctcagggtgacatctttgtagtgaggtgtactctggaaacactgtgcagcccagtcctttggtgtttccctcttttgtgggggacccagggttcagtgtaaaagtagaatccttgatttttaaaaatctagatgctctgtcttccagctgtgcctactttttacatatacaaatattaggccctaaaaactgcaaatgctttgtttgccctgttccttaatgggctctgcccagaactcagtggtctaagtagaaaacagatactaaattagaagccacctatatgactagattggtctccaaaatatgactttctgacatttaggtgtttgtttttgtttttggtagggttttctgtattttttgtttcgttttgtttttgtttttgttttttgagacagtgtattaggccattcttgagttactataaagaaattcctgagactgggtaatttataagaggtttagttggttcacagtgctgcaggctgtacaagaggcatagtgccagcatttgcttctggagagtccttaggaagcttacaatcatggtgaaaggaaaagggggaggaggcacatctcacagcaaaagcaggaataagagaaagagagtatggggggaggtgccacatactttaaaatgaccagatcttgcaaaaactcacttggcaccaaggggacagccctagccattcatgagggacctgcccccatgatccaaatacctcccaccagttattacatttcaacatgagatttgggtggggacaaatatccaaaccatatcagactgggtcttaatctgttgtccaggctggaatgcagtcacacaatcacagctcactgcagcctcaacttcctgggctcaagcaatgtcctcatcctcctacctcagcctctcaagtagctgctattacaggcacacgccaccatgcctggctaattttgttgcttttgtagagacaaagttatataccatgttgcccgggcttagctagttatttttaaaaggcttctgaatttcctctctgctcatttgtatctttcattgtaacatcctatgtgaatttctataattttgtgtcacattggtgtgtttgtctgttttgtgttgctataaaggaatacctgaggcttggtgatttataaagaaaagtttatttggctcactattctgcaggctgtacaagaagcatgatgccagcatctgcttctggtgacaacctcaagaagtttacaattggccgcgtgcggtggctcatgcctgtaatgccagcacttcgggaggcggagacagatggatcatttgaggtcaggagttcgagaccaggctggccaacatggtgaaaccccatctctactaaaaatacaaaaattagctgggcatggtggcatgtgtctggaatccctgctactcaggaggctgaggcaagaggatcacttggaacttgggaggcagaggttgctgtgagctgagatcacaccactgtactccagcctgggcaacagagtgatactctatctcaaaaaaaaaagaaagaaagaaagaaaagaaaaagaagcttacaatcatggtggaaggcgaagaggaggagcaggcatatcacatggccaaaaagggagcaagagaaaggtg

SEQ ID NO: 33582 - DNA, 2300 bp, Homo sapien
ctgggagaagagggctaagattaaggttagtgatggttcccttaaaacctgtcgagtgtctgcattgttagacacactgaaatctaagaatcccatctctctggggctgttcactttactaataattatttataaaagggaagctgagacaataaattgccaataaccatgtaacataataaccacaatgaaaagacattaaagctaccttttctgtagcctgattttacctagatggtgggttttggtaacaagccatcactagaggtcagtttttgattacatgtcttctcaggttcagcctatgttttgatttttggctactgggcacctctctggtttttaggctttaaagcagatccaaatgttatattatagtcttgtaaatgtttcatcctttttgcttctgatagattagaactctaattattaaaaactatttttaagcatttgtgactacaaaaactcctaaacttcaaatggtttaaattttgatgtttattttaattttaaaatattttaaaaattattcaataatagaacaatctgtaatgaaaacttacacatatgtgagaggtactattttaagatgagagtttgcaggtcaaattagtcagggaggaaagagtagaagtcagagtgggaaaggcccttaaaacttaatagggaatatcaaatctctacaaaaattttattcaagacagtgtctaagacttagaagcaactaacttaaaagcaaacttttggaacttaatcctattttcattggggactccgtttatgaataatatgctgtaattatacgtagaagcttaaggactgaaacagagcattccaaatgacaaatgttttctcctgaagaaatggcacccaaattatgttgtacaagtaagcggaataaaataatcatatgcttgttattaaaattatcatatgcctaacattcatgattttcaaaagtgaaaaacagtatgttatctttgagtttgttttcatgtgatataaatttataagcaagtcaaaattaaataatgtactgagcattaatttaagccaggatttttcagcctcagcactattgacatttggggctggataatgcttcgtcgtgaggggctgtgtagtgtgaggtgttcagtaatatccctggccccaacccattagataggtcccctctccaattgtgacaaccaaaatgtctctagacattgccaaatatccctcggaactaaattgtccccagttgggaaccacgaattattaatccctaaaagacaaagcagcaactcctgacccctacaaaaagttttaaatcaataacttagtttaaaatccttactaagtgggatcattactaatctcacttcattgtaccttcagtatctggaaaccgtccctatggtcacacttaccacggctcattattattttaaaacatggggctgtgtcatttcctgtctgtgagtttggactgcagtgggaatccattagttgaatgaccttctgtgtaggttaatcacaagacaagttctcaaactaagggtttccctgcggctcatttctttttaaagttatggaatacctgttctgcttataccttttagattcataattatttttcttgtatcaaaatttcaattaatagaaataaatgacgttactgacacttcatgatgattaagttttgggcaagtgaaccattttacactctattttttattcctcccacttttagtcagaatacacctgcagaataagtaacagaactgtgtgaaaagaacgactaggtcattacggttaatagttttagaaaaacagccgaggcctggtctggaaagctcacaacctccacccagatgctttccagcctcggggatattcgtactagcagtgacactagccagcttcctctaggctggctctgatgttggaagacaagcacgcagatgtgtgttacttttcaagcctggacatcgtttctgaggaatttaactccacctctcctgccagaatggaaaatcaacgccccccattcccgcccttcaccaacccctctccgcctgcccctttcccttgggtcctctctgttacagaagttctgatttttcctagcgagctggaggaaaggcaggtacccggagtggagttatattacctgtttctttgttctgatgggaccccagagaggacatcacgctttgtaactggttcttcaaggggagaagcaaatgtgtccctgaaaacttcagctgccgcgtttggcaccaggtttgattgacaaggactggcggagggaaagc

SEQ ID NO: 33583 - DNA, 2300 bp, Homo sapien
gtttaaattttgatgtttattttaattttaaaatattttaaaaattattcaataatagaacaatctgtaatgaaaacttacacatatgtgagaggtactattttaagatgagagtttgcaggtcaaattagtcagggaggaaagagtagaagtcagagtgggaaaggcccttaaaacttaatagggaatatcaaatctctacaaaaattttattcaagacagtgtctaagacttagaagcaactaacttaaaagcaaacttttggaacttaatcctattttcattggggactccgtttatgaataatatgctgtaattatacgtagaagcttaaggactgaaacagagcattccaaatgacaaatgttttctcctgaagaaatggcacccaaattatgttgtacaagtaagcggaataaaataatcatatgcttgttattaaaattatcatatgcctaacattcatgattttcaaaagtgaaaaacagtatgttatctttgagtttgttttcatgtgatataaatttataagcaagtcaaaattaaataatgtactgagcattaatttaagccaggatttttcagcctcagcactattgacatttggggctggataatgcttcgtcgtgaggggctgtgtagtgtgaggtgttcagtaatatccctggccccaacccattagataggtcccctctccaattgtgacaaccaaaatgtctctagacattgccaaatatccctcggaactaaattgtccccagttgggaaccacgaattattaatccctaaaagacaaagcagcaactcctgacccctacaaaaagttttaaatcaataacttagtttaaaatccttactaagtgggatcattactaatctcacttcattgtaccttcagtatctggaaaccgtccctatggtcacacttaccacggctcattattattttaaaacatggggctgtgtcatttcctgtctgtgagtttggactgcagtgggaatccattagttgaatgaccttctgtgtaggttaatcacaagacaagttctcaaactaagggtttccctgcggctcatttctttttaaagttatggaatacctgttctgcttataccttttagattcataattatttttcttgtatcaaaatttcaattaatagaaataaatgacgttactgacacttcatgatgattaagttttgggcaagtgaaccattttacactctattttttattcctcccacttttagtcagaatacacctgcagaataagtaacagaactgtgtgaaaagaacgactaggtcattacggttaatagttttagaaaaacagccgaggcctggtctggaaagctcacaacctccacccagatgctttccagcctcggggatattcgtactagcagtgacactagccagcttcctctaggctggctctgatgttggaagacaagcacgcagatgtgtgttacttttcaagcctggacatcgtttctgaggaatttaactccacctctcctgccagaatggaaaatcaacgccccccattcccgcccttcaccaacccctctccgcctgcccctttcccttgggtcctctctgttacagaagttctgatttttcctagcgagctggaggaaaggcaggtacccggagtggagttatattacctgtttctttgttctgatgggaccccagagaggacatcacgctttgtaactggttcttcaaggggagaagcaaatgtgtccctgaaaacttcagctgccgcgtttggcaccaggtttgattgacaaggactggcggagggaaagcgcggaggctgggctgggggccgcaggccgaggcagagacaaagaggtttcgcctgtccccgagagtggaagggcccctgggggtaactagcctttgagctcaaaggggcatttcgtgaggtcgccttttggttcggagagcgcgcggcgatcgggtggagggggcctggcgggaagaaagctggggcggggaaggggcgcgggccgaggtgggagcggagctgcagtcacgtggccgcccgccgccgcggagttggggctgttcttccgggttggaggcgcagcgccgcggggcccaagcccgggtctgccagcgcgacgtcctctcgcggccctcagggcacagcccaaggctgtcagcctcccggcccaggtgagcgcgacggcactggcgggtgcgggcagccggggcgcgcgcctagggcgcagctgggaaaggggctcgggcctttcctgaagaccacggccctcgccgggagagag

SEQ ID NO: 33584 - DNA, 2300 bp, Homo sapien
ttagatattaaaatccttgagggaaagcacccaacctaaagagggaggataccacagatatttaagagagtcagctctggatctgcggattggaagccccactctgcaacttattggctgtgtgaccttgggaagtcacttaacttccctgtacttaatttcctcatctttaaaatggggaataatagcacccacccagggtggtggctcacgcctataatgccatctctttgggaggctagtggggaggactgcttgaggccaagaattcaagactagcctggccaacacagtgagacccccattgctaaaaaaaaaaaattaattagcagggcatggtggtgcaagcctgaagtcccagctacttgggagtctgaggtgggagaatcacttgagcccaggagttccaggctgcagtaagccgtgattgtgccactgtactccagcttggacaacagagcgagacttgaaaaaataaaataacagcacctacctctcagggttgttgccaggactgagaatatccttatcagctgttatattcactttggtattactctcccccagtgctttgcacaacacagaggaagtcagtatttttgactgaatgaatagggctaggtgaccttaagcctaagtacctattgagcacattttccaaggattttcggaaaatttcctttgaaaaggaaatgtttgtgtagccttgtggaaaactgattctatcaccaaggtaagcagcctaagcgcacctgctggaaagaaggcaatcctaaactgtctgttaataaaaagtcaaggtttacaaataaaaggggtgcaatgaagaaaaggggcacactttaaataagaagagtaggtaggcacctaagccccacgcgcttctccgaataagtctgtcctacaagactcctgacaaacagaccacctaaggactggccggcgccacagggtgaataaaggacaccggcaaccataaacaagtcacgcttttaaaagcgagacataccagcaaggacacaataccctactgagccagcttcggctggcaggcgccgtgacctcacccaaagccactggtgtcacggctactgccaccggtgccgtcccttgctcggcaactaactgccacccgctggcatctgcacgagaccgctatttataacctccctaggaagccgattggccacggctgcaaatagtcattccggctgttgagtttgaactagctctgcccaggtcgccctctccgctgtctcttcctcctcaccagcctaggccccagaaacttgtacccaccaccgccagaccgccccaactcacactcacaatttgtgctcgcaatctcctatgtccccagccggacaccctctccgaactccctcaagggtcaagcatacctcaagggcatccagctgccacctctctggatgaaccgcccatcgaaagtcctctatgacctccctctccaccacccccgatcttgagggccgaaatgaccccgtacgactctcgctgtcccccaaagctgcaaatatctgcacctgcacagctgccgcctcattccctgccctcttcggggacccagttcccaaatccaccagcccactcccttcgacatcgccccagcaggagacgagaaagggacaccaagaggcacggtgcttcttccccacctaagcctgcggcctgcggacaccccaatgcaccctgcgcccgggacaccgccgaccccgccccgctttgctctttgacaggtctctctcccggcgagggccgtggtcttcaggaaaggcccgagcccctttcccagctgcgccctaggcgcgcgccccggctgcccgcacccgccagtgccgtcgcgctcacctgggccgggaggctgacagccttgggctgtgccctgagggccgcgagaggacgtcgcgctggcagacccgggcttgggccccgcggcgctgcgcctccaacccggaagaacagccccaactccgcggcggcgggcggccacgtgactgcagctccgctcccacctcggcccgcgccccttccccgccccagctttcttcccgccaggccccctccacccgatcgccgcgcgctctccgaaccaaaaggcgacctcacgaaatgcccctttgagctcaaaggctagttacccccaggggcccttccactctcggggacaggcgaaacctctttgtctctgcctcggcctgcggcccccagcccagcctccgcgctttccctccgccagtccttgtcaatcaaacctggtgccaaacgcggcagctgaagtt

SEQ ID NO: 33585 - DNA, 2300 bp, Homo sapien
atacaagtaagatagtctctgcccaccagttgctcttacatcattggaagatatgacacgaaatcaaataagtataaaatgaaatgcagttaaaaaaccctgtatgctcagtgagagtattcagtgaaggcttttatgataggtttggctttcttctttctctgcaatttttatatttagtgtattgaaacacacagtagtttttagttgtctatgtgacagtctggcatcttatatcaatgtatgatgctgttttatgcagcgctatttactgttattcactgttactcatgttctttcagtgtgtaatccgtagacaaggtttatatttaagttaaaaaaattatctacagtaactaacacaaagttagacacatagcaattgcttatgaaatacttactggctccttgattgagaaacacctaatttatagtgtaaaaatgatacttatttttgtgtgatcatggcagttaggtcatgattttaacacagaaattttagaacactgaaaagtaaattaaaatctcatctttatattcacactcatggtctaattttattctggcttattgcactggtttttgttttaaacaaaagaaaaataattttgatatttttaatctaataaagcagaataggttgatgaagtctcaaaataaaagatatacaaatgtgattgggtgaggtggctcatgactgtaatcccagcactttgggaggccgaggtgggtggatcacctgaggtcaggagtttgtgactagcctggccagcatggtgaaaccccgtctctactaaaaatacaaaaataagccgggtgtggtagtctgcgcctgtattcccagctgctcgggagactgaggcaggagaatcgcttgaacctgggaggcggaggttgcagtgagccgagatcatgctattgcactccagcctgggtgacaaagcaagactctgtctcaaaaaaaaagaaagaaaaaaagatatacaaatctaaaactttaagaattgttgtttttgggaagcagtgactatgatatttaaaggatttattggttctatgagaatgtctgactaagacaaagtattttttgaatttattttattgcttttggcttaaatgagtaatacatgaatatgctctcattgtaacaaacaaaaaaaggtaaaaacatgtgaaataaaaagcaaaaagctttttcctttcatgtgtttagtaatttcgagttgtatcacggacattgttaatgatacattatagacattttggatgttatgttatattccttcaaagggtattgattattattatttatttatgtgtttttgtagccagctaacttggctaaactcaaattccaaattttgactcccttatggtgggtggtggggggcagctgaaatctattgttattttatccttaacaggattgcttggagtctgtctcacatatgtgtagttcaagagtcatccagagatttgagtagaatttataaacagaaactgggactccttccctctagcctgcttctttgtgggattccccttattactttccagctgccttagtcatctcaaatgctatcttcaggatcttcaagtcagtaagactgtgggcttatattttataatttccttaactggtaccaacaggggattgccctcagtctaaagccataaaaactgggaaattcacttagtgtcattgtatttttccaaatgtagacgcttctccagtttctgcctgcttttcatcactgaaaagtgtttttttaaaatgtagggatttttttttaggggggtgggtggctcagtgtttatagttgttatacctgtggaagtgttggtcagatgggagacacttattaccggaagtggaacttatatgtaaatatattaatgggaaaactagaataattaaggagcaaaatgttaaatgtcagaggttttatttttatgttattaattttgagttctgatttgattgttgttctagggtgtgactttgacagctgctattgggggtgctgacatgcccgtcgttatcactgtgctgaacagctactcaggctgggccctgtgtgcagagggcttcctgctcaacaacaatctgctgaccatcgtgggtgcactcataggctcgtctggtgctatcctgtcatacatcatgtgtgtggtaagaaacaacacatacatgaaacaaaaggaaatggcttcctgaaaacatggatgtgcatgtcatttcttttattacccataaaaatgaatattgtaggctgggcatggtagctcacacctgtaat

SEQ ID NO: 33586 - DNA, 2300 bp, Homo sapien
aaataattgtcatcattatgacattatttcagctactttctttgaatcagataatgtggtacttaatatctttagtatgaaacataaaatgaaacactttaaaagcacctctacacgtatttttattacttataaacatattgtgaattttagtaaatagaaccagtggctgaggagaaacagaagttaatgttgaatgtgtgtgcatccccacagaagaaaactaaattcttaattcttgtaaatttgtattcaaaaataaaatgctaaattctggtcaactgtcattcccattagtacctggtactttctaaaccaaggaatcttgaaatgtttgactgacgtatttaagttaactgacaagacaatctatgcttagaattcctgaacaactaacacaaaaatgtcccctttaaaggtgacttggaatttaccattgagataatgccaaatggtcactaaagatgtttaaacatcattgtctactgtcttcagtgtgccattacagagccttgggttcctttcacataacaatcaatagtggatgaataagtctcaccacttgaaagtatctgagaaaggaagtcaacagagtaatctgggtttgctgggttgattcaagaagagacacaatatccacccctcttcttctagttctcttcccccaaccagcccacacccctgcaagaaagaaagaagggaaagagagaaagaaggaaagagagagggaaaaggcaagaccaaaatgtagggatcccaggcataatttacgctgaggagaaaatgtcacactgtgggataaaatatagccatggaaacagacttatgacttttactttgaaaataaaagaatgacaatgaaatttgtgtgaggtctgtgtgaatccagtcccagatgtttacaatgctgtagtagtatggctctgcaatatgagaggtttcagaagaaacagtacaacaggacaccacaaagcagtgcatacgctattgacaatgcagacatgagcatcatgttaccaagagggaaggcaggcagaagacaaatagcagcggtggtgcctgaaaagctaacttcatggactgcaatcactcaaactaacataagggacccaaaacaaaacaaaacaaaacaaaaatcaaaaccagaaaaatgcttttcgctcatatctagaggtagtggggtaaagggatgggggtggggagagagtggaattgacttttctttcttaaataaagttcccacaaagcccctataattgacagcggataattattttcagcttgaggagcctgtcccaaaactcttaacaagattgccagggaaaagaaacaaaatgtgtttacttgagccatttccagaaggaaggaaaaattgctctttggatgaggtgggaaaggcggtggagagagaaaggggcatctttgcactgcaacaactctcttgagcgccctgcgtggtccggctagtgacaggctggagggaaggggtgggtagagcggcaaggggtgggggatgtgaagggagcgcgcttaggggaggggatgcggcagcacaatgtatacacgggggttggggggtgaattagtgtgaaagtattccacttaatcattttacaggggttggggacgtaaatatttagctggccacatctggaacagatttttcccccccgtgtgggctgggggtggataattggaaggaggggagcatgcatttgttacttactgtacgggcagttctccttcttggtcccgctgaccttcccgttcttctcaatcttgagaaagtacttggtgaaagagaatagctttctccagcggacatctccttgaaggtgattgtagctccgcacatgccttcccgcgctggaaggagaggagaaggaggaggaagaagagttggtggcctctggtgacaccatgtcctgaccaagggcttggcaggtgacagggacggaagacaccaagaacagcaacaaaaagcagcagcagcagcagccgggcaggtggggaaaggctgaggcacaatgtgtcagtatccatttccacattgtactgaaactctcggcactggaaattgtctcatcagaaggaacatactggaagggtaagacccgatgcaaggcaaggagagagctcgaggtggtggctgctggttagctccctctgggcgcggatctggccagaagtgaatgcaccaacatccataactcctcggaaaagccggctgactcccctcgctcctttctcggatccgctgcctacgcctctggagcctcccggtaaatggtggacgtggg

SEQ ID NO: 33587 - DNA, 2300 bp, Homo sapien
cttcaacaaaacacaaatgtctaactgtcctatgtgacatagatagttcattccagtacatgtttaggcattccttctagttaaacgttccctagtttagagtcattcttaaagaagtggtcctctaggagctgtttcttattcagattggaatggattatcacagtatttccttttttgtgcctcttaactcttggcaaaggtttcttagccttggacttagttctgtcaatacctgggctgtgagctagtttctgcgagcaagggaggagttggggtggcctgaaagagtgtgaaaaggagaggaggactagtagtgcagtgatattgtaaaacagagccctttaaacattaaatgtgaagatagaaaaaaaaaaaacctcccctttatgacaaagtgcaaaggaaattgcataaaaaagaaaacagacagcaggctattcagccaaattatatggtaaaatctttgcgatcgccataaagtgcgtttgctttgaagtgcacgcatgattcagtgaagggctcatgttagcaattagaaatcggttatttgggtccctgatttcatttgcgccgagagaggcaacttttaagggtgacgataaatctccctgagcttaaaaggcagagagggccaaagtgtgaactttttacttcagcaacggaagcgagaaatcagtgattcattaaagaggagacctccttggaagctggcagcagaggaggaaaggacactaattatgtcttccttttctgtgctcgttctgaccagtttataacctgctgctttggacggtttaaaatcctcagcatcttctgctttctcccagccctctcctcttctgggagtgagaagggaggaaaagtcagccaagcaccaggctccaggtggctctcaagtacttcactgccaaaagaaatgggggtggggggaggagatcctacgctggaaagcaagtgagaaaggggctccccagaagggattggttcaggctggaagacagcaaaattcggaaagcgggaagataccgtcagcgccgtggcccgcgctgcaagcataggacgctttagcagcgaattagacagagctagaggcgccggcggaggctgcggccgcaacagccgcggcgaggaagggacctggcagcccccgagctcggtgcaaaggcatcgcgctctctcctcgctcccctgctcccccacccccttctctgcccctttcaccctccctctccctggcgttcccagcagcctagggtttcagatgtcccaccgccggttgaccccctcccccctcttctccacccctgcaaatgaggtttgaccagcagaggcagagcccacctctggcttagaatcactgacatttagactccaggcttcaacctgtttacaagcggactttccaaaggaagggggtgggagatagggccatacaaaacaccagccgccgtcccccaaaacaaaaagtgactttcggcagccttcaaatcggcaggcaccactaaaaacagaaaggaagagagggaagaaaacaacggcgactgggcagctgcctccacttctgacaactccaaagggatatacttgtagaagtggctcgcaggctggggctccgcagagagagaccagaaggtgccaaccgcagaggggtgcagatatctccccctattccccaccccacctcccttgggttttgttcaccgtgctgtcatctgtttttcagacctttttggcatctaacatggtgaagaaaggagtaaagaagagaacaaagtaactcctgggggagcgaagagcgctggtgaccaacaccaccaacgccaccaccagctcctgctgctgcggccacccacgtccaccatttaccgggaggctccagaggcgtaggcagcggatccgagaaaggagcgaggggagtcagccggcttttccgaggagttatggatgttggtgcattcacttctggccagatccgcgcccagagggagctaaccagcagccaccacctcgagctctctccttgccttgcatcgggtcttacccttccagtatgttccttctgatgagacaatttccagtgccgagagtttcagtacaatgtggaaatggatactgacacattgtgcctcagcctttccccacctgcccggctgctgctgctgctgctttttgttgctgttcttggtgtcttccgtccctgtcacctgccaagcccttggtcaggacatggtgtcaccagaggccaccaactcttcttcctcctccttctcctctccttccagcgcgggaaggcatgt

SEQ ID NO: 33588 - DNA, 2300 bp, Homo sapien
tttcctactacgttccccacccatcattcctttcaaccacactggccaatgacctaattcttgaacccatcaggcatgtttccatctcagggccctgtactagctgcactttctagaataccattcactgatactggtatggttcactcctcacttccttcaaacctttgctagaagaatgtaatcctttcaataagcattgcaaacaacactcctcacctgcccccacccccaccaaatacattgcactgatgatcttcacttctccagctgtttttttcccccgtgtgcttatccccttctaacacatcatataatttactactatgattatattttattgtctgtctccctgttagagtgcaaacttttgtttgctttgttcattaagtatcctgagcacttagaacacagcctaacatataaaaggcaatcaataaaattcatcaagtaaaactgactgagaggccagcagcctggattccagtcccaatactgcccctaccatgctatataactttggctttatgtctgtttccttgtgtgtaatataaaagctttggatcatattagatagcctactttccatggctctgactcagtcctttctcatccgtaggctgttttgttcattgccagtcttactccacctttcctctggcccagactgctccacccttgattaagtatactctctttcccacagcctccttccttggttcataatgttgatgatcagtaagtattgaataaattgaagttattttgattcactcacaaaaaaccataaaggcactttctgacaggattatgtcttttggtgttaattggtctctagctctaatttctaatcctaaaatctatgctgtaatactataagaatttaaaaaatatcaacctaggatttctatgatacattctcaaacagcgtatttattacttatttacacaaaaaactgtcacttcaacttagataaaattgagcacctcactttttaaatattgaatatcggtttaaagatctcaagtttttatatcctccttttgttaacaatgtagaaaggatattttagattccactagcaacttctcacagaagatattattaatgaaactgaagtattgcattttatttctaaaggtcagtttaatagacttgcaatttcaaagtttaaccgtaccatctgttttaacttaaaaatatagttataaattctttttagcaacatttgtgttttaataccctgaagaattattacaataaatccaaattaatattctggtccctaattacagaagagtgaatcaataaattagattacccgaaatgagactttggtgacttcttagcagatatttagtgagcacccattatgcacaagtattgatttgttgctgaagattaaaaattaaatcagtccctttttaagaggctcacagattagtaagaactcgtgtttaatttataatgggttttaatacaaggcaaaatttaaacacacttctttgatagttttatttcccttttctttctgtcttccccagttaaatccaagtaaaaatacacccccctttcaaaataaatatcattaaacaaattgtctgtatttagcacagataaatatatggaattattttcccaaagatgaatagtaggtcacgagtgatgcttgcataatttttaaatataatcaaatatactgaaaaacatgctagtactgtatttccaaaagtaagtttctattcctagaactaaaacagaaaagaagtgttgtgagatacataaatgaagccaataaatttaaccaagggcttaccattttcctgcaggatgtttataaatagttcctggcaaaggaggttgccgtatagggtcctacaagtaacctaggtggcagcatctcctcccagcgtcaggtctaagcacacaagttcttccttccatctacaaacgcaggaaaccacgactggagaagttatatgattggctaaaccatgaatgacgcaacataacccacgcccactgagaatcgtcctttcccagactggctcagattccgctttccgattggtccctacagcaagagggcaaggacaattgcttaagttgacctctgggtccggaatcgcgggcaaagatggcggcggccaggtgttggaggcctttgctacgcggtccgaggctttcattgcacaccgcggctaatgccgccgccacggctacagaaacgacctgccaagacgtcgcggcgacccccgtcgcgcggtacccgccgattgtggcctccatgacagccgac

SEQ ID NO: 33589 - DNA, 2300 bp, Homo sapien
tctcaaacagcgtatttattacttatttacacaaaaaactgtcacttcaacttagataaaattgagcacctcactttttaaatattgaatatcggtttaaagatctcaagtttttatatcctccttttgttaacaatgtagaaaggatattttagattccactagcaacttctcacagaagatattattaatgaaactgaagtattgcattttatttctaaaggtcagtttaatagacttgcaatttcaaagtttaaccgtaccatctgttttaacttaaaaatatagttataaattctttttagcaacatttgtgttttaataccctgaagaattattacaataaatccaaattaatattctggtccctaattacagaagagtgaatcaataaattagattacccgaaatgagactttggtgacttcttagcagatatttagtgagcacccattatgcacaagtattgatttgttgctgaagattaaaaattaaatcagtccctttttaagaggctcacagattagtaagaactcgtgtttaatttataatgggttttaatacaaggcaaaatttaaacacacttctttgatagttttatttcccttttctttctgtcttccccagttaaatccaagtaaaaatacacccccctttcaaaataaatatcattaaacaaattgtctgtatttagcacagataaatatatggaattattttcccaaagatgaatagtaggtcacgagtgatgcttgcataatttttaaatataatcaaatatactgaaaaacatgctagtactgtatttccaaaagtaagtttctattcctagaactaaaacagaaaagaagtgttgtgagatacataaatgaagccaataaatttaaccaagggcttaccattttcctgcaggatgtttataaatagttcctggcaaaggaggttgccgtatagggtcctacaagtaacctaggtggcagcatctcctcccagcgtcaggtctaagcacacaagttcttccttccatctacaaacgcaggaaaccacgactggagaagttatatgattggctaaaccatgaatgacgcaacataacccacgcccactgagaatcgtcctttcccagactggctcagattccgctttccgattggtccctacagcaagagggcaaggacaattgcttaagttgacctctgggtccggaatcgcgggcaaagatggcggcggccaggtgttggaggcctttgctacgcggtccgaggctttcattgcacaccgcggctaatgccgccgccacggctacagaaacgacctgccaagacgtcgcggcgacccccgtcgcgcggtacccgccgattgtggcctccatgacagccgacagcaaagctgcacggctgcggcggatcgagcgctggcaggcgacggtgcacgctgcggagtcggtagacgagaagctgcgaatcctcaccaagatgcagtttatgaagtacatggtttacccgcagaccttcgcgctgaatgccgaccgctggtaccagtacttcaccaagaccgtgttcctgtcgggtctgccgccgcccccagcggagcccgagcccgagcccgaacccgaacctgaacctgcgctggacctcgcggcgctgcgtgcggtcgcctgcgactgcctgctgcaggagcacttctacctgcggcgcaggcggcgcgtgcaccgttacgaggagagcgaggtcatatctttgcccttcctggatcagctggtgtcaaccctcgtgggcctcctcagcccacacaacccggccctggccgctgccgccctcggtgagccttggattccgccccagggcggaagggagagatggggattgtactgggttactctgccgcagatttacccctcgtcatttctttctctctgcttcgttcatgttttcctagtcctttcgttcctatctggggtggcctggttttgtaacagtcactgcgttaggaatctagagactaggtgtgtgtggctgcgctaacacctaccagctcttcaactctgaaagcctgagctctccaggattccagtcctggattctactttgtgagtgttcagccaaatggaagagcagtggtgatgaagagaaacgccacttaagagagtggggcgggccaggtttcctgttggctgttccaccacaaagctgtgtgaccatgtgtcacatggctgagtagtaacttctttttaccttaattttaaatttagtatgtcttttctttttctttagtaacttttttgcttaatttttcgcgtt

SEQ ID NO: 33590 - DNA, 2300 bp, Homo sapien
aggagcaattttgtgaagcaaaagatgcagacaaattttaaggaagccacaagaggctagggaagaaaaatgcccaaggaaatgtcaataaaacaaatgtatttaatctctgaatggttatttaaatggaacttttcttctactttgaagcttaataacagtttattgttttaaaaaatctatcttgattatgcataatgacagggtatatatctttgttcaatttccctcactaggctctggaggttaaatcacccccatattctttacaatagtatttcttggttcaattcccctttccccacaaacagggacattcatagtgccatgtgtgtaagaggtacccatgaaatatgtgctactgatctgaagtctgacttagctttattatcctggcagcaactgtatatgccatgaaatggacagagaggagaagtagcaaacaaactcccagataataaaagacttcataattaggcactgaatagttgagaaatatttgaaattaaatatagttgcctacaaatattaagctaattagtcatgtatttttataacatccacaattgttaaccacaggctgaaacaagtgctctatgttatcatcttttcattttaagaagattaatctttcctttttcttccttttttttttcttcagcacaataaagtcttcatataagatgggggtaataatagaacctactttttggtgtaattttgaaaatcaagtgagatgatccactaaaagtgcgtaccatgttgacagcaatgtcagcgtattttgtggtaggttgttcatattggatccttatctttaccaggcactggcctaagtgccttacctaaattatctctttttatcttgacccgcttattttggatagggttcatggtcacagagctaattaatgttaatgacaatatttgatcctatgttgtctcattttagtttcttaattcttaataccatagtgcttctcagtttggatatctgtgacttgttctactttctctttgtaagcagcaagctcagctctgctgtgttttataacagtgttttataacatgattttcagatgtagaaaacacttagatccttcgagttacttgagtgaagtccttcagcaataaatcatcaatgcaaatatctcacattaatgttaaaatttgatatggtttggctctgcatccccacccaaatctcaccttaaattgtaatccccatgtgtcaagggagggacctggtgggaggtgatttgatcatgggggtgatttcccccatgctgttcttgtaatagtgagtgagttctcatgacagctgatggtttaaacatgtttggcaataccccctctcccttttgccaccttgtgaagaaggtgcttgcttcccctttgcgttctgccatgactgtgagtttccagaggtctccccagccatgtggaactgtgagtcagttaaacctctttcctttataaatttcctagtctcaagtagatctttatagcagtgtgaaaatggactagtacagaaaatttatgctgggagtttggggcactgctaagaaaatatctgaaaatgtagaagtgactttagaactgggtaacgggtagagattggaacagtttgaaggactcagaagaagacagaaaaatgtgggaaagtttggaacttcctagagacttgttgaatggttttgaccaaaatgctgatagtgatatgaacaataaagtctagactgaggtggtctcagatggagatgaggaacttactgggaactggagcgaatgtcactcttgatatactttagcaaagagactggcagcattttgcccctgctctagagatctgtggaactttgaacatgagagagatgatttagggtatctggcagaagaaatttctaagcattgcattcaaggtgtgacctggttgtttctaaaagcatatggtcacatgcatttacaaagatgatctgaaattggaacttatatctagaagggaagtggagcataaaagtttggaaaatttgcagcagaccatgtggtataacataaaaacccattttctggggagaaattcaatctggctgcagaaatttgcataagtaatgaggagctgaatggaaaccaccaagacaatggggaatatgtctccaggacatttcagagaccttcagatagcccctctcataacaggcttgggggtctaggagggaaaaatggtttcctgggccagggacaggcccagggccctgctgctctttgcagcttcgggacattgtgccctgtaccccagc

SEQ ID NO: 33591 - DNA, 2300 bp, Homo sapien
caacagtattcctgacatgccatcatatgtcaccagcatattgatgattacattacatcgactagcagttaattacttccacaccagttgggatttgtttgaaattaaacataacaactcattttggtattataggtattatatccacaaaaggcataacaggcagcaaggatccactttagagtttctgcttttgtttttgttttctgtcctcaagtctatctgcaggccctgtcccacataatgtgtgatctctgtatgttcttaaatgtattgccagtgccagagatactgaagacctccactttaagtcatgctcttaacttgggttatttaccgcagccagttgttaggaatctttcaattgtgttccagtcatactccacatgtgtgggatgcattaggcacaaatgattactaagggagttctttgagaagaagcaggtgctcacagatcatgtaaagagttaagaaaacagacagacaatgctcatagacgttcaactttacccctgctttctgtcaccatgtctgtactattttcaacacattaaaaatgacaaacctcctatctaagggctacgttagtcaccacatgccttaaagtttactaaccatttagttacaatatacatagagcaaaatgtgtgttcccaaacagacgtgatgctgtattgaatttatttctttaaattaataccatagtaaattaccagctacagtgaagacacagacaacacttaactccaaatcaagctgtggtttacaaataattatttaaataataatagcaataatattaaataaaagtgaaaacctcacttctagacttaagtcagagatccaagtcagccttataggaattataagataggcaattaatgaattgttatgcttttctagaaacgagaaatactgtaagcctttctctacaatgactgatttgaacctatttttttttccccagaagcatgcagggactattttcagatgcttgattatggcaagaagaaagaaaagtaacgatttttggtgtaatacaagcaatttgtagattcgagcatacaattttgcataaaacattgcaggttaaaataatattgtaggtttcaagccattgcattacaattgaataattctcacaatcaggttttgtaaaatttaaaactctaagttttgaagtgaagcaataaaactaaattcttaaacaatgacttttaccttcatacaacacagaatagctatttttatttgggttgaaaaagttatttacaactaacattgatcgagtcttggtaaaagtccgataacacatgaagacaaatattaattttccctcagctttctgaaagatcaatgaacatgtttgaggttagtgatattcttaacaaacagtggcaatgctagtctcctacggtggccaagcaagtagtgcattctttaacctaatttgaaattgaaagcaccgaaatacaatttagatctataaaatgggatttgttatttaattctccaccattaatgattaacaatttagatgcagagacacagctaatgaaagaaagttttgattggtgctatttactagttcatttgagttgcctttttaaaatcagttttgtttccattgaatccaagaactcttcataaaatagagaaatatacatatcaaaggacttaagtaaaagtaggttagaaataaataatcttacaacgacattttaaatcctttaatgatttaaagaaaggaagacatataacactgaatgctaaacaggtcttttgaccctctcttgggaatttagatatatattttatagtatatgtatatatatttttacatttcacgtgtaggccacagctgtctaaaatatctcttcatagtaggctagagggatctatcaggagatagaataaaataagatctgagtatagtctcagtttatgagagtatttctttctgctttgacaatcagcagggatcataaatttgaagcaaatcgtggcttttctgcgtctgggtctgtgtttaagactgaggaagattctcttggaagagcagctgctggtggagggggtgctggagggactcctcggttcggggggatggctcccgacgacatctgtcggaagagggtgacgcgctgcgggacagtgctcctgccccctgcctgaaggcccgttccggggaccgccgtcacgggttgagggatggaggccagggactcgcccacagtgggatgaggtctggaaatcagagtggacacctcatggggcagcgagggctgcgaggcggagag

SEQ ID NO: 33592 - DNA, 2300 bp, Homo sapien
aatgggagaaaagtagggaaacatctttagtctaataaagaaaagctgcctgagtaatcgggtctttcttaggcagaactgtgctttgggcaatgtttgtttttatccattcccgtggcttccttctgccctcagcacctggtatccttatctgacctcttggctttccaaagtagagaaaggtctctattttgacagatcagagctctatattttcatatttttcctatctcttaccattaaaatttggccatccatatttattcttagggttctggtatatgattagttgaaaacagatggtgcctgagtcaggacatagctccgtgaaaaaaggagatttagcacaggctatggtaaggagaatggtaaggaaatcttacagaattgcaactgagttaggcctaatggctcgtttctgcttccctctgctattttctctgttctctgcttcctttctcagcctctgttaacccctcaggaaggcatccaattgtcttcctttgtctttatccttgcttccttcattgttaattggcttcatcactgtttaatttttcagaaaaacaccttgattagccccactcattttttttttcctcatgatagctcactagttgccagcctgacatacacattccctccttgagtgcctgccccttctccataaaatgtggctacagctgacaggaacccaggggatctgggactcttggcagggcaagatttcctttgaagaggctatgggcagggaggcaatgcttgtatctgaaacagatgttttgggacattcgggagtcttgaagctcttcagacgccggggctcccctgctgagtgactggtgggtttggcagcacattttgcttcctttagctaatccagtgggtttcagagacgcagagggaataagaggaaacggataatgctttcctcagcatcagtactacacttgtaagtttcccttaagagtgttccccccttctgaaatggtaatgacattctgacgagagattccaagacgtcttaacttcctagcgtggtgtcgttaaacactgaccgacacacacatcccttaatgtgttttattgattatgtaacttatctaaaaagataggtcagctcaggcgaggcctccctcacacacttttctttcaatattggtggctgatagatctgcttgcacgtgtattgatacgaatggccttggaaagaaagaaatcccgtcctctgtttaaaaaactctgcaagaattaacaaggataagtgtaaggaggtcagttgtctgtccccaggtgcagaaccttaatctgaaaagccccaagcagctggttacctaggattacacagacctggtagcttttgccctctgcctctctttctagtacacacgcgcacgcgcacgcacaggcacactttccctgatactttggacatttattttccattgtcaaactttactttcttttggacatttggttttgcacttgaattgttggcatgcatagtcagcttgtccccttttctccatctgtaacgttattcaaacaggcgttcagacaatgtcttcatgagtttaagatgtttgtttcttttggaccaacacacactcgctagttcagtcttgctctctctcctctctcccctgtctttcatgcaaacatacaccgagtccttctccacgtgtaccaatgaatgtctcctccgagggctcttgagttcaatgtcacgctgggcagaagtagagcaagagtaacgagcatgtgtggagagcggacggggagagaccctttctggccaacagagggcagccgaggggaggcgctggggcgcgagggctgagccgagctgagcctcgcctagctccggcagcctcagcttcagcaccagccgcaccggagcccggaccgcagccactaagggcagcggcggcggcgggagccaggcgcgcagctagcagcggcgcggtcgggaagcagcagccgccgccgccgccgccgccgccgcgacgggcagctgggctcgccggcagccggctcgggcccctaccctctcggctacgtgtctccggcgccgggcggccggcgagtctggagcccgcgccgtcgccggccgcgtcctccgggcatggaaggaggcggcaagcccaactcttcgtctaacagccgggacgatggcaacagcgtcttccccgccaaggcgtccgcgacgggcgcggggccggccgcggccgagaagcgcctgggcaccccgccggggggcggcggggccggcgcgaaggagcacggcaactccgtgtgct

SEQ ID NO: 33593 - DNA, 2300 bp, Homo sapien
gccaccatgcagcctaaaattctttacatttaaaatcaatgcattatgttattagaataaaggataaaaataaggtttgcatttgtactgtccatgaaacatgaagaacaagggaaatttaaataagttgaaagcaacgtaatctgtgtaatagtttaggaattagaactcattttgctcacaagacactaattcactattacagaaaatatgactggacctttatactattctatgtgtttttcaaagtaaaagaagcaaatactgaagttataaaagcttgtttttctttattagaatacttttttcaattctgatttgtcacaatttagattctttttctaagaataagcagaaatttacaaaatttaatttttatttatacattcatccgttcaatacacatttcaagaaagctgtattgcaccctttcagtggtagttacaggacaaagaaacaaaataatccaagagagagaccaacaaatgtatatttataacacagagtaataaacacaaataaatgtggagttatttaagcatgtaagatggtacatgctctaccaggtatgggggcttctctaagacacaagatcagattaaagtcttgaaagataatctggggttagtcaagcaggtagaagtgtgaagagcactttctgagcggaatctccatgtgccaagtctagttcaagagactggatagagattagcaatttggagaatgcaatattaagaaatggcaaaggtgagcctacagagattccaaagttgcatagtgaggtttgtgtttgagaaagtggactcaggcagccacgcaaaagagggattaatagaaaaggagactgaggtaggaaaatcaaggcattagtgttgcagcaggtgtgggcagagttggggaggcaatgggatggattcatgagctattaaaaaggtcaaaggagcagggattcatgacccataagtattaattaatacagaagaagaaaatatcagaatgagttctaaattagggcctgagcagctagatgttgggataataacaaaaagactgcaaaaggagaagatttacactttggcaaaaaatgtatatgaaagtatctgggaattttatgccatcattaaatctacttattatgctgaaaatccttgttagctggaaagactaagagaattccccaaggtgcctaatatataaacttggagtagttttcctacttcaacttttatgcggcttattatttgcagtcaatttatatttggtcaatattagttaattcatttatcatctctgtaagattggttaatggaagcagattaaaatccaacagtggtaattttctggaagtcctccagagagactacaaaaagccaaaagtcaactttaatttttgagtacttttcctatttaaggttactgagataaattgtctttgctagaaaaaaataaacagtattgccaattaaaaactccatttactatagaaatattcctgattattttacctttgggaagcaatgcttgttgcttgaaaattgtatgagcctcaatggttagtggtggtaaaatggaagaatgcatactgcagatgggttacacatttgtttgtgttctatattccaagtcacaaatacactgctttgaattgtatttagtcaaacagcagatttgactaatatttccctgaattcaaatagcttagattaattaagctaactgattggttatctaccattatatagatattacccaagtaatgttgtcaaaataataattaattaaactaaaataaatgtatggccctgagaccagaataaaatgaaaaccaagaataaaatgaagtttgccattaccgggatgtattcaagttcagcaaacttatatgtgtagttaagatgctttacaacaaaatattgcattttgttatagcaacaaagtattgagcagcttccaagtcactaccttatgtgtattattcatactagtaatattggtaaacattagtgatacaattttcactaccaaaattttattatatttttcttagccaatacatggagcaaatttttataaagtatttcttgtcaaatcattgaattcctcctccccaacctttaaattccctagtcgccaagaatcttgggttccacaccaccactctttgcttctgttcttaaagttgttgccctttgagcagtgggacacttcatggtcatttatgttatctagtatcttgtggtatgattttagtattcattcaagcattgacaacttttcatgttgattcagattttataaga

SEQ ID NO: 33594 - DNA, 2300 bp, Homo sapien
aagcactgtgtttaggaaaacaggcactggatggaccaatgccaaatttcctgctctgctgcttaactaagtatgtgtaattacttgggcaattacttaagcaattacttgggcaattacttaagccaatccccaatttcttcgtcttgagcccagaaggtcaaggctgcagtgagccgtgaatgtgcctctgccctccagcctgagcgacagagtgagaattccccaggagtgcagaggttctcagaactgcaatactctgagatgaattttgaaaggtgaatcagggatagaaaaagttatatagggaaggcagtcaataagcttgttttaaaggatatggagcatttgaaaaagtggaatgtacataaggctggaaatatcaaatatctaaatatagaacaggaacagtgatgaaaagactttcaaaatgcttagcaaaatgagaattatatttctttctcaactcttttgttccaacagcaaaagcaacagtggggatcagcatcaacttgggtaagtaagtttttctggtcataaataggctgattcaactgaaaaaaatgtttctttaagaagggtgaatttgtgtctaaggattttatgagactaactgggaaaagtcagtcagagtttagtttgaggtgagaagtgcttactgttgacactctacctaattatagggaaatgtgtgcagttagtcctgagaccagatgcagggttgaaagaaagaggtgtgatgtagcagccattgattaggcaatttgggtttagcaagcccagtcaatgccctcagagggtcaacagtgtataagatttagtccttgaaggcatcttttaaagtttcattcagaagattttaataattttgaccataattttctgagaagaggcttttctgagatttgtcattcacagataaacagttgtctaatttgtgtgtgtgtgtgtgtacatgtgtgcatgcgtgcatttgtgcatgtgtgcctatctagcctcttttgaacacaatggtagattggcacctggtagataatattgttgaatgaattgtattattcatattatctcactgccaatttgaagaatctacattctgtttccaaagttttgtgcatataatactaaaccagaaacagacgtgttttagtaatacgtaccaattacaaattaaccattcctgcctggaataaacacaggttttgttaaatagctcaattttcaaaatttgtctcatgttatttccaatccttttttttttaacgccgatatattttgaatttacgaatgtgaaagctgaacttcaaaaaaataaagggagaggaaacaaagctcgtgaaaaattttaaaaatatcttttaatgcgttataacatcctggagagaaatcaaatcaatgtgtttcaatgttacaatatagatttctcctcccctcccggataaagcactaatttatttaatttggttcagagcactgaatattccaagctacagccttgtgggtaagagcattatcttaaagagtgttcggatttaacaaaggtcaatgtcttgtgcagtttacatagtatctactctcagtagcttttgcttcttgagctctaggtggctcctcagaagctgttaggcttaacaaacaaaaataaagtaaaatcagacacggtatggggccttgggactctaaaaccttcatccggagaaaatcagttaagccttcagagactagaagagagaatgtgtgtgattggtaggcaaagcaaagaaagattaacacaagttgtctggcagctggataaaaccttacacctgcgcaaaaataagcctccctcgtaagaaagcccaaagatgtccggggtccgggaggagaaaagtgtttctcatctgtcccatcaaagcaaattagtgaaacctgcctcaggtgaagtgcaaaggccagtctgtaggcagagtttcgacctctccccacgagattggctagacatcacctgcccaagctctctcccgacctgctagagccgagagggcggaggccggagaggctgcagccgggaagtagcaccgccaccgcacatccgggaacgccagcagccggctgagggctgcataactgatggagggccgggcgcggtaagagcgtctcgggggagtggggcaaggcggccgggcccctcccattccgccttttcttcagcgtcctacccgcggcactggctgcgagcgccgggccacctgcgagtgtgcgcagggactctggacacccgcggcggcgagctgagggagcagtctccacgaggacccagg

SEQ ID NO: 33595 - DNA, 2300 bp, Homo sapien
aagcacaggcaaccaaagcaaaaatgaacaaatgggatcacatcaagttaaaaagcttctgcacacaaaagtatacaatcaacaaagtgaaaagacaacccacagaatgggagaaaatatttgcaaactacccatttgacaagggattaataaccataacatataaggagcccaaacaactgtataagaaaaaaaactaataattcaattaaaatatgggcaaaagatttgaatagacatttctcaaaagaatgtctgaaatatctgaatacaggcatatattgagatgttcaacatcactaacaatcagggatgttcaaatcaaaactgcaatgagacatcatctcactccagttaaaatggcttttattcaaatgtcaggcaatcacaaatgctggcgaggatatggagaaaagggaaccctcatacactttttgtgggaatgtaaactagtgcaaccactatgaagaacagtttgggggttcctcaaataacaaaaatagagccaccatatgatccagcaatctcacttctgggtatgtacccaaaagaaaggaaatcagtatattgaagagctacctgcactcctatgtttgttacagcactgtttacaataaccaagatgtgaaagcaacctaaatgtctaccaacagatgaatggataatgaaaatgtggtacatatacacaatggagtactgttcagtcataacaaagaatgagatcctgtcatttgcaacaacacggttggaactgtaggtcgttatgttaagtgaaataagccaggcacagaaggactaagatcacatgttcttatttatttgtgggatctaaaaatgaaaacaattgaactcatggagatagagaatagaaggatggttaccagaggctggtaaaggtagttggggaattgtggggaagttgaaggtgaagtgaggatgtttaatgtgtacaaagaaaatagaataagctatatttgacaacacaacaggggaaatatagtcaatgataaaatcaactgtgtattttaaaataactgaaagagtataattggattgtttgtaacacaaaggataaatgcttgagaagatgaatacctaatttatgacttgattgttttgtattggatgcctgtaccaaaatatctcatgtagcccataaatatacacacctactacgtacccacataaattaaaaataaaaaaacacaatttgtaaagtcttcttctttttagtttgagacaatgagaacagtggaccccactcaattaaaaacccattgcattaataatcccattacaaccctgaatcccttttcaaaattggcattttctcagtatttatgtcttcttcatctgtgttcttttaaagttttaaatgcatgtagtgttgcattaccctgtgatgttttctttggagcctctctaaaatatagctattatattatgatttactgggaatagataggaaactacatactaaaatcatttgagggctttgaaaaatattgttgcttgggcacaattaaatcagaatctctggaatagaacccagatgtgagtatatttttaaaagtcaggattgagagctgctactttagatcatacgctgcttcaagataggaaattttccttctcttttccctgggaaaacaaagcaaactaaaaaaaaaaaagggaaattagggcattggtctatccacaaggagccgtagcaaggtttggaggcctggaaactagaaagctcccaagaggcgaatctggaagtcatagaatcagaggacataattcaactgaggatatctactcagctattatactaggtgctgtatttgtagtcttcatttcagctgagagtcctaagcccgtgaaaagtaactcttgctcaaaattaattatttagttaagatcaattagttgtatttctctagtctactcagaaggcagtgggaaaagggcagagtcaggcatgccttaattgtagctacatctcactcagtctcccatgtagcacctggatttttcaggtctcaacataactttatttcatatttagtagatgtaaagatgttcttttcagattcatttaataaaaggcccagaggccgggcgcggtggctcacgcctgtaatcccagcactttgggaggccgaggcgggcggatcacgaggtcaggagatcgagaccatcccggctaaaacggtgaaaccccgtctctactaaaactacaaaaaatagccgggcgtagtggcgggcgcctgtagtcctagctacttgggaggctgaggcaggagaatggcgtg

SEQ ID NO: 33596 - DNA, 2300 bp, Homo sapien
ttagctttgtttaaccaaaacagggcagcccatgaagcttaaaaaaaaatcaaatataggacaagtcacaagaaggcctattttaaggagtgagtagtaaactaagagctcatccagacaaaaaaatatttggtagctttaaaactatttcacatttatttgtagtaagggttctacttggaagatgcaagccttgtggctagataactataaaataaattcttgtgagttaatagactttcagcctttcagagaaattaaagcacataatggaagaagaaatactcatgattctcagtggtgatgtggaagagaagagagcatttttggcagccaaagggcctacacaaagcaacatatccaggaaggacaaagggcttgaacctgtcctaccctaaacaggaagcatttcaggagaggactgagcaggagatatagactgttgtgactgtggctttactacatcaaaggctgcagtggatctcaataatgcagaatgtttccttttgtaactcatagtgaatatgactggacaaggaaattattttgtaatttgtttcctgaaagataaaggagttagaacataggatctttcattgattctacagaatcttaagactccttcagggatggcagtcattcctaccgtgctgaacatcatgttgtcacggtcagaatcagaactaaattgattaagggtctgaaacagtttggcaactcttgggcacttatgctgataagaaaagtgatgagacagggtaatgaaaagaggctgcaagaaatgaccattcgtgcattcagccaacatttaggccaccctcctgtattccaggcactgtacatggcactgagtatgcaaagcaaaaggagtcatggtctactggcgggagccttctcagtggagaaaagatcaacaagaaaagtgcctgctggagacctctcctagggcataaaccaatatagaggtggggcagctacgtcagcctggggtgtccttaggcagaacagaaagtgagaatcagagcagtatctcatttctgaacacctggattgtagctttcccttgactgtcaaaggaggtggttttaaaaatcaagccaaacaggtttccatcttttaggaagaccctggaacgtgccagttgattctgaccatttctcatgaacagaaacacctaggaagggagaactggtgagtttcaagaggaggaagtccctcaaaaggggctgtgtttcgtaaacggcgccccaaaagggctgaactacttcgatctggaggaaaaagactcaggcactgagggaaggggagggtgcacgtctggagtaattttaaggccttttccgtgttatgtgatgtggcaataaggaaagatttgttcgttttattatttttttaatttttaaagattttcttttccccccttttccccctcccagccactccggtttgggtttgccacaagactataattcctttagaaagtggagtcgaattcataaaagtgatggggggaggggcgcggagagggaaggctgggagccccagggagtcttcacgaccgctcagctcccggcgcgagtggaggtcggtgtggggagaagcggctcccgcccgggatggctaatactctgcgagccccggcagcccgcggccggcggggtgactaggcggcgggcgcggagggtctgcggcgggcgggcggcgctgcagcagcctgggcacggctgccgccgcccgcgggcgcgagtgtgcgcgggtgtggaaggccggcgtgcgagccgtgaggggtgtgcgcgcgtgagccggagcggggctcgcccctcgccggcgcccgccgcccagccggtgattgctctctggctgtccccggcacctcggcccccacggccgttggtccgggcgggtgagggagaaagtgagacttggtgtcatcaccatccattgtcagaaggggaggaaattggaatccagcagcggcgagcagcagctgggcggtcacatctgggaatgcaaagccgacctccccctcctcctcctcctccccctcctcctcctcctcttctctcacccaggatcacttccgaaaccacttcgccttcagcccctgcctcggccagaggtttcatttttaactgaatatttacgaaagctggaagcgtgcgaggggggtggggtggggtggaaatagcggctgcttcttttccagggatttatttaatggggatgtgttcaaggcaagagcgaattcagaaggatatcgacgtcgtgatccagaagtccagagctgagaaggactgcct

SEQ ID NO: 33597 - DNA, 2300 bp, Homo sapien
gaaaagtgcctgctggagacctctcctagggcataaaccaatatagaggtggggcagctacgtcagcctggggtgtccttaggcagaacagaaagtgagaatcagagcagtatctcatttctgaacacctggattgtagctttcccttgactgtcaaaggaggtggttttaaaaatcaagccaaacaggtttccatcttttaggaagaccctggaacgtgccagttgattctgaccatttctcatgaacagaaacacctaggaagggagaactggtgagtttcaagaggaggaagtccctcaaaaggggctgtgtttcgtaaacggcgccccaaaagggctgaactacttcgatctggaggaaaaagactcaggcactgagggaaggggagggtgcacgtctggagtaattttaaggccttttccgtgttatgtgatgtggcaataaggaaagatttgttcgttttattatttttttaatttttaaagattttcttttccccccttttccccctcccagccactccggtttgggtttgccacaagactataattcctttagaaagtggagtcgaattcataaaagtgatggggggaggggcgcggagagggaaggctgggagccccagggagtcttcacgaccgctcagctcccggcgcgagtggaggtcggtgtggggagaagcggctcccgcccgggatggctaatactctgcgagccccggcagcccgcggccggcggggtgactaggcggcgggcgcggagggtctgcggcgggcgggcggcgctgcagcagcctgggcacggctgccgccgcccgcgggcgcgagtgtgcgcgggtgtggaaggccggcgtgcgagccgtgaggggtgtgcgcgcgtgagccggagcggggctcgcccctcgccggcgcccgccgcccagccggtgattgctctctggctgtccccggcacctcggcccccacggccgttggtccgggcgggtgagggagaaagtgagacttggtgtcatcaccatccattgtcagaaggggaggaaattggaatccagcagcggcgagcagcagctgggcggtcacatctgggaatgcaaagccgacctccccctcctcctcctcctccccctcctcctcctcctcttctctcacccaggatcacttccgaaaccacttcgccttcagcccctgcctcggccagaggtttcatttttaactgaatatttacgaaagctggaagcgtgcgaggggggtggggtggggtggaaatagcggctgcttcttttccagggatttatttaatggggatgtgttcaaggcaagagcgaattcagaaggatatcgacgtcgtgatccagaagtccagagctgagaaggactgcctgtttgcaggtgagttcttgcttttccagaacctcggacccagcgcccccttcccagttttctgaccgcgacgtctgtggctgggggtggggtggagggttgcacgtccccattctggggttcatttggcaacagctgctgcaacgagcgcgggagccaaaagggggagggggcgccagcctctccccttcccctcccccaccgccaagtctgaggcagccaccagctttgagggcagagcccgcgtggccggagcgggggtctaggcgaaggggcagtgcgtggtatttccagccccgcgtagtgcccgaagcctccaagcacgcttcctgggttccagcagcggcggcagagcggggttggtttgcgcaatgggctgagcggcggcggccgggaatggagcctgctgcgctgcgctgcgcttgtaagctgcgcccggcgccgaggacccccggggggcagcgctcggcccatctccggccccttcggctccctctagtcccctccgactggcaaagagaagggattcctcggattcccaaggcacccagcgcccctgcctgggggtcgcctttcgtccattttgctcccccgggattttgctttcgctaccgcgagcccggctgaggctgcttccggcctcccctatcgggaaattcccgctgttgccatggcacccggcacttgttgcggggggcggcctcccgctgcacccagtcgggggcgcgccgcatcccctcggacgcggcgcagagggacctcgccgccctctagcccttgccttctgcccggccaggcctcccctgacaccaccgaatgtggggctcaagtcctgatcggggttaaaacaaatccactccaggggtagcttttgacgggactttctgtttcagatttcagatactctgactccacctt

SEQ ID NO: 33598 - DNA, 2300 bp, Homo sapien
ttttccctaccatcagccaatcactggcaatggtagtagttccttttggtgccagcacaatagtaaacacaaactcaaatgtaaatactgaagtcccttcatggttctctattataaggaggtggttgttataccaaatgtgttcatatgtatactccagattacccctgaaattaaacacaacattgaatgtcttttagaaaacaatttcttttgcatccaaggacaactaggtacctgggtattcaagtttaagaattactgattttagatgttgaatcacactttgaatcctaatgtaatatataagtgggaaaatttttagccattttgacctgtttttttttttgttcctcttagcttatcaagattaggcaagcacttgccgtctttcttaaagaatggtgcacaggagtagcaattttttatgggaagaaaatctgcttaatacaaagggttgtgtcagtggaaatttcaaattaggtacagggagaaatgatgatcttattattacatttaaatcctgctgaaattttgggtaaaaaaaaattcaaacatgaataaaatgtttctcgtgctgactgagcgaatttactgtgaatttggaatcatggcatcacttattgaagttttattccccttttctcaccacttccactgctaaaagggccccaaaataattgagtatgtaactgtttattcttctgaatttatcaaaactagcagaaaaaagcctaagtgatatactttctggcgatctgagttagtttgttaagacctgaaggatcctgagaacttagtaactggcgttgtgctaagagtcacatctgtcccttttgaatagcatgtgttatacatatcaaaacccatatttgataatatacgtactactactctgtcacttgtatctatgctaacttgggcagatttcgttctcttatttgtgaaatgtgtggaataacagctacttgctgcggtactctgaaaattagaggcaaaaatgtgcatataacatttctgttttactctgtgacatattgtaagtgggaaacaaatattggtatcattttcctgatcccaaagcaatgtgttagaaataactgaaaagagcgtgaaaaacagacaatcctgaagttatttttgaagaaaaagaaacacatttaatttattgcatgcttgatgtttaattgtaaaatttcatgtctacttaagtattagtgttgagggccactgccatgtggaaaatggagatacagagaagccatccaagccaaagacctttcccaaataagaacactgtgtccaagtccacagttggcattccagaattctttaccataaagcactgatggagtgattttgacatagaaaatatcgacattaggagttaccaacattctgccttatgatattaactaaacaaacttaaggatacccagtttttaaaatttagtatagtatcttcaaaggtgaataggctgtgttgaagatataatttgctgaccacatatttctacgtagagccagttctgcgtgttttctttttatgtatgattttatagctttgctttccttttcatgaagaagatatcgaagcaagtcaagtaaaaagaaaatggctttacttctatcttaataaatagcattataattagtaacaaaaattttcttaaaagttgattttctagcaccaaaaaaaatttagatttttttgccacttcagctcaagttgttgatcctgaaggccgtctttataattctctttatatctttattcttctatcatttgaattatcatatcctggtaatattgtaatttaattatttaaataaatagtaatcattatcatttactgtgatataaccagtcacagtaaagctctgctaatttgctatatgatgctttcctacatatgaaaaatcttgtatgattctaaattagcgtctcactgatttctatgtgtttgcatttatttgataaatgcattttctacataataaatacagtaacattaattgaaattgccttggaatggtgataacagaattacctttggattgacagaatcatgcagacatttgttacacagcagtggaaacagagcaaagaaaaatccaattgcctgcacaataaaaagttgtcagagaagaaagtgaagtctcccctgcatttattttctactttgcgcaggttggtaacaggcaacttcgtcattgtcttactgaatgctgagtgtgtgatgtagttcatgcttacagcattctttctatagtgttggcatctgtttattttctttata

SEQ ID NO: 33599 - DNA, 2300 bp, Homo sapien
gcaagttttagagcaggaatgaaagtttattaaaaaaaaacactttagggcaggaaggaaagtacacttggaagagggccaagtggacaacttgaaagacaagtgcgcatttggaccttttaacttggggttttgtaccttggcatacttccggggtcttgctttacttctcccctgattcttcctttggggtgggctgtctgcatgcacatacttgagcacactttcccaactcctgagatcttatcaggaagctgctgatcaccggtttcaggtgtttcatctgttaggagcctgcctttccctagaacaagctgtgaccaattattattttagagagacagttaacaacagcctgaccatcacctgatagtcgcccaacattcctgatgtgtgcctgtgggccgggggcagccctcttctgccctgctcatgtgtgacctgctacttaccgtaaccgactcattgtgaagacacatatctgggtcagatattatgatgcccatcccaattccctccctttcttttttgctgcacaaaaactcgctcctgtgataatcaacaaatataaatgaatggatgccacccattttttcaacttgtcagataatcctaaacatccaccaatgaactgaacatgagttcaagctcacaccttactgcataaattaacctctcaatatttaaaatagtaattgtacagttcacccagaaagtctcatccatttaataatttgaatttataataatagaatagtttgcatggtttagatctcttgcatatcagagaaaataccccaagcccatactgactgaaaggtaggtaataaaatgtagccttctgccacaccttctccactgtgcaaaacctaccttagaattcttgcctttgaacaacacatttgagccatagctcttcttcctgtccaaatacttcaaatatccaagtgtaattttatacaccaatgtgtaatttcctgtaaattaattctctcatttatttactgacaaaacacagtaactcattttcatagttctagaaaagagaaagtcttcccttgatctccaaattagttatccatataaatggcatattccattttttaatcgaatcagacctctttcagtccccccaaccccgaagacacatgcagggctgtgctgttccagaacagcaaagctttcatctaagatgcctggctctggctttggggataggctttctcaagccaagtagtttctccaagagaagaacaatttggagagaaattcaactcatttgttgtaaaacatgaaaatgcaattatgtaatttgcaatgaaaatgaggctttcaatctttaaatttaaattgctaaatctcttaacttggtgcttacatattgccttatatattttgtatttcctgagattatatcgccttttccaagtgatggcagagaccatgcattaaactctttacatcctccacagctatttttatgttaccttctgcatagtaacatcatttgcctattgacctaaactgggtgtaaagcacttacattttaattgcattttttagattaaattgaatcctccaactgaacactgaagggcataaacacagtgctatttacccttctttattttgtggagagtctatttcgaattttggatgatctttataaaatattaaaccttcagctttctactaaatctaaagtattttaagtaaaatagaagacaaaattatatcagacctaaagtaaaagttgcaatcagcagtcctaggttctgttgccagcttcacttgaatttatcccttcctctgaaacaattttccctaatctgaacaatcttctcaaaggataagtgggagtacccactaagagatgctgatccaagattcttctgggtaaagctattaaggtaaacacttggtcgatactgtgtcactgaaaccctggttatctgctcagggacattctcttcttgggactttattcatcacagagcaccctggaccaggccaatagtctatcagcaagagtcagagggaaaagccagtgtcttccctactgaatcttttatgttgaagaagttattaagatgcatccatggccgggcgcggtggctcacgcctgtaatcccagcactttgggaggccgaggcgggcggatcacgaggtcaggagatcgagaccatcccggctaaaacggtgaaaccccgtctctactaaaactacaaaaaatagccgggcgtagtggcgggcgcctgtagtcctagctacttgggaggctgaggcaggagaatggcgtg

SEQ ID NO: 33600 - DNA, 2300 bp, Homo sapien
tgcactgaacttcagagcatgtccatcatggtggggtccctcaaacgtctccttttaatgctggtatcttcaccatgcgtcttgcttctatcagtttaggaacttattaagaaaatacttgtttacaacaatggtgcagaatgaaaagaggaaaatgttgtcttcaccattaaggtgaaattgtctattactaaaggtttcccccaagccgcatgcaagcttttctacttggaagtgctatcatctgcaataattctttgtaatagcttattggtttagggagttaaaataccacactgtgggtgggaggtgggggctggtttgaaggaggatggatagtgagggtgctttgtggatctcaaatgtaagtcatcaggcttctggtggcttctggtgtttaattccatcttataaaagtggcatgatggaatatgactaggtaaaactctattttctggcattgtggtggtatctttttttttttttttttttactagggtcaacatgtttatctctatgggaaacacacacaaatactaggaagatttgcttcgtattgagattaacagcatcagctttgcaaaagcagcctgacaaaaggctccatacatctaataccagagactagaaacagaccaaaaaaaaaaaaaaaaaaaaacacacaccacacaactggtaaacttatcaacctaggtctatccaactttcgctttcatacacgcgctctaaaacaacttataataaaaatggaagggaagacagatccaatttgaaatcctccttgagaaaaaacaaatcaaaactagttcctggggaagaaagcctcagctaggtcaggaggaaacttacgcatctttgattccctttccgctttggagaggcattacccgttcaagcccagccaatgcggccggccaggatttacagctcttatcaagggttagattttgcgaaagatataaagaaaggagtttcctaacacaccgggtcttctcacagcaacaagacaccgaaattaagccttctatggtttgtgtctgtaggactttttagataaaactggcagccccattagataagaaatggctttttagaagctttgggggaagcgcgggggttcttcgtggccttcctgtgactgtctttgggagaccgtaacagatgatgggaacatgtaagaatgattgaagaaggttaccggcgagttgcacctaacagtcttctctctccaagtagtttctcgagagaaaattatatattaacgcctggggacgtgaaataggtctttcactgttctgtaataaatccctccctactcgcgcccttagactaatgcatttttaaaaaatctccacaaagtcatggagacttgtccttataattaccaaaataccacagctagttgcacaagtttgcttaaaaacaaagggcaggagaccagcagtgagaagaattgaacagtatataaaaatcttacaaactttagactactgaaagatcatttcgctctttggcttcgggttagtgagcttcaattctagagttaaactgagaagcagacctcgcgggtctgaaagacaaaaagtcagtccgcggagtcaacttcggtttaccggtgcgttccaacctgattgtcccaacagcaagaagcgcccctttcctcccacccaacgtttttagatatctgaggttgggggagacggagtaatggtgtagcagtcaggaaacagttcctctgggtttaatcatcccattcccgattcttcttcccctagcgcgccgagcgcagccagttctggaggaactagccctccggagcagccaaggcaggccaggccccggggatgtgcaccacggcgtggggaccaaaccaagctgaacggcctgctccaagttccccccttttcctagagcccgggagggacctcgtcaacaggtagacctacccaccagccactcgccaccggcggcagaaagtgagccccgcgcgcaacgcggccagccggactgcggggaccccaggagcgcagggcggaggagcagcgccacaggaggcgagggcgcaggcggcgcggccgggaaggaacgcgggaggggacagaaggaagaggaagaggaggagagggaggccagagccagaacagcccggcagcccgagcttcgggggagaacggcctgagccccgagcaagttgcctcgggagccctaatcctctcccgctggctcgccgagcggtcagtggcgctcagcggcggcgaggctgaaatatgataatcagaacagctgcgccgcgcgccctg

SEQ ID NO: 33601 - DNA, 2300 bp, Homo sapien
accaaagggttaatatttaaaaagattaagtttccggtgttttttccaaggaatatttaggttggttttaaatttttctcagaaggaggtcttaccccaaaaataaaaggagcaatacctgtactcgctctttcaaagtacatctctaaacatgcttcggtcaaacttttatttcacctattgcattgatgccaccaaagaatttgtaagctactaattttaaaaaggactaaaacaaacagaacactgcactatacaacaaaaatcaaccctattttaaagctaaaaatccaaacttctccatctttttaaaattttgttttgtaagggggagggtgaaagaggaaaataatttgtgcatcataaactccaagagtaattaaacaagcctcaataccccggaattatgaataccactgttaagggtttttgtttttctcaactaaagaatgaaatgaacagcatagcttgatttttttaacacatgtacagggtaactttggcttgtatgactacactgaggcaaacttcacaaaaagacaaagccacaccaaataatacataaagagtggggagattcagggaaatcccacaaaattaagaaagaagtgtaaatgccatacctgatataatctcttttacagtaggttttcccatccctaacaaagcatgtacagctctcgtccaaatactgattacactccgcacatttcaaacatgccgcatgccattccaaatccggagaaaccctcagaatatactgatcgtgaatctgattgccgcaaccaacacatagggaaatcagacgtttttctgaaatgaaaataaatacatgattgactaaccgtttacttcctacagagataaacacacttttagtgtcgttctcttatagggcgtactctgggaggtttttttctttctttctttctttctttttttttttttttagagcattgcactttgggatggtaattgaaatgtgccatcaaaaccttgactcatttttaaaaggaggtggaatatatgtaaaatgcagattggaatagtctacatttgtacgcctagcacgcaatcaaacccgctcattttgtatttctccccccccccttcctctttgctataatcattgggaaagattatggataagtcaagtcaaagaaaaggttttgactagaagcgttaagtgaacgcagggatgtctatattttccgtgaagcgcgctcttaaatagcacacaggactggatattgttagcaagagcaggcataaatacagttgtcactcgttctcttttgcaagtctaatgctaattcacatctctgggcattgactgtgcaggcagacctttgcaacataataaccttctcggagagctcaggattccccaggaggaaatcaccgcttagcaccagaaagctagagctttggagggcacacaggcgaattcacacacaaggtacaatcagtttcccgaagataagaaccgacagtaagcatgcaggcgtggcggcaacaagaaaaagccaccttttctctttctccaggcaatgactccaactccaaagagcccttggcacctcagcctgtgcctgagagagaaccccgcacaagaacagcacaccgagccccacaaggtaaaatagcctcttactttttggtggatctcccatgtctcccatatctgtaagagggagtaatgtccacagtgaaatggtggttgtacagttggtgaacagcccacagagaggatgctggagctgtggctaagtgggaaatattggcccctggggttgccaatgctgaaagagccgctgctcggctgcgccgcgccctcgcggatctaggagtccaatttaagccggcggagttggcggagcggaggcgctgcggcggcggcagactcggcgcggctcgggcacctctcttccttatctcttactcaaacttctctgctccaactcagctccatcgccattggtctgacgcagcgcgcggggacgtcaggcgagcgccgcgcccattggctgcagggcgcgcggcgcagctgttctgattatcatatttcagcctcgccgccgctgagcgccactgaccgctcggcgagccagcgggagaggattagggctcccgaggcaacttgctcggggctcaggccgttctcccccgaagctcgggctgccgggctgttctggctctggcctccctctcctcctcttcctcttccttctgtcccctcccgcgttccttcccggccgcgccgcctgcgccctcgcctcctgtggcgctgctcctccgcc

SEQ ID NO: 33602 - DNA, 2300 bp, Homo sapien
tttactcaatgacatgtctttctgtcagtcagaataaaattggttaagaaaataaccggcttgacatttatttgtatttgggtttattgaagttcagaaaataagcactgattctaaaattaattctctaaccatagttatctctcagtctctacatttgtattgactagacatataaaagattcataaatatgtaaacatgtaaacataaaatttgtaacttgtgaaaattaattgtaacaatatcactgttagtgatggttatcaccaataatttgtaagtcctagaggaaataaaaatattaaaattgaaattatatattagcccccagaagaaaggtaaatttcccagtaattgtaaacttgaacatattatatgttaaccctactttatttcaatattttacaatttctttttgttttttctaatgaaatatattgcaatttgctaaaatgccatatatgtatttgcatatgtatgtatatgctgtacatatatatgtacacatacatacatacacatgattgtgtatatatagacacactattatatgtttttgaaaactaagcaatttggagaaatatcattgggaaagtacttactatgatttttaaatgtctacgaattaatcaatatctattggttactgttcaaagcacagagagtcatactgagaggcataagacataactgatactaccaacagggaaacgagatatacacaggaaatgaattccttggcagggtatgagagcattgaacacaaacaaaggaacttaagtaaagtccaatgggattgaactgtgacccaacataatacaatttttctagagactcatttgtgtaaatttgaagacagaactgagaaatgacattataaaaactaaaaacgggagaacgagatttttaatgtatttactaaatagtgaatcagttcagatacataatagaaaaggaatttcttgattaatgggtcaacatactgagatctgatggccttcaacctccttgggtctgcccaccccatttttgacgctccttaaacttcttcaacttttgtcttctccagcttttagttgctgtgatcctctatctggcaatgtatccagtgaaccctgtgggcttcttccttcctgtccctcgtgttacctgttctgtgctacctgtgttgcgttctgctcaacgaaccctcctttgggtggcactcttgtcctgcctagccctagttctgctagagatgctcaattagttgttgagttgaagaattgaattgaactgtttccctcagattcctctaaacacaaatccacttattctttctgtctttgaaattctcaaaaccgctaagacacagctattttgaaaatagccagcattggttgaagctagggtgaatatggcttttgactcagagaggttgttcaactcaccaggaaagggaagcattgcaagttcctaagcacttctggactcttaatgcattttcactcgtgaaagtttcaagcaagaaaaaaataaagtagtgccccgagttctttattagattcaattaccagcgtacaaacatcctaattcacttaaacaaaatagcccacacacattccatttccaaggaggctgcttttcttcctctcttcccttctcgctctccctcttactgtttttcctccgtcttgcttctccttttctccccttatcctagttatctcaaagaaaagcttatctgcaaccaccctttaaccacgaattaccataaacgaagcaacccccccacccccccataagcgaaagcaaagccctcagtggagcctgtcggggtggtggggacgccccctttcgtgcaaaacgacttcacggtgaatttcaagtgtccgcaggggatggaaggggggattccagatcctcgcattttcacagacggcctaatccctctgcgcaatggacccgggaaagctgcctcccgttaagggcgcccaggcactgtcaaagcgccctccctgcccgggccgggagaagtaaggggtgtgaaggcggagccactgggctggcaacaccctcccgaaggtccagcccttacccgccttcctaccaccttaggggatttggcccggagaacgagatcaccctctcaatgaaaggcagatgtccctttaaggtttgcttctacagcccgtggactttagcctaaacacggacccgcgaagctggctttatttgtccatgtctcggacagagcctgggaagctgccagtgagatttcagagaccaagagcgcgaaggggcgggcgatgtggcaatc

SEQ ID NO: 33603 - DNA, 2300 bp, Homo sapien
caaagccccagttcaaaattatctcctcattctctctctctttctctctcacaaatacacacacaagcacactttcaccctaccaattaggaattttaagttaacaagatactttttttaaaatacagtgtcctttggataggcaaatcaccttcacacttgagtgtgattagttctttgcttagtgaaaagttgctgggttctcctggaattggaagaaggcaatgtgaattaggaacttcttgagggtactcagtatgataggaaggtgggaagaaggaggaagtaaggggagacatagagagcgagaaacaaagagaaaagaggccacaaatattaataagtagtggttcttatttggactttccccttggaggggacctttccgtcccctgataatctcttaggaagataatgacacttaagtttaaattgtgaagcctgtcagttgagaaaaatgttgagacaagtctcaatcattttaggacgtttatttgccaaaattaaggacgtgcgcggggaagacaggtctatgcctttctgggaagatgattttgagggctccaaatttaaaggggaaagggtgggatactgagaaatacagttttcatgtgagagggtagcagggggaaaatagtcattcatgcctctgtctggcttagtcaatctgaatctgcatttttacgtaagataacatagacaaatggggcaggggaacaatcagatatgcatttgtgtcaggagggcagaggggtgactgtacctgaaaacagaagctatctatttacattgccatggtaaattttcatagaaacactttatggtaaagatcttggcgctcactgagaatttccttgtgggcaaaatatgagcgaggtgtgtagcttttcatctggtagccatctcatttaaaaaccaagaggcaaggcagttttgcgtgacccagttcccagcttaacttttccctttggcttaatgagtttggggatccgagatttattttccttccacacgcctatgccaaactcagattccttcctttcatccctgtttcatctgttcaggctggttagttcccctttccaatccacacagagaaagacagaaaagacagtgagaagctatgtgtgcaggacttctctgccctccactccatctaagctctcaagaaacttttagattcttttgttttttctattcatcggtctcttaaagaggcaatcccacttctccatttccacttcctaataaagaatgctaagtaacttaaggattttctttaaattatgtagctattcaatcagggtcagtcctagttaatagtttttccccacttcccatagcctcggcttttagcttagctttggcagtgaagatctggccctaagctcttgcgacccaacccccaacctaaacatttcacaggctactgggctgcggaaagctgaggctgccaactttggagcctaggattcccaggacatcaggtcaagcaactgagaggtccacccaggggtaaattccacacatagtttcttctctcttgggaccagcgctttaacatctgggtgaatcagatcgtgcagacacggtaactaggcgcagaaaacagctggacacgttgctgggagcccagacagaacgtgaccagtagttctcagaaaccgcttctaaataccagctccaacaggcttgtagcgtccgagtgcggataaggcaagagcaaaaacgagcatagtttgggccgttggggccaaatctgcacttctgagagctacttttactgctaagctttgaaattggatttacccagagggaagcgttgcagtggcagccgcaggcaggtaaaactagtatttgcactcacacactccccggattcttcacagacagggatggaagagaaaacttaggaagttgaagtttggcattaaaataaaggactcgccaccactctgtgcaccttcttgagggagttcattcgtccggagcgcctcacagcttagtgcgcctgcgcacgcgcgaactgcggccccgcctctcctttggggacgggagacgtgcgtcgggtcgcgggacgggggctgcgcatgcgccttcatttcgtcagcccgctgttgcgtgctgccagcgggaactgtgtaggggtagattttcgctgcagtgttccccgagcctgttagacgcagcgcgccgggagactgagagaggaaaggatagaggaagtgctgccctaggctgcatgagtcgaagcaagcgtgtttccttcccgccaggcaagtgcccttagaaaccgggcc

SEQ ID NO: 33604 - DNA, 2300 bp, Homo sapien
atcctgctagcttccccaggcgtagttgctgatagtgtcccataacagtttgtaaatgtcttaaagatgttccagcttggaagtatattctgctttgtccctcctccattatactatgtgaaccctttagaacaccgctgcagaacaaaacactgaaatcctgtataaatgattgagtcactgaagctggtactcagagcaaatgttttattaacagatttttctccagtagtcttgaaaatctcccctgggggagaaaactggcaaaagggggcctgagggttgttggaagaaatgaaaagtacataggatgctattttgaaaaactgatttgtcagaagccactttattttaacaataatgtgactgcacctggcacatgagacaggctctgggcctgtttctcaatgttgtgaaaagcaggacagtcagttcccatggagtagattacagcgtgttggacaaggacattcccccgcgtgaaggcacactccatggagccagtggggccaccattcacggtgtgcaagctgtggccttggagagaacatgggcagggattccccagcctctactataccccagctttactccattgatcacaacaatggcacttttttcttttggtgcaaatatttccattttccaattgagcctagactttgattttataaaaggaaaagagaatatctatatatgtaaatatctgcatgtgagtgtatgtgtatatatatatatatatatatgtatatacgcatttatagataaaattattatggttgcagaagcatcaaattttgtaaaaatatctgtttactacaagcctcttttcaagcacacttatgacacagaaaatattcagagattaaattgcccatgaatctagtgctcagaggaaaatagtttgacaaattggaccaatgaagttgaaattggatcatagaagttcaaaatatttacaaagtgtcatcttttgtaatgtgtatcacaggactttgaattccttgggaaaatgagacaatttttttgtggcttgtgtaggtctgattttcactgtggatcaccctttatattttccttctttcaactccttccttctcctgcaagttcataacattttattaatatcaaaggaaggttataattttagaaatcaaaattaaagaatgggtgctgtgtagcattatgtttactgggcttgatataatcagtacttttggcataatttaaaacatgattatactgtgtgtcattggatatgtatatagacacaacatgttctctatcaatatctatctatctatctatctatctatctatctatctatctatctatctgtctatcgtgtaatctgtctcagtggtgtgctgaagtcagctcacactggttggtaagaggtggcagatacatttccaggaattttgtaagctgattagggtcactttggtagtttgaaaatggagagagaatatttggaccatggaaattggcaaatgatacaaatcagagactgttttttttttccctcctggacagtgtgttgttaaataatttaccaatataccattgtagtttggtcagaaaagagagtgcatacatggttcagtttacaatgggagcaataatcaattatttagaataccaaagttagagaaaaagaaactttttggcaatttggccaataagtttataaatagtcttaaatatcacctgtttttctaattaaatgttttaaaagtaaatgatagagtctagtacatttcttaatcattaaatatgttttataacatttgtacaaagctgttttgaaacatttgttgactttttttaatcaaacgctctgtacttgttttttaaataattgcagaactataagttaaacctaaatattaataaaaatgaaactatatgaaactatatgaaactagatgaatcaaacttgtcttgcagatatagcttttgtgtttattttctgtaaactctgttttttggtgttatagagctatttttgtattcaatttatatgtgtacatgtgtctgcacatgcacacacacacacacacaaacctcaacaaattataatattagagaaacaggacttctggttcatgaaatattttacttaatagccaggaatgacttatgttaaaaattgtgccgggcttataagtatctctttgatctggccaacagctcttcctctcttttctaaaaacttcaaaatgccctcatttctattttttccctttcagttaacaatttagtttaaaagtgcacacttatggttcagtaaatgggc

SEQ ID NO: 33605 - DNA, 2300 bp, Homo sapien
ataaaatgtacattatttatgttcacacataataggatttttgttaaaggacttactgagtaaagggctcttgagaccaaagagtttgagaagccccagcttaaccttccatatttcctgctctgaatgtggtgtccctcacaactgcaactaggcaggagagcaccctggaaggggttctcaaactactttgtctcaggaacactttatcctcttaaaattaatgtgaggcaggagtttgttctttgtttctaaaagttttgcctggctctggaaaatcgtagctcctgacttattctgcacttcatgacagtgtaatgttaatttgtccagttctgagaacaaaaaccaagaaggatgcatgttatttccccccacccccagagataaaacacaaattcctgtctcacattaaaggaagtgtcctgcctcccaaacacaggtctgttccaaacacttactcacatttcagtgagtcagaaggaaacagacagatattcatctccctgaaacctggctgacttccttcaaaaagtctgtaaggagcgtcaaaatcgtgtcaccggttagtgagcagccacctaagagctctcaggtgatagccggagttttagtaagcaggtgagtaccccagacaattcagaaaaaaatgccttcaggtgtttgtcaaggtgagtaagtgcagccagtaagtgactgataagaaaacaggaaagagcctgggactatataatttgggttcaaagggtattagtcataagccatcagcagcaacatctgatgcataccaatttaatactttaacaatgtgacacatcagccctatctatagtaaagagaagagcttgatttttatgaattattaagtccttcccaccttgagccactttgcttcctagaggcagtatctcaggcatcccattcagctcatagtagcattccatgaagatctggaatgatgacaataatgatgattattagactcataactccttaagcttgatttatgaaaacagttcgttccttcacaaaagtagtcactggaagaattctggtttcagcaatgtgctggaaatttgtggccaaacttttggataaaacataagattcagacaagaaaaattaatatcctatttcttaggtttttaactaaaaatctcggatatagaatgttctctttccagatgtgagactgaaataatggaagaaaatggtcacagtctatgtcatggtgtaatgtagacagggagagtcacaagtgcatgtatgggctctcagccttttctctggccttgaagttaatctcctaaactcagtcattaaatcagctcttaattatctcggaggagaggaagtaatgatgatttctctctctctgtctctctgtcacacacacacacacacacacagctcttgcagcaggtattgcttaaatatcaccttggataatcataacttgtgagcagatcttctttcctgatgagttagtttctaacctggtcattctgcgcttatttttgtccctttctccacccacttaggaaaaacagagaaagggacgcaccgcgcagcccctaggcactgtggtttagggctagtgccctcggcacccgctgccaggagccgggcgctgccaagggctgcggaggggccacgttctcccggggactggggcatctcctgcgtgctggcgacaggctgcgggggcggagtggtgccagggcgggcgctcgcccgtcggatatgcccacccgtcccgtccagggcaggaaagcctgccagggcgccatccccatccccaccgcctccaggctgccggggctgggccgctgtacgggagccaaggtgcggtgccccgcgtgtggacgagccgaggtgcagcccgcggggccgcagggccggggtggggcggggcgcggccggagcagatccggtgtttgcggaatcaggaggggcgggctggggcgggccctcggcgctgcaggagctgcccagaaacttttccctgctctcaccgggcgggggagagaagccctctggacagcttctagagtgtgcaggttctcgtatccctcggccaagggtatcctctgcaaacctctgcaaacccagcgcaactacggtcccccggtcagacccaggatggggccagaacggacaggggccgcgccgctgccgctgctgctggtgttagcgctcagtcaaggtaagcggggatttcgctctgcatcggctgcaggagggacccgcgcggcttcctggggctcgctggagggattgggcggaactagggagcgagc

SEQ ID NO: 33606 - DNA, 2300 bp, Homo sapien
aaaacgtatacaagacctgctgtctccctccaggtaaagcagaatgggagaccccactgtgttttattgattatcaggccactgtaagagcaacttaaaagatacgaaatcatgaagtggtttgcttttaaacacttattatggagtatcttttacacagaactaggacttccaggttaaacacctatacaagctaagtaacaccattaatattcctgaatcaccctcaaataagtcacttttatattttgttccaaaaagaacttgaagtgggaatgacataagtaaaattataggtttttcaagaaccagaaaaaaaattaaatattacaaaaactcaaattcagcagcatctaggatttgttgtaactcatttttctttcaatcttagaaatttctatgttgagctctctaaagagaggggcagaacaaaatgtttaaagcacacatttttaacagaatttgtaacaatttcatttaatgttataaaattgcagaagtgacatgtgcagtgttttgtaaattatcaaagagaatataatcatgtccctctgcggttcactgtgttttggggtaaaatatctttaacctttcttaaaatacggtgcacatttagagtttttcaggtgttccaaaaaaaatacaactaacgattctttttgacattaagcacggaaatcgaaattaacctttttacttttatcatttatgtattttgaaaatatctaagtgttactcatatgcattctacaaatttttaactacccaggatgtcgagtttctatctccttccacagctgcaacgcttttatttcttgaggcacagaaatggtctctgaacgaactcctgttatttcagcactttttgcaaaatacaatacttcaacctgaaagtaaagaaaatgcttttaataacaactcatactcgttttctgactgtcaatgttgagcagttttctcattttccaaatgtattgctttaatcaaagacaaattttataaagaaaattaaataacccgtaaaaaatttcagtatacctacaagttcaaattctgaaaacttgttgttttaaatacaattcagactaatttctggatgccttttagttttacaaacttaagtgtgccatcattaaaatcctaagtatttatcttctaggaaaacatgttaagcctgccttaattgacataaaagtatagcaccttttataaatatgtaagcaaagaacaaatgtttgagtcaagagatgagttacacaaataaaataaatgaataaataagcgaaaaacctgtttctcacggttgtcaaatgaccttagattccggtctgtataacatcgtccccagacgctaaggattaagttatgcaacatagtaaatctgacatttacagaagcaagtaggtttgaaacacacgacagactggaatttgctagaacaaacttgtgccagcagcctggtatgtaagggatccgacgaagtaaaataggcacctgtcactccgtgcaaacaactctttacgaaataattacaggtttgcaaatgatcaagggtgtagaaatccacagatgaagcacagttcttcacaagaattctccatgaggtgcatttctttttagattaaaattttagcttcatcaaaacgaataatctgggaaagaggtggtcataaaaggtggaggcgccttcagaacgagtccgtccttgctgccgtgagctgacaagagttctcggagaggacccgacttctgctggggcagtcgcagtaaagcccggagacaggaagggcccgggggcgggggcgggggcgcccccgaacccaagacgccggccaggttgggggctagtggggaggtccgactgaccaaggctgggtatgtggagggaaagggcgggagagacacgtcgaggagggctccgcacccaggcccgcacgcacacccgccacccttacctggcacagcggcaccatcccgcctaggacagcgggaccgaatcacggccgcaaaggcgcaggcgcgggctcacccggagcgcaggcgtaacccgacggcgctcagcccccgcctgcgcctgcacggagcatgcgcacaaccagctccgccccgcgccgggctctagctgtttccctcaggcggcctgttccacgccaggattagttttgcttcgcagatgggccgtggtggtgagaggaagcaatcagtatggaaatggagaaatggcttaccatgcatgtccttctccccaggagggaggtcgtggtgcaggcgagcagacgccagactcctggacacttgcc

SEQ ID NO: 33607 - DNA, 2300 bp, Homo sapien
actttctaagttaactgagacctgtctcaaattttcgaggttcacataccgtaggtaaaagtgtcagaagcctaaaggtgagccagtggaaaagcctgaagacccctgcaaggttattagctaagcctccataacgcaggcggcaagtgtccaggagtctggcgtctgctcgcctgcaccacgacctccctcctggggagaaggacatgcatggtaagccatttctccatttccatactgattgcttcctctcaccaccacggcccatctgcgaagcaaaactaatcctggcgtggaacaggccgcctgagggaaacagctagagcccggcgcggggcggagctggttgtgcgcatgctccgtgcaggcgcaggcgggggctgagcgccgtcgggttacgcctgcgctccgggtgagcccgcgcctgcgcctttgcggccgtgattcggtcccgctgtcctaggcgggatggtgccgctgtgccaggtaagggtggcgggtgtgcgtgcgggcctgggtgcggagccctcctcgacgtgtctctcccgccctttccctccacatacccagccttggtcagtcggacctccccactagcccccaacctggccggcgtcttgggttcgggggcgcccccgcccccgcccccgggcccttcctgtctccgggctttactgcgactgccccagcagaagtcgggtcctctccgagaactcttgtcagctcacggcagcaaggacggactcgttctgaaggcgcctccaccttttatgaccacctctttcccagattattcgttttgatgaagctaaaattttaatctaaaaagaaatgcacctcatggagaattcttgtgaagaactgtgcttcatctgtggatttctacacccttgatcatttgcaaacctgtaattatttcgtaaagagttgtttgcacggagtgacaggtgcctattttacttcgtcggatcccttacataccaggctgctggcacaagtttgttctagcaaattccagtctgtcgtgtgtttcaaacctacttgcttctgtaaatgtcagatttactatgttgcataacttaatccttagcgtctggggacgatgttatacagaccggaatctaaggtcatttgacaaccgtgagaaacaggtttttcgcttatttattcatttattttatttgtgtaactcatctcttgactcaaacatttgttctttgcttacatatttataaaaggtgctatacttttatgtcaattaaggcaggcttaacatgttttcctagaagataaatacttaggattttaatgatggcacacttaagtttgtaaaactaaaaggcatccagaaattagtctgaattgtatttaaaacaacaagttttcagaatttgaacttgtaggtatactgaaattttttacgggttatttaattttctttataaaatttgtctttgattaaagcaatacatttggaaaatgagaaaactgctcaacattgacagtcagaaaacgagtatgagttgttattaaaagcattttctttactttcaggttgaagtattgtattttgcaaaaagtgctgaaataacaggagttcgttcagagaccatttctgtgcctcaagaaataaaagcgttgcagctgtggaaggagatagaaactcgacatcctgggtagttaaaaatttgtagaatgcatatgagtaacacttagatattttcaaaatacataaatgataaaagtaaaaaggttaatttcgatttccgtgcttaatgtcaaaaagaatcgttagttgtattttttttggaacacctgaaaaactctaaatgtgcaccgtattttaagaaaggttaaagatattttaccccaaaacacagtgaaccgcagagggacatgattatattctctttgataatttacaaaacactgcacatgtcacttctgcaattttataacattaaatgaaattgttacaaattctgttaaaaatgtgtgctttaaacattttgttctgcccctctctttagagagctcaacatagaaatttctaagattgaaagaaaaatgagttacaacaaatcctagatgctgctgaatttgagtttttgtaatatttaattttttttctggttcttgaaaaacctataattttacttatgtcattcccacttcaagttctttttggaacaaaatataaaagtgacttatttgagggtgattcaggaatattaatggtgttacttagcttgtataggtgtttaacctggaagtcctagttctgtgtaaaagatactcca

SEQ ID NO: 33608 - DNA, 2300 bp, Homo sapien
cttaacgacgcaagcaatttaaagccaagagttcttgttggcaagaattgggaaagttggacggacagtatacaattaccgagcagccaataaacaggaaaagtcatacagttcgaatgttctgaccaggcggatattctgtctttaagaaacactaatcatatacctgggaaagaaaaaaatcttgggccccttcaaactgggaattactcagggcaaatctgcctcctattctatccaagtcacctcttttgctgacaaagaatagatgcatattctgattgcctcctttagaaagacttatcagaaactcaaaagaatgctactgtctattacctacctggaagcccccagttggggggggcggggcttgcttttaacggtctccgcctttctggaaggaactaatgtactttttacatattgattgatgtctcctgtctccccaaaatgtataaaaccaagctgtgccctgaccaccttgggcacatgtcctcaggacttcctgaggctgtgtcacgggcatgtcctcaacgttggcaaaataaactttctaagttaactgagacctgtctcaaattttcgaggttcacataccgtaggtaaaagtgtcagaagcctaaaggtgagccagtggaaaagcctgaagacccctgcaaggttattagctaagcctccataacgcaggcggcaagtgtccaggagtctggcgtctgctcgcctgcaccacgacctccctcctggggagaaggacatgcatggtaagccatttctccatttccatactgattgcttcctctcaccaccacggcccatctgcgaagcaaaactaatcctggcgtggaacaggccgcctgagggaaacagctagagcccggcgcggggcggagctggttgtgcgcatgctccgtgcaggcgcaggcgggggctgagcgccgtcgggttacgcctgcgctccgggtgagcccgcgcctgcgcctttgcggccgtgattcggtcccgctgtcctaggcgggatggtgccgctgtgccaggtaagggtggcgggtgtgcgtgcgggcctgggtgcggagccctcctcgacgtgtctctcccgccctttccctccacatacccagccttggtcagtcggacctccccactagcccccaacctggccggcgtcttgggttcgggggcgcccccgcccccgcccccgggcccttcctgtctccgggctttactgcgactgccccagcagaagtcgggtcctctccgagaactcttgtcagctcacggcagcaaggacggactcgttctgaaggcgcctccaccttttatgaccacctctttcccagattattcgttttgatgaagctaaaattttaatctaaaaagaaatgcacctcatggagaattcttgtgaagaactgtgcttcatctgtggatttctacacccttgatcatttgcaaacctgtaattatttcgtaaagagttgtttgcacggagtgacaggtgcctattttacttcgtcggatcccttacataccaggctgctggcacaagtttgttctagcaaattccagtctgtcgtgtgtttcaaacctacttgcttctgtaaatgtcagatttactatgttgcataacttaatccttagcgtctggggacgatgttatacagaccggaatctaaggtcatttgacaaccgtgagaaacaggtttttcgcttatttattcatttattttatttgtgtaactcatctcttgactcaaacatttgttctttgcttacatatttataaaaggtgctatacttttatgtcaattaaggcaggcttaacatgttttcctagaagataaatacttaggattttaatgatggcacacttaagtttgtaaaactaaaaggcatccagaaattagtctgaattgtatttaaaacaacaagttttcagaatttgaacttgtaggtatactgaaattttttacgggttatttaattttctttataaaatttgtctttgattaaagcaatacatttggaaaatgagaaaactgctcaacattgacagtcagaaaacgagtatgagttgttattaaaagcattttctttactttcaggttgaagtattgtattttgcaaaaagtgctgaaataacaggagttcgttcagagaccatttctgtgcctcaagaaataaaagcgttgcagctgtggaaggagatagaaactcgacatcctgggtagttaaaaatttgtagaatgcatatgagtaacacttagatattttcaaaatacataaatgataaaagtaaaaag

SEQ ID NO: 33609 - DNA, 2300 bp, Homo sapien
atatgttcccactttggacagtttccatttttttttaatattctgatgtcatttacattttattttataatcatatcccataattgatatcttagttttacgtttgaatgggttaaaatctcaatgccagtttttttagtttttcatttttcccatattaatacctttattgctgagttatttactttgattactcttgattgagtggactttttgcccaagaaagatttttaagaagggttcttgggtattgtgttttttgagtttttgctgatttaggagaatcctgccccaccagtttggctgtaatattatgggatcatgcttttgttctcagccttttttacacactgcacattgccatcagatgccactgaggagtctaaggccactattgtcattcccttgtttttatgcctgggtgtgaatatagtctttatcctttatgtttagcaactttaccaggatacacattggtattcattgctccttgtcaatttttcctaccaaggactctccagcctcacttctcatcacctcctttgctggaggcacacctgccttgccaactacttgcccttctgtgaacttattatgcttcttcatatccctgtggcttgtcagaggcaagtgaaatttcttcgtgctctactcccactcttgtcatttactgccaccattctagcagatttaccttctcagcatcttctcactccccaggtgacacaaccactttccccttccacccttgaaatgtaacacagatccttagtattacagggaattatcattcatatttaaaactctcctacccaggactgtgagctccaaggaaagggacgtgtaacttacatccacttaacgacgcaagcaatttaaagccaagagttcttgttggcaagaattgggaaagttggacggacagtatacaattaccgagcagccaataaacaggaaaagtcatacagttcgaatgttctgaccaggcggatattctgtctttaagaaacactaatcatatacctgggaaagaaaaaaatcttgggccccttcaaactgggaattactcagggcaaatctgcctcctattctatccaagtcacctcttttgctgacaaagaatagatgcatattctgattgcctcctttagaaagacttatcagaaactcaaaagaatgctactgtctattacctacctggaagcccccagttggggggggcggggcttgcttttaacggtctccgcctttctggaaggaactaatgtactttttacatattgattgatgtctcctgtctccccaaaatgtataaaaccaagctgtgccctgaccaccttgggcacatgtcctcaggacttcctgaggctgtgtcacgggcatgtcctcaacgttggcaaaataaactttctaagttaactgagacctgtctcaaattttcgaggttcacataccgtaggtaaaagtgtcagaagcctaaaggtgagccagtggaaaagcctgaagacccctgcaaggttattagctaagcctccataacgcaggcggcaagtgtccaggagtctggcgtctgctcgcctgcaccacgacctccctcctggggagaaggacatgcatggtaagccatttctccatttccatactgattgcttcctctcaccaccacggcccatctgcgaagcaaaactaatcctggcgtggaacaggccgcctgagggaaacagctagagcccggcgcggggcggagctggttgtgcgcatgctccgtgcaggcgcaggcgggggctgagcgccgtcgggttacgcctgcgctccgggtgagcccgcgcctgcgcctttgcggccgtgattcggtcccgctgtcctaggcgggatggtgccgctgtgccaggtaagggtggcgggtgtgcgtgcgggcctgggtgcggagccctcctcgacgtgtctctcccgccctttccctccacatacccagccttggtcagtcggacctccccactagcccccaacctggccggcgtcttgggttcgggggcgcccccgcccccgcccccgggcccttcctgtctccgggctttactgcgactgccccagcagaagtcgggtcctctccgagaactcttgtcagctcacggcagcaaggacggactcgttctgaaggcgcctccaccttttatgaccacctctttcccagattattcgttttgatgaagctaaaattttaatctaaaaagaaatgcacctcatggagaattcttgtgaagaactgtgcttcatctgtggatttctacacccttgat

SEQ ID NO: 33610 - DNA, 2300 bp, Homo sapien
gaacagaaacttcacagagaagtataagtgctcaatgaaaatatgaaaagattcacctcattaggaattagaaaataaaaaaatgaaagcaaggcaatattattgacctatatttacttgaatttatcaacaaaataactggtgaaactgataggattataaatcatcagattattgtttatttgtaaaagatagttgctcctaaaatattttctaaaataaagaagattatgaaaaatattaagaaacctgaattgatattttgtaactatatgttcccactttggacagtttccatttttttttaatattctgatgtcatttacattttattttataatcatatcccataattgatatcttagttttacgtttgaatgggttaaaatctcaatgccagtttttttagtttttcatttttcccatattaatacctttattgctgagttatttactttgattactcttgattgagtggactttttgcccaagaaagatttttaagaagggttcttgggtattgtgttttttgagtttttgctgatttaggagaatcctgccccaccagtttggctgtaatattatgggatcatgcttttgttctcagccttttttacacactgcacattgccatcagatgccactgaggagtctaaggccactattgtcattcccttgtttttatgcctgggtgtgaatatagtctttatcctttatgtttagcaactttaccaggatacacattggtattcattgctccttgtcaatttttcctaccaaggactctccagcctcacttctcatcacctcctttgctggaggcacacctgccttgccaactacttgcccttctgtgaacttattatgcttcttcatatccctgtggcttgtcagaggcaagtgaaatttcttcgtgctctactcccactcttgtcatttactgccaccattctagcagatttaccttctcagcatcttctcactccccaggtgacacaaccactttccccttccacccttgaaatgtaacacagatccttagtattacagggaattatcattcatatttaaaactctcctacccaggactgtgagctccaaggaaagggacgtgtaacttacatccacttaacgacgcaagcaatttaaagccaagagttcttgttggcaagaattgggaaagttggacggacagtatacaattaccgagcagccaataaacaggaaaagtcatacagttcgaatgttctgaccaggcggatattctgtctttaagaaacactaatcatatacctgggaaagaaaaaaatcttgggccccttcaaactgggaattactcagggcaaatctgcctcctattctatccaagtcacctcttttgctgacaaagaatagatgcatattctgattgcctcctttagaaagacttatcagaaactcaaaagaatgctactgtctattacctacctggaagcccccagttggggggggcggggcttgcttttaacggtctccgcctttctggaaggaactaatgtactttttacatattgattgatgtctcctgtctccccaaaatgtataaaaccaagctgtgccctgaccaccttgggcacatgtcctcaggacttcctgaggctgtgtcacgggcatgtcctcaacgttggcaaaataaactttctaagttaactgagacctgtctcaaattttcgaggttcacataccgtaggtaaaagtgtcagaagcctaaaggtgagccagtggaaaagcctgaagacccctgcaaggttattagctaagcctccataacgcaggcggcaagtgtccaggagtctggcgtctgctcgcctgcaccacgacctccctcctggggagaaggacatgcatggtaagccatttctccatttccatactgattgcttcctctcaccaccacggcccatctgcgaagcaaaactaatcctggcgtggaacaggccgcctgagggaaacagctagagcccggcgcggggcggagctggttgtgcgcatgctccgtgcaggcgcaggcgggggctgagcgccgtcgggttacgcctgcgctccgggtgagcccgcgcctgcgcctttgcggccgtgattcggtcccgctgtcctaggcgggatggtgccgctgtgccaggtaagggtggcgggtgtgcgtgcgggcctgggtgcggagccctcctcgacgtgtctctcccgccctttccctccacatacccagccttggtcagtcggacctccccactagcccccaacctggccggcgtcttgggttc

SEQ ID NO: 33611 - DNA, 2300 bp, Homo sapien
attaattgttaatgtcgtctgccattagagggcactaaacaactctacattaatgagttggagggaagagagaaaaggagactggaaaagaaagagagggagaaaagggagggagagtacgggtagagtctgggtagagggagggaaggagagaagaggggaaggagtaggggaaagagagcagagggaatgagttggaggactggagggaaagggagaaggggagagagacagcgagacagaaacagacagaatgattctggaaagattaagaaggatgtggagcccccacagccgtctgaagtgagcaaaatccagtctcccccgggccgcccgagcccctcccctcccgtcctcatgacggtaattataaagcgaaaagcggcggcgaggtcacccgcttttaccagcctgctgcaccgaatgcgcgcggtgcaggtgcggcggccgcggggctttgtgattcatgcccactttcaaaggggggcttgggcccgtctgagaggcacccaaacaactgtcttctaatattagcacggctgtatttcgggatctattatagtctgtccagacagatcccattgtaatgggatcttttattaaaagattagcactatctcctgcagttggtggaaaaaaatctgttatcactgagttatttgcagttgtggaggggggaaggttgacggaagatggggggtgggagggctagaggaggactgggggagggtctggcggggggagggcagttgcagggggggaagaagggcagatttgaaattcgtagaacaaatcccagtgacctgcgaatgtccaagaattttgtctgcatacttcgctatctgttgtccttcgggcttcagatgcgaaaagaacaaatttaaaaggcagctttggaataaacaatatagcattttccgtgaagtaatcgttttatataaaaggaaatatcgcctcctcagtttcattcagcggtgccaaaaatgttataaatgagagacccgccaactttcagcgaagaatgccaggcactgtacttaataaactgaggctacagaagttcattatggatgttgcaatcttttttattccgcgaaaagagagaagacgagacagaaagagagagagattggagccgaggagactgagagacagacagaggcacacaggacagaaactggggagtctccaggcgggagaggaagggggggccagaccgcctacgtcggcgcccccgctccgggctccgactccagacgccgcgaagtgaaaggggagaaaagaaagggagagggcgaggctgtgccgcggggagaccgggcctgaggtgttaaacatttttgtttgcttccgactagtccagacgaagggccgcgtctcggtagcgctctgccagggtggaaggtgccggggccggggttcctagcaacacctctgggctgggggtggctgcaaagtcaggcactcacagacccagacacaaaacctcgcgggtcccgcgcccaggctgcgggtgcccggaaccgccgcgaggccggcgcgctccgacccgacccggggcgggatatttgggcagcccggggctcttcggccgtttgcaaaagtctctttggagcggaggagaggcagcacggagacaaactcccgggttccccccgccaccgcctccagcgcccccaccgcgccctccctctcacactcgcgcgcgcgcgcacacacactcacacacacactcacacacacacccgccaccccgggcgcgccggcgctgccggcgagcggcggcgagcaggacttgaagtgggtgttcttccccactccccacccccgacgcgtagcccccaacccccgccccggtcgccttccccctccctctcgctcctacgcaaataagaactcgacgattcccttccagccgttttgatttcgggcacctccgaaagataattgggaagggtttccagaaggtgggaaatgtcacctgattcacactgaacttttgaaagctccccacccccaaggagccgcgcacaccctcgctcgcggccgccctcccacagccccacacactgggagaccgcccaccgcaaaccgcggagacccccgtctagatttaaagcgcggctgcgcccggcttctgacgtccattgaatcgcgcgggcggccggcggcgagcgcggggctgcgccgggatcgctgcgccctccgccgctggcctctgcgacgcgcgccgctcgcccgagccacccgccgccgcgccggctccccgcgccgctgcgctcctcgccccgcgcctgccc

SEQ ID NO: 33612 - DNA, 2300 bp, Homo sapien
agatcttgtcaagagaatgaaaatacaaactacagattgaagaaaatatttgtgaatcatgcatctgacaaaagacacatctaatatatgaagaactctcaaaatgtacaggtaaaaaaccaaataatgctaattagaaaatgggcaaaagacataaggacatttaactgaatggaatatacagatggcagataaaaacatgaaaagatattcaacattattagccaccaggggaataaatgtaaaactgtgatgaggtattactgcacatttattatttactttagctcagctaaaacaaaaatagcaataatagaaaatgctggtgaggatatggagaaactggatctctcatacattgctggaggaaatgtaaaatgttacagttactctggaaaacagtttttaatttctttaaaaaatgacacatacatgtatcacatgacctggcaattgcactcctgggcatttatctcagagaaatgaagatttttgtccacataaaaacctgtattcaattgtttgcagcagttttatttgtaatggccccaaatgggaaacaatcaaaatgttctgcaataggtgaatggttaaacaaattgtggtacatccatgtcatggaatattactcagcaataaaaaaggaatgaactattgataaacacaacaacttggatgggtctcaagtgcattatgccaagtgaaagaagccaatcttagaaggtcatgtactgcatgagtccattcatataacatctcaaaatgtcaaaattataaaaacagaaacagagatcactagggttaggagggcaggtgttaccaaaaaggttagcactagggagatctttgtgagggtggaatagttctgtatcttgatcatggtggtggttacacaaaatatgtagtagaatgacataggactacacaaatactttatatcaatgccagtttcctggctttgatactgtactagagttatacgagatgtaatcactgggggaaacaggtacacaagacatctgtactatctttgcaacttcatgtgaatctataactatttcaaaatgaaaagtttgaaagaaaattttctctgaggcatctctcccttgccttccttcatcttgtgcatttctttccctgagtatgactttttctctttctttctccctttcccttatgtactgggttttcctttaacggtccataatgccaaactatgtcattccccatcctcctattgttcctatttatttaatgaaggttatgttttcatgtgcttaattttaaaagcaggaaagtactaactctttaaacaaatttcttaaaaaacaaaacccaaaactaacctgctttttattttatataattcagttagtcattattctttaaggtcggaagtccacaatacaaacatgtttccaacacttgtattggaagataatttttgttttatatgcatggagcattaatatcattcttcatgtctatggattatgaacacacacacattcaggatttactggggaaacagtgacatcaaatattatgttctattgattcttcatataaatctacatgtcaaaaaataatcctttgccagatcacgtatccagatttttcgtttggaaaatacgaacattactactacagaatatcaaactgaatacagccctgtcctgagggcttgcaaagtgaatctggcaatactttggaaaagtactactgcaggttctcaaggacccaaagagctctccagcttttccagtgggttcagccccaaatatcctaatttcttcaataaattacgagttgcaggtgtttaaatatgcaagtatattttggtcttttcgttatcattgtaaaacaccagtcctaacaagcagtaaagattacactttatggtggtaatatttacagttaatgcacttctgcatttcttcccgcacatttttcttcttacttatttaaactaagcgtttcccctctttttttaagccccagtattaaaaagaaaataaaatcccaaagaatttcgcaacattgcgattgcactggcttgagaacgaaggaagttagtcccttgcggtgatccgtcctttcatcctggcgtttgcctgcagcaagatggcggcggtgtcaatgtcagtggtactgaggcagacgttgtggcggagaagggcagtggctgtagctgccctttccgtttccagggttccgaccaggtaatagaattttcacacttttcttcaagcttcttgggtccctccatttttgcggagtctctgctggctgagttccgg

SEQ ID NO: 33613 - DNA, 2300 bp, Homo sapien
gagtttttgttaatacagctgattctgtgttaatagtaaaatatgacaaaggttatacgtttatgggcattaatgcttgcctttcagtagtatctagaaataggaagttagggtaaaactgccacatacctacacaaaagatgatttatgtatcacttatcaaattgtattttatattaatgcagcctaaaagtatattagcttttgacagttatttgatttgtatatcaattatcaaatacaatttgttatcaattgtatttgagatacagttgattatttgtatatcaattcagggactattctgaagataaaagcctacctgttatctccttagttttttcatttcccttttaaatgtcaaataaaaagagaagtcatgagcatggtttcccttgacactaaagattgtagaaaatcaatacatcaaggggagtaagattttcagattcagttgctttctggaaaaccttttttttggaggggttcggggctggagacagagtctcactctgtcacccaggctggagtgcaatggcatgatcttggctcactgcaacctccacctcccaggttcaagcgattctcctgcctcagcttcctggactacaggcatgcaccaccatgtccagctaattttttttttttttttttttttaaagtagagacagggttttaccatgttggccaggctggcctcgaactcctgacctcaggtgatccacctgccttggcctcccaaagtgctgcaattacaggtgtaagccactgcacccagccttacaaaacatatttaatgccctctaattatattttgagacttgggtaataagtattgtcaccacagaaagtaacaaacactaaatcatgagccaggcactatgctaagtgcttttcattctcatttagtaactctgtgaagcaggaacagttatctccatttaattgttcaaggcaactgaggtttagagacattatgtcacattaagtaacagggacacatacaaggaggtgaacaagttttatttgaacagtcatgtttattcatttatatatagtctatgactgctttttggctacagtggtagaaaagtagttgtaatagagactatatggccccagagcctaaaaataattactacttggccctttacagaaaattttaggtgacctctagtctaaactgttacgtatactgcctcaatactatgacatttgtgtaagtcccaaaataccctttattcaaacatcttcaagagtctgtgtttaatagacaaattcctcaactgataattcaaagttcttcacaatataggcacaaacttactaccaaagcactaacaagttttgtctgtgttccaactcttactttctgcccttacattccaaacctactacaccttcctccctctacaacctcgttaatactgttctcattcttatccctgcctatgaaactctaacctagtcttcatttcatatgctgtctcatttcttcatcccttttcttattcccctccttcacttgcacctcccatctactactggatgaactcctctttcttccttttaactttcacaataatttgttcctttcttgcagctcttatagtatggttttctcttttaccttttttgtactgcactcagtcagaagcatgttgaacacaccctattgtatgtcagcgctgtatggctaggctctggggataaataaggcatagttcttacactcaaactgtaatattttatcctgcctattggattataagaatttaccagggaagacaagtcctatttatcttttaatgtgctcagtaaatattggtgaatttagcagcaaatttagtaacgttgtaaatgattctccagattatgctttaaacttttctttaaatcaccttaatttggtgacttgttctttttttagaagaactgttgatctgttaattccctgtaattagaaacctgaagaaagaaagctatagtaggatgattaacaatttcttatattttagtgtgtttgtaaaataaaactaatgaatgttttcctgtcaagttaatttggagtttatcctgagtttattaaggattagcatcctgaagtgtattgaaacaaaatgattatttcataatgtttgaattgcttccaaactgcatgttatttattctaaactctccctctgataggataccgagacctagagaagttaagaaaacaagccccagatcaatcacattgctcctgacagcacctaaccttctagattccaagtccaatggttttcctggtactatga

SEQ ID NO: 33614 - DNA, 2300 bp, Homo sapien
agactagatacatatcgaagcagctcaataggaactttagttcctatttcattcatcattgattcattcatacaacatatttattgagtacttattttgtgccaagcactaccaggtttgggagacatacctgctaagttgaagtctattagagaacttttctgatcaggatattcgtgttctaactcaggcggtgtaacggtacctatgtgactttgagtgaatcatttcaacctcctgggccatcgtattagtcagttttcactaagttacgttataaaacaagcaacccaggccgggcgcggtggctcacgcctgtaatcccagcactttgggaggcagaggcagacagattacgaggtcaggggatctagaccatcctggctaacatggtgaaaccccatctctactaaaaatacaaaaaattagccgggcgtagtggcgggcacctgtagtcccaggaggctgaggcaggagaatggcgtgaacctgggaagcagagcttgcagtgagccaagatcacaccattgcactccagcctgggtggcagagtgagactccgtctcggaaaaaaataaataaataaaaattaaaaataaataaataaaacaagcaaccctaatgtctcaagaagttagaaaagcatgtatttcttgctcatattacataaaggatgaggactggctgtagttttgctttataccaaaatccacacagaaggtgagcacacaggatatgctcttctcctggtggagggctgaaataagaggacccagccaagccacacaattgcacctaaagtttctgctctgaagcaaatgccatatccacccatgttccgttgtccaagcttataggcaatgtggcagagaagcatggtgagggtgagaagaaacgaataataatgaagaaagaacacaatctaccactgtctttgttttcctatttataaagtgaggatgttgggctagatttctctattgcctttcaactccctatttggtaattctgtgatttaatagagaagagagaagtatcattgttaattattgttacccattgaaggagctgagtcacactcccatactccacattaaacacaaaacattttggacaaggactttatattatctgataagcccaattactctttttgttttggtttggttttgagatagagtcttgctcttttccctgaagctggagtgcaatggcatgatcttggctctctgcaacctctgcatcccaggttcaagcaattctcgggcctcagcctcctgagtaactgggattacaggcgcccgccaccatgcccagctaatttttgtatttttagtagagacggggtttcaccatgttggccaggatggtcttgaactccagacctcaggtgatctgcctgcctcagcctcccaaagtgctgggattgcaggcatgagccaccgcacctagccaagcccaattactcttttgcagggatacacaagtataaaagtaattttaataaacattactctgaaactgtttctccacttcgattccttaggtctttatgaactttactctacccaaacatagctttcaaagattgcaggtgtgtcctaagaactgcaagggccctgagtttatctaaataaaatattagaatcacaatgcaattttaattttcagtttaaaagaaccaactccagagtgaattgttaataaggtataacaatgttttttaacaattaaccttcccaaatcaattgcttacaaatacagtgtttttttgttgtttgtttgtttgtttgtttttcttgagagggagtcttactctactctgtcacccaggctggagtgcagtggtgcgatctcggctcactgcaacctccaccctccgtgttcaagtgattctcctgcctcagcctccttagtagcagggattatggatgcctgccgctgtgcccggctaatttttgtatttttagtagagatggggtttcaccatgttggccaggctggtcttgaactcctgaccttgtgatccaccctccttggcctcccaaagtgctgggattacaggtgtgagccaccgcccccagcctacaaatatagctgtttttttgtttttgtttttgttttttttgagacagagtctcgctctatcacccaggctggagtgcagtggcgcgatctcggcttactgcaacctccatctcccgggttcacaccattctcctgcctcagcctccctagtagctgggactacaggcgcccaccaccgtgcccagctaattgtttgtatttctagtagagaa

SEQ ID NO: 33615 - DNA, 2300 bp, Homo sapien
cttatacaaagacatttaaaacagaaatccaaatacccaacaatatggaaccattgcaataatggtattgctcagtgctaggcagccattaaaaatcatgttttaggaaaaaattcaacagcatggaaaatgcttctaatatgttagtaaataaaaagcatgttccacggccaggcgcggtggctcatgcctgtaatcccagcacttttggaggccaaggtgggtggatcatcagatcacgcgatcgagaccatcctggctaacacggtgaaaccctgtctctattaaaaaatggaaaaaattggccgggcgtggtggcaggcacctgtagtcccagctactcgggaggctgaggcaggagaatggcgtgaacctgggaggtgagcttgcaatgagccaagatggtgccactgccctccagcctgggcgacagagcgagactccgtctcaaaaaaaaaaaaaaagcatgttccaaaataatatacatagtatgactcccattttataaaagtatataaaaaaattaaaaggatatgcatcacaatgttaatgtgattctttctaggattagttattttctattttctcctttgtattttccataatgaacatgaatctcttttataatcattgatggtaaagctcacctttttgtaatcccagccctatttttaaaaaatgtatgacttggaacccttgttttcaacttgaggtggttagctagttacaaatattcatgaaattttctgttattaagtgctgtagattttaaaaggcaacaaagagacataatcattgctcttctgtgacttataagtgaatgatgacacagaaagtactagaaagaaccaatgacctctgaagaaataaacatgtttaaatagcaaatatttagtcctgagcactatatcagattaaatgtatttggttttacctttctttaatacatatagctcaatgccttgcacataatatacattcaatcagtgtttgttgaatgaataaatcaatgtgtgggcaattggatgatgaaaaatggaagttctgaggccactggaacgaggtgtatttacttgatctacaaaagctccatgaccagtgagactgggtttccaagactaatgttgctgtagccattatataaattcaattggttgtaaaacctcaccatttgcacctcccaacccacctcagctcttgcagagctttctacctcggaaatgcaaagattccttcaaacagacattactggaatcatcatcgtcaccatttattgaatgtttcctgtgtgccagacaccttaagaagcactttatgtgcatgattttatttaatcctcatgataagcctgtgaagaaggcatgttatctccactgtggacgagagaactgaaacacaaacatttaaatgatttgtccagtgtcacgtaactagcaaggagtccagccaaactctaagccaattctgggtgactccaaacactgtgggattagtcaccatgctacaaacctccttcttggagtcaggacacaaattttcagtggtgattaacatgccagatggacacatttcttttttttccctcttattttctttttcttggtgttatctttaactagctattctggtgagtgtgcagtgccagatcatggtagtttttatttgcacctcactactaataaacttactgaccaattggatatcctcttcctttgtgaagtgcctgttcaagttgcttgctaatttttccatggattttttttttttcttagcgatttagaggagctctgaataaatattctggtaacagtcttgggtttgtgttgaaaatatcttctattctgtggcttgtctttttactctcttcattttctcttttctttctttcttttaaaactttttggggaaaatgtcaattacatattcagaggcataaaagggggtgggggaatgtcaattacacatttagagacagaaaacaaagtatcactatcccccttcaccatgatttggcttcaacagctgtcactcacaaacaatcttatttcatctaatccccacctacttctatttctctcttcacctaatagattatttcgaagtaaatcttgagcatcataatatttcatccataaagatctcagtatgtgcccctaataaataaggactcctttaaaaaatacacaaccacaatttcattatcacgcctaaaagagcttagtaatcaaggattccttaattcataaaatattcaacaagtgcttacatttctccaactgtctcaaattgtattcttttac

SEQ ID NO: 33616 - DNA, 2300 bp, Homo sapien
gacaatggtccataaggtgtctctttgctaactcaagccctttatcttattttaaatatgcttattcacgaagaaaagcaaaacaaacaaaaaatgttccatgactatttctgctcattgagagattttgttttccaaattagtttcaaacaaattgtgctaaagagtgtacgtttatggacgtccatctcctccaaaatctaggtgaaaatctcttctaaacctacatgtgtttgaattaacagaatgccaaggaaaatcaaaattggatctaatagcactttgggaggccgaggtgggcggattgcttgagtccaggagttagaaacaggcctgggcaacatagtgagaccttgtctttacccttaaaatacaaaaaattagacgagcgtagtcgtgcacacctgtggtcccagcgactctgcaggctgaggtgggaggatgcttgagccggcgaggcggaggttgcagcgagccgagatcgcgccactgcactccagcctgggcgacagagagaatccctgtctcaaaaaaacaaaaacaacttccccaaccccgccccccgcccaaaccctcacaactttctggctgtaggaattctcgttttgcagctgaggaaacaggtttggaaattagactgcatacctaaaatcacttggctcatcaacctacagctccctctagggggctgcctcgcccttattggttatgtgcacatttggggtgaattccacggtcatctaacagaactgttttggtagtcccaggtaaacttacggtacggaaatttgtttcttgaggatacaaaaaagaaaggtgtcagggggaaagtaaaaattcaactcctaaaacatcgcgtgtagagtcaggcagtcacttcataaagagttcagtcgatgaagtttcactcttgaaactttactgtatgtatgcaagccctaactattaatacaggtgacagcatccaccttatcttccattctccctaagccctgagggtggggatgggggggggggcactccaatcacctgagcctaagaacatagcctaagaacatgtgtctggcatggtctggttatttatagcctaaaaaaaaaaaaagccagcttcttgtccgattcaggctttccctgcccaaacccactagcttaatgcgatattgacattaccaggaaatgcatacgtcccaaatgcatctgcttatagatgtttttacctcctgaaataataccgggtcacaaatactgttgtgttttttgcagagagcttctactgctcatttaattcaggggcgttggatttgtgctgagcgtaatttgactccaagcatgcaaactgatcaacttcttcccgtgtgtttggggagtacaagtgactactgcgactcctcaaatgtttttcttttccttttcacgtggaggaaagcgaattctccgaagactgttcggcgttctacgcaggggttggaaggggggttcctgagtcacctctggctgcgcggggggcctgtgtgtaccctcagggacaccaggctggaatcgtccaccttactttcaaatgataaaagtgcggagggtctttctgcccctaagtcgcgtacaggattgcctgtttacggagtacactttcacacacttctttcccggtggtgcagtctcgtggcggcagagcctttaggaaggctctggggggagacaagatcagtggcgaccacgcctcccatgttacagcgctcgcttcctactgggggttggcggggacaccaaggctctccagcccgggaacacggagttcggctccgttgtacccaactggaaagctgtggaaacacaaaactcgggcggcgacagcaccagccgattttccgctctcttggctctttcttccgcttgcaccgcccccaccccggctcctccgctcagcacacaggaacccacatcccccaccactcccgcgtttctctcctgccaccagctggggcctgccttttataggcgccgcagccaatgagcacgcttctttccttctgcccgcccgcctggccaatcgccgcgccccttgtgtaatctccggctagtcggctgctttcggctattttcgctgttgctggctttttcaggagctgctcgctcgcagccagagacgctgctttttttttccgggttcggagccgttccggatgctttaggctgccggatgtctgatctccgaataactgaggcgtttctgtacatggattatctggtaggtgcagggcaggggtggcatgtcgcctctcggatctcggcgtgcccgatgg

SEQ ID NO: 33617 - DNA, 2300 bp, Homo sapien
ggaaaggtactcttaagtctatccatttaagaaaatattaatctccatggagaagaaattttccatattttaaaatttattgtgtgtaggtatattccatatacactctataaataaaaagcacactggctgggcgcagtggctcatatctataatcccaatgctttgggaggctgaggcgggcagatcacctgaggtcaggagtttgagaccagcctggccaacattgtgaaaccctgtctctactaaagatacaaaaattatctgggtgtgatggcagacgcctatagtcccagctactcaggaggctgaggcaggagaatcacttgaacctaggaggtggaggttgcagtgagccaagatggcactactgcactccagcctgggcaacagagcgacactccatctcaaaaaaataaataaataaataaaataaaaagcacacactatcacaaagaagatggtggcaaaaataataataaaaatagtaagtaaataaatagcacagaagtatttacagtaaaaaattaggtctccttccagcccccacctgccaatcactctcaggaggcacccactgtcttcagctacaaagctttcagagagattttattaatataagcaaatacatactttttaaaaaagtataaataaggcctggtgcagtggctcacgtctgtaattccagcactttgggaggatgaggtggaaggatctcttcaggccaggagttagagaccagcctgggcaacataacaagacccccatctctaaaaaaacaatcaaaaaaactaactgggcatggtggcatggttctatagtcccagctactcaggaagctgagagtgagggatttcttgattccaggacttcgaggctgtcacccactccagcttgggtgacagagcaagactctgtctcaaaaaaaaaaaaagtataaacactagcatatcatatattgccctggacttttctttttgatttaacatatcttggagattcttccatagctgtggataaggagttgcctcattctttttcagggtaagtttagtataaagggtgatatagtggggaaattatatttaatttatttttgccaactcagtagcagagctgtgacaagattaatccttagatttttggaggttcatatcaaatcattcaaagctttgacatttttctcttctttgtggctctattttcatcactaaaattccccatcctatgcccctgcagcccccatctgacgtttgtcacttctctagcttagtcatctgatctaattttgatgagtcagatgtaaataaacccagataatgtgtcttttagcccaaaagactaaaagataaaataaaaggaaatgcataggacacagggcagtttgttgaatggctgagatttgaatatgtgtgtattaattctttctgaattacagctagattctgccctccccagctttgtatctggagacgagggaaaatgtgatcccagttcatattatgagtgaacatctctgactgttctaagaagtcctattcccttagattactgaagttcacagggagaaagcacccacccagatatttttggtttttgtttgtttgtttgtttgttgagatggagtctcactctattgcccaggctagagtgcaacggtatggtcttggctcgctgaaacctttgcctcctggttcaagcgattctcctacctcaacctcccaagtagctaagatttcagacataagccaccatgcccagctaatttttgtgtttttagtacagacagggtttcaccacattgttcaggctgggcttgaactcctgacctcaggcgatccacccgcctcagcctcccgaagtgctgggattacaggcatgagccaccgcacctggcctcacccagatatttttcaaataccattttcgattcccactctctttcttgaagtaagcaaggcagacacatttgccaaggataactgagaatgtaagggcaatccatgactgggcagcttgtgcaggctgtgtgctaaatgcactgggaaacatgccctataaatagccgttcattgtcagcatgtgtgaaaagacaagagagcattccgtgctatgattcaggcctaattaagtgattgcgtctgggcacggctataaaccactagctgcttcaactggtaatccagtcagtaggcaactgcaggggctcgccactgactgaaggcagtggaaggttggcagaaggaggctgttcaaggctgtttttgccttcactatggcaaaaatcattttgaggcacc

SEQ ID NO: 33618 - DNA, 2300 bp, Homo sapien
tgtgtaaactaaactgtgaataatatgctccattttctagagaaatctttacaaaatgtgttactgtatctatttccctgagtgaacagttataggttgttaatactggagcacaattttctacatatctaagaccctctagaggtaggggttttcctgccactagtggccatagggccaaacatcatgacagcctgtcctcatccttctggaagcctgatgcgcggcaagcacagaggcctcccactggactcctacaaagtaagcacctgcagacgcccatgccccagtgctacaaacaaccttggacacccaataattcctcaaccaccatttctacagagtagctcaaccagtctgtaaaaaatcatcaccttaaactcctggaattttcacacctgaaataagcccaaagttactgtacttaactctaatctaaaaagtaactactaaacgaacagaaggggcgaaactaaatttatttatcttacatattctaggttagcttttcagaagtaaaatgagtcatattctagaggtttagttaatgtggacttcatgtttctgaccacatgaaatgttggcattgaaattcaatgatccctgttgcttactgtgagaatagtcaaaacccagaattttcagctaaaaatgtaatttagaatatgcttactgaattgaattaaggttttgcattaggataaacactgtgggagtgattctggtatagtgggtttgtgtttttgtgcaagatgcttacaataccacagcccttagaataattgtacactcttctggcccgtttcccaggtttccttgaaaagggtcagaggacaggctgaaattaatgacacatgaatgcagaacctcaattagaagtgtcttcaaaggaataattaggctagacttaataagaggggattaagagaagaaaaagctttgggcaaattatacactgaaggaaaggaagataggaaacaaggcaacgatagattggagctgattatttcaggaagtgatttttgttctatttatcttaaaaataatataaatatagtgagacatagagacaacagatggatggatggtcactgacctcttactaggagtggcaatgtgaacattgggacgcttcctggtgcatgtaccctgcaattgttagtttagtacccctattccctttgtgaaagaggccagggattttgcttcccccaaataacagtaacagcagcaaaagcagcaacaaacccttcaaatctgcttaccctgccagatattgtttcactttcctcatctgtaaaatagggattactttatgatggaatccccacaacaacccccggaggtaggtacgatataagtgccttgttccaggtcatacagctaggtagtgtcagaacacagattgaaattcagaagcctggctccgaagtttgagctctcattcaccgcactacatatatctatgggaggataggcgacacatgcatgtaataaatgtgtgagcatttattgtactggaaactctccagctcctccctctctacatgatcctttgcttctaattttgtcaatcacagcaccttccctggcccttactttgttcttgccaatctcctctccttgagcagaagagggaagggagcctgctctgtaggtgaacagctcctccgcagaggcatcctgttttcttagtgcaatcactaattcgcattgcaaaatgctttattacatgactgggttgccattctaggagcattcactgagcgctcagagtgggaacgtttatcaggcatgcaaatgctaacttactttctagagaatgtttaacttaaaagcctaaagaaatctcagataattcacttcggagtagaaacctccttcagccgcgctcactacggcgcccggcttcgcggcaccggccactagagggcagtggccgccgcaaagccgacgcgggcggtgggctcggcggctcggccatcgcttgctctcgcctggcaaggggctctcggccgtggattagcgcagctggagacgtgggaggccgcgggccccgcccccgaccggcggcggctgcggcggcccagcgcggcagtcggcgctgcgaagtggaggcgctgcgagcggagccgcgcggagggcgcgaccggctggtccgggcagcgtgggtttgccgccttcggggctccagtccgcgcgccagggctcgagcagtaccgcgggcccctcaggtgggcctcggctcgggacgccgggagtcgggaccgccagtcggggcgccgggaccatggcgctgc

SEQ ID NO: 33619 - DNA, 2300 bp, Homo sapien
taccctctctaggcctcagttttctcatatctaagatggggataagaatagcacctagctcttgaggttgttttgaaagttaaatgtggtaatctacataaactgcttagcatggcatctggcacacagtcagatctctgtaaaggttagatattattattaaccactattccagttaactactcctcagaaagtggtgttcagtaacaagggacattttctagggtcagcctaaattgcgacctaggccattggaactattggccatgaaagcacaattatgtattgtaataggcaatagaatatgtggctctgacattagactaacatccatcccttcaatatagggaccttaggcaaattaacctctttcttactcagtttcttcttttaaaaaataagcatgataatagcagccacttcataatattgtgatgaggtgcaaatgagttaatgcatgtaaagtgtttaagctattaactcaacaaatattacccattactgaaaacatcagagtgtgccacctgctaagtaagtgcttctggggagatagagtatttcaaattggattgtcatgaaaaatttggaaaatttgaaagctaaaactcttgctttcatttcctactgcctcaattctctgtattctgaatttactccctgtgtccccctaaaattgcatttgcaaaagccgatcttcaagttacatccaatgcccgctctgcctcatcttctatgggaaacaagaattttagaggtcaggtagcctaacaccatcaattctcaaaagaggaagctgaggccaagagaagtcctgtgaatttcttacagctcatttgtgacagaccaagaattacccactttactgggttgttatttactaagtgacagtgagtctatatctcttttgacaagtgaggtgggggcatggaattcggcatgtggttggtgtaagaactcccctctctcctctttaaccttacttaataagaccctggcacagttgatattttaagagggctactctgttttcccagagggacctaggcacggtaaccctcttagcatgcagaccttgtttcctgaggggtaatgtttcccttccctgtgacttgtttcttgggggctgtgttctgattttcctgctgagccacttgttgccttgggctggctgccgcgcttggcagtttttagtgagggctctgatagatgccaggaggtgaggggaagggctctgggtggactccgtcattggacaagcagacttagtgatggatgagccttcccctgaggaagttttggatcagaagtccaactgataagtttttccagaattgagtaacccagaagcagtgccgaaaggatcttacctctcttgtggctttttgtattgattttaaaagaaattctcagaggcagttccacattgtactggaagcacagctatatccacaataggcttagatatatgtaacatgaattgctttagaaataacatttgaggagaggggtgagaggaaggaagagagggtcttaaaaaatagccctatcaaaatattttctttcttctaagtattgaaaagacacaatataaccctttcttctttcaaatgatctcatagctatttgttgaggggaaataccaaatgtttattattttttttgaagaagcttcttcggtcctgatgattcatgttgatatcattttcctcctgactacagaggctctgagacaaagctacacctcaagtgatatgccagggtcagaacaattcccgtcctgaaggagggtgtgcaaccttctttatccctccttcacagacgtccttgagcccttgagacggatgtgagtgagtttttcagtcctcatgcaaaacaaccatctaaacataacagatgacatcagcttgggcttttcaattcctggatggcagcagcgtgttaatccagccttcatcctggatttcataaaccaaaacaagagagcctggcaggaggacagcgctgctgctgggttgaggaaattgatgacgggaaagcatgcgggcaacccagtgtataaaactcataaacgtgtaggcagaggctcagctaccagtttggacggctgcttcccaccagcaaagaccacgactggagagccgagccggaggcagctgggaaacatgaagagcgtcttgctgctgaccacgctcctcgtgcctgcacacctggtggccgcctggagcaataattatgcggtggactgccctcaacactgtgacagcagtgagtgcaaaagcagcccgcgctgcaagaggaca

SEQ ID NO: 33620 - DNA, 2300 bp, Homo sapien
taaaacaagactaatgacaaccacttccctggaaatacagctaaaaacgttcagcaatttgtacaacgctatgtggacattaatccttactactcagaaataagcagctgagagatgtttgtaaccattcccatttcccccgccacacacacacacacacacacacacaaagcttcgtcctttacaatttatttcttccttagagtttggatcacttctacctgtcacacaccatcttccttacgatcccagcatcactgggatgtagcagggaactgacgccatcctgtctgccttccaatgtggaacaatggcacacagtagagcatccaaggtacatcaacagtgacaaagatgacttgaaaattcacagggacatttgagtgggagtaataagtttggtttattaagcttgtggcttttcttaatctggctcctccttatctcaccttctgctctgacaggaagtcactgctctgcgttggttttgttcattctgtttaacatgtagaaagctttactgttgccacacacctgtacaaggaaagcaggttttttataaaattctgtgttctgggagggtactcattcacatacaacttaacatacagggaggtcaggcaggtgatttggtctaggtcataagctgtgttgccttgggcaaattacttagcctcttggaacttatttcttccattgtaacataagttgtcctgctttcctcaaagacatagacatgaaaccataaatgatcatataaaaagaattttggaaataaggtattttacttatatattattaagttataatgaataatacataattatagtattattttttattattcctactctttgtgctagaaaacaatttgaaaggagtctcttgcaatctgccgagcataatagctctggattttaattctcctttctaaaatgaatggaagataaaatgcatacctcttaaaagaaagatctgttgatttaatgcaaattttgatcagtgttactaggaagtgattggcattctgatgcgtgatctgtttgtattcattttatatttgcactgctgatcagtgtctggcacaaacagaatcttgtagaatcttgagtctaataccttttgtattgaaggcctggcaatgcattgtcatctgttcctgggaagaattacaaaatgcagtcctttatttttaaaagacattattattaagtccctggaaaaacacatggccattttcaattaaaaatgagtaaaagagagactctgaatcaaaaatagttgccaatgttcacctttaacaacattatgaaatctcacaaaaatgtaactaaaatttaaccaaatttgggcaaacttagagaaacgacatgagtagggatgtttgctgcaaaacatatggttttctctggttggtgctcaggctttagctaagccacattgtgaagtaaccataatctgtgcaaggtccatgtctctcttcatcataaatctatgtccaaatgaaaaagagagaagaatgaaatatgataggcaccattttgtgccaggaaaaatagtaagtattgcttgagagcaatggacatctttgaactctgtctgcaacttcattacattcttatggcatggatatttttcatttataaatattatatacacatatagtataaattttctttatagcataagtactctgatacaggtattagagatggtatctccagatatgagttctttatggcatacatacctctcccaaaaaagtgctaaaagcaattagccggatgtggtggtgggcgcctgtagtcccagctactcgggaggctgaggcaggagaatggcgtgaacccaggaggcagagcttgcagtgagccgagatcgcgccactgcactccagcctgggcgacagagagagactccgtctcaaaacaaaacaaaacaaaaaagtgctaaaagcacagacctgaaagtccccaaactgatacataacgtttacacctaggtgtgaaaaaaaatcttacccctagagcacctgtggtgagaaagtcaaaacttacaagaacaaaactcagtcttcagaatcttcttccttcatcacaggatcaacacatttcatctgggcttcttaaatctaaatctttaaaatgactaagttttcttccttttctctgtttttcctaatagttggggcttatatgactcatgtgtgtaagtatctcctatatctacatgtaaacattaaatgaatttctactgactatattgttatattatagatgaaaattattttcacaatcatt

SEQ ID NO: 33621 - DNA, 2300 bp, Homo sapien
cacagccaatatcatactgaatggacagaaactggaagcattccctttgaaaactggcacaagacaaggatgccctctttcaccactcttattcaacatagtgttggaagttctggctacagcaatcaggcaagaaacagaaataaagtgtattcaactaggaaaacagggagtcaaattgtctctgtttgcagatgacatgattgtatatctagaaaaccccatcatctcagcccaaaatctccttaagctgatgagcaacttcagcaaagtctcaggatacaaaatcaatgtgcaaaaatcacaagcattcctatacaccaataacagacaaacagagagccaaatcatgagtgaactcccattcacaattgcttcaaagagaataaaatacctaggaatccaacttacaagggatgtgaaggacctcttcaatgagagctacaaaccactgctcaacgaaataaaagaagacacaaacaaatggaaaaacattccatgctcatggataggaagaatcaatatcatgacaatggccatactgcccaaagttatttatggattcaatgccatccccatcaagcttccaatgactttcttcacagaattggaaaaaactactttaaagttcatatggaaccaaacaagagcccacattgccaagacaatcctaagccaaaagaacaaagctggaagcatcatgctacctgacttcaaactatactacaaggctacagtaaccaaaacagcatggtactggtaatggctgcacaactatgcaaatatactaaaatccattgactcatacactctaaatgggtgacctttatggtgtgtgaattatgtctcataaagttgttagaagtcaacataaatggaagagcaaccattcacataaaaataaacaaaattgtcaatgttttaagaatttttcagtaggtgtagttaattacaatttgacttttttaagtctgcactaaaattactcaccaaaaccaatagcagggtcctcactgctgttactgaaaatgattaacctttgatacacttgtaatatctgagaaaaagaaatgcaggggtctcagcagggctcccttctaaggtcacttgatttctaaagaagtaaccactaggtttgaagtcatcaggatgttaactatggggatggttggttcagtacccaacatcctgacagcacatctgaccatgtatattgtatcggagaccacatcctcagctcagaaaaagagctgaactcatttcaaatagaaagcacactgcatactgttcctccagggactgaggttgactcttcttagagtgagacattccccaacattggaacaaaaatgactcccacttcttttctcacctaaacctgttcagaagaaagtaaggaagaaaggcaggaagcaggggtcgggggggggcggggagggagggaaactcggagatactttcagtatctaaagttgtgaaactagacaatcaggaacgcacaatcagagggctgaaaagggccaagagcccctaccctcctccagcccatgttcccacacctgccacagaccaggcaggagcacaataaacactcaccacaaagtggggaaggaaaatccaggcaggagcctctatgtaaataaatctccctcctgtcctcagcttgcacttggcctgctaattcttatataacccaaggagacagctagaaagaattttgattggtgaccaattttgaggacttttattaaaattctaatttaagtcttcgagagtttccagtcatggatactacagataatattgcagatgatgaaagcgtcttcaaaatcatagctgagacactttacagtcttccctggtgtactctgatggcaacaaggtcccttgcccctctcctaccctgtagaattccagcgcccccctcagcagtcctagcaaaggaaagcctgcctgctggcagtgagccatcatccaccattctcacttatttggatttggtttcctaatgctaaactttgaaacttgaaaaaaaaaatgaaaggaaaccacatcctttttactctcagtatatagatagaggcagttaagaactgaaaacagattttcaggttgattgatgtgggacagcagccacaatgaggaactcctatagatttctggcatcctctctctcagttgtcgtttctctcctgctaattcctgaaggtaagactgattcttctcatttccattatgaccatgaagcaaaatggagcagactttcaatgaacttttggcaatattaccttcctatactg

SEQ ID NO: 33622 - DNA, 2300 bp, Homo sapien
ccactatggaaaacaaagacaaaccaaagactcttgttgctctgaaaccaaaaaaagtttgaggtctaaaggttctcaaacttaaacgtgtgtatgtgtcatgaggagatcctgtaaaagtacagattctgactcgggaagtctggggtggggcccaaaatgctgtgtttctaacaaatgcccaggtgatggtactgtggaaggtcccagatcccacttagagagcaaggccagagagcttaagcaacatagcagtgttcatgtcatataaacacagggactttgactttttaaacaattcagccagagaacaccaaagtaaaattatcaggaagtgatacaacacatcttacatacatttttgttctttactaggaattatgtttaaaagggaatactttctgcataatcattgctttttctactgtatccattcttactgagccatgagagtaggagtcgagcggttcctctcacaagttttacacagtaggctatgggctttgctcagccacccgaaaacacacatgccacagagcgggaaccagaagagcaggcagcaccctgagcaccctctctgaagctccacaagctaacagtgacaggaagggcactccacaaacatctcagctcattccctgcactttctggaaacacatcatgatcaaatggcataatgccccttcatccagatcttgccatgagtcttaaacagagcagaattgaaagtgaatggcttttaggatatacagccctcaattgcctccccatacctacccctaaaattcatgaccgttagcaacagcaaagttaggccccctgtgccaggcaacagccaggggagggaaataaagagaaaaaacgaagcaattagatgacgtgcccaagtagaggtgggttttgcagggtttgtttgttttcagggattttttttggtagaattgccttatttaactgttaaattactactttattatcgagttcaatttttgcttttttccctcttcttcttttgttctgattttaagatagtctcactctgtcacccaggctgcagtctacaaacacgactcactgcagcctcaacctcctgggatcaagcgatcctcccacctttgccacctgtataactgggaccacagccatgcaccaccacaaccagctaattaaaattcttttttagagacaggggtatcgctttcttgcccaagttggtcttgaactcatgggctcaagtgatcctcccatctaggcctcccaaagtgctgggattacaggcgtgagccaccatgcccggcctcagttttttccatctacaggttgtagtgcatcggtgaatgatgaaatcattttgataggtcagaactgggttgtttaaaaatgcaacaggtgggggtgcatcacagttcaaaggagaagtgttgtttctcagttgtgtgttgtttgtacccagttatgttgtaaagtgcactgctgactgggggtcatgagtagaaatttgaaaaacactggactatagtttgctctatgatagagaagggtttcttttaacaccttcactgtttttaacatatttattttgactgtattcacttggtatttgattgccttagctagatgaatcagggtaaatagcctttttcagatatttccctgctctttccactataaatttcctgaactcatatagcatgtttaacccatacatgtaatagtaacgtccttcagggtatacaccatatgagtaggtcacatttaatctacattctaaactattgctgagcatcgtactccatcctctgcatccaaacagttgctcaataaatacacagcttagcatggggaatgagccctccgtagctttcgagttacaagagcaccatcttctggcgaaatattttctttgtagggagaatgtcaaagacctaccaaaaatgtcctgatttttctagcaaaaattataattacatcacaaatactttgaaattctgtagagctccttgcttcattcaggagtttcgcttcatttcccctctgagaagtggtctttctgttccttagcagtgaaagcagtcagcctgtccttcctggttttccgttaaactaagccggtttcaagtttcagctcctccttgaattccaggctgctgagacttccctctagaatcctccaacatggagcctcttgcagcttacccgctaaaatgttccgggcccagagcaaaggtatttgcagttttgctgtctatagttctatgcacagtaacgctatttcttctacaactaaaattcctcaaacc

SEQ ID NO: 33623 - DNA, 2300 bp, Homo sapien
atctggagaaatgtcccttcccgtcattatagccacacagctctcatgaatagtgctgggcattattagttaacatatgtttgtggctaattttatgttgtctttcttatctgaaacaatattctcaaagatgaatatgtcagcttaccagatttttgctaaaatccaaaaacatataacttggttttttcagagggcagtagtgttaggctatttctccaattaagctagctacagaaatctgtttaaagacttgccaaggtcacttagcacaaaggtcatgaggcatacagacagcataggctttggcctcaagctacctgggttcaaacccctgctcttttgtttttgctatgtggcttcttaacttctctgtgcctgtttctcatttgtaaaatgggctatcaatagtaccgccttcttaagattgtttggaattaagtctgttaatagtaaaaataaagtacttatacactgcttgctctgtgccagacactgttctaaaccatattagtcaaaaaaaaaaaaaaaaaaaaaaaggccgggcgcggtggctcacgcctgtaatcccagcactttaggaggccgaggcaggcagatcacttaaggtcaggagttagagactagcctggccaatatggtgaaaccccatctctattaatagtacaaaaattagccaggtgtggtggtgggcacctgtaatcccagctattcaggaggctgaggcaggagaatcgcttgaacccagaggcagaggttgcagtgagctgaaatcgcgctactgcactccagcctgggcgacagagcaagcctgcatcttaaataaataaataaaggacattagctaatgttctctcatctaacttattctgatgacatcttcagtcctattttcactgtaaataagttgagttttgatcaaactattacctcactcaggcaatcaagcttctaatccaacaaaccaaatagtgatctataatatttcacataaatgtgaagtcagaatcttctaaaaacattatatttaatttctagggaaagttgatataatgcctaacgccataaatggcaaccacagtgaggtctttattcctcttattttgaaggtccactgaggaaagaaaagcccaagcacatgccattgaactaatcattcttcagttacagcagccagatacgtgggtgcaatagctcataggttatttctctttatcactacaaaccttctaaaacccttcttagcctgtgtaatcaaaaaggtaacagtgagttaaggtgtcattccacttagataggaaggatcatagagcccaaaggttaagagcatgagctctggagtaaaaggcccgtatatcaatcctggctcaaccactcattagccacgtgaccttgtgtctaggcttccatttatctcatctgcaaaacggggatgataataatacccacctcatagggtccctgtaagattaaaagagaggatcaatttgaagcacggagcgtacattaatctggcacatagtaagcacttcataaattttagttataattattatatttttcctcatgttagtcaataaaatgaacataaatcttgagtggtataaatagaaaaaaaatctacatttcttacataaattaagatttatcaaaaggatatcatggctgggcatggtagctcatgcatgtaatcccagcactttgggaggccaagacaggaggatcactttagtgcccaggagttcaagcccatcccgggcaacacagcgagaccctgccaaaaaaaaagttattgcttttcaaaataaggtgattattcactttgggaggccaaaaccctatctctactcaaaatacaaaaatttgcctggtgtggtggcacacacctgtaatcccagcaatttgggattacaactttgcttcattttttttggcttttaattttatttgacacagagtttcactcttgtcccccaggctggagggcagtggtgtggtctcagctcactgcaacctccacctcccaggttcaaatgattctactgtctcagcctcccgagtagctgggattacaggtgcacaccaccacacccggctaattttttgtatttttagtagagatggggtttcaccgtgttgggcaggctggtcttaaactcctgatcttaggtgatccacccgcctcagcctcccaaagtgctgggattacagactgagccacggctcccagcctactttgcttcatttcttgatactaagatcacatactagatgagtagactcataggtgaagtcatcaa

SEQ ID NO: 33624 - DNA, 2300 bp, Homo sapien
ttttctcactattaaggttatgcattttgtggggcaaaaatatcacagaagtgatgtgtccttctcatgaggcacagtatgtcaacatgtctcactaatggtgatgttaactttgatcacttggttaaggtggtctctgccagttttggccagtgaaaagttgtgattttattttttgtgtttaattatagggggaagtattctcatcatatgcaaggtaattttagtattcttgacagttattactgtaatatttgccaagtggcgagtttctgtttccatcattctgaagttaagttttaatctgaatattcaactgcataattacttcctaaagatatttgactaatactttctctacttcacactaggggaaaaaaagacatttggaggctgtgtatatgtatgctgtggaattaatggctataatggaatttataaatgtatttttacagataattgcattctaaatgaatgattcactattcttagtacttgtaagaaattggattctaaaaatcccaatttacatggatttatgagcttattagttgaattgcttttattctgtgtttatacaaaatggttaaatgtaaactatatttaaaaatagaacaaagataatatgtccttcatattatttccaatatactttgagttttagttggcatttgcaaaactgatcatttaaattaacaatgcatctgactctcatccaataatagtttacttttatttagtcttaatgtttgctgaaagatttactggaatttggaatgagtactccactgcaaggaaaatagacttcttgtgggtgaaacttagagatcttttaatccactagttatttgactatcaaacattttgatatatgtcatttgaagattaagttaccctatgcagcattattattgtacatagaaaactggtctaagattgggtcttagttctaatgccattttttcttgctttcagtatgaaggaaagcaggggagtgagttttaggtttttttttttttttttttttggatcactgacccttttgagtatctgctatctatgaactgtttccccagaaaaacacacaaactcacattgccttagagcaaaatacaatccaatgtcaaaaatggttggggggttagcaagggagggacaaacaggctgccaggctgtcagaggcttcccagatgcagtgtcccctcctgccatatggcacaactcggctctcttggcagctcagatgggcagctaaggctgcacagcccatctggttccctgtcatttcccgccagacctcttcctcaaccctcaatatcttcctctccccctttatcacggagtccccagtgtgctcagctttctggccccctcttcacgccttatgaggtcctgcctgtcactggttctttcactacctcttcacctctctcacctaccccctgctaaggaacagggctcagaagcccgagtgagaggacctgactactcccaatgtatagagcagggaataatttattgcataaatatgtcaacgctctcccttttgatcggcatagaaatcttgccacgttttcttgccttctgaaaacgaagagctgacgaacacgcctcacatctatagctgacacagcgattaccaacggacagaggccggagagctgtgcacgctcggatcctgcaaaggcagggtgtggttggagaaagagaagtgggtgcagaggaacagggatcagggccgttataaggaaacattcttgtttctgaaaatggaaagatcgtgaactcccagaacccgcttcttcgcccgccaacccctccgcctcctgccgcggtggcagcccccggcgccaggcccagccgcaggcccgccacggctcgcggcaaagcttggcgcccgggtgcgcgcctcggccggaggcggtggcggggcggggcccagagagggccggcaggggcggggccgcggcgcgcgccggggaatcccacccgggctctgacgacaccgcggcgccggccaataagaagccggcgagggggattcccgcgccgactgccgccccgccggctttttaaatggtaccctggggaacaccttgcagcggcggtgggaggagtgggggacctggagggaggtggtgaaatagaatggtcctgggggacgggactccaggggtttgacgattaggcgtcaagactgacttagacctgggaagaaaaccagaggcagtcgagcagagaggccaaacgccaggcagggcgaagtcagccggagatggagtggaaactggagcgcaccg

SEQ ID NO: 33625 - DNA, 2300 bp, Homo sapien
tttgggggaaaatctgtcatgttcccctgcacctagggtatatcaaaatgtatgacaaatacaaataaaaagcaaactcaaatttagagaaacttctttgcacttctctcaaagtgtgtcttccaggtgttctcggagccaggagtgccttactctgggccccttgaatgcctcttctgacatattgctatgctaaactttctaggaactttctcctccttggctgtggaagaaggacgtggtgatccccaagctatttgtgtaaaagctgctctgtgatggtgaaaagggaggaggaagatcatatcacctgtttcaaataacaaattattagggccctctgcttggttgtaaggggttggggtctggtccccaggcaaaagagtgactttgcgcggagttgtcttcaccaatatctgctccattaatcagccaagactgctatgagttactggttccagaatcatccacactaggagtcatataatcatgctattccagttcctgttacaacagataatgtgcaatgcccatatttttgtctactccaacttagaactcattgacgaatatttggaaaatgggcctatcctggaaattttgtgacgatctgcatgtgtggagatcgccccaaaactcagctaagagcttccctactcattttaaaggctggaaagtgggtgaggatggggatggagatggagatggactggctagtggtcgtgctactcagaaaccagaggaaacaggagacagggctaggaacaagttgtgggaagctggaaatacagctgaaaaggcttttaaaaaatcactaatttacccatactaagcaccagtcactttacataaataatctcactcatcttcacagcaactctattgaggccagtgtaactttttttcctaaagacctagggctcatggacctggtcctcaggcactctgaccctaaagccagagctcctcaccatgagccataccacaccaactctagctggctgacctcacatcaattcagtttctgcatctactcctgggtcagagagtctctcactctattccagctctaccattggattaccttccaccgctgttagggtatcttgtttcttactagaggctctttcactacgactactaggtataaggggaaaacaaggtgcccaacataggggggtgggtacacaaagattccaatttcagacgactgttcaaattggatgaatatgagtggtactgagaaaggtccctcgcctaaggatgcccctccctaggagatgcctcggactcaggaaaatgcccattccttggagaggtgttggcttgggaatggcaactacgactgcgaagagaccagccaaacgtggcgatgggccgctgaggccactaggaaagacaggaacagggttttcggggattcggtactttccactgtggcgttttcagaaagtggaggagggttcgtagtgtcactttttcttaacggacggtcttttaaaggctgtgctcacgcgccactgccgagaagagtgcggggcttggggagcggggcgggctcttggcgtcaggccaaaagagaccacgtggaaatccataagtcaggacccaggataaggttcaggtttgagggaaggggcttctgtaataagggggctgttccagggcatccctgccggtattctacatccttactaaatcctgcaggagcgcaaaggccggagtctagcgctggcgggtgtcactccacgtttatttcgtgcgccttgtggctggagtgggaagaaaaggaaataatcgttaactttgccattccccctgtctgtaagcgggaagacggtacccagggcgagggagaccggcgtttgcccgcccctccttctccctctcttcgcctggcgcgtccgggaggcggcggcgccaaagctcgccgaaacggcgctggcgggccggggccccgcgctggcggctcccgggggaagcccggttgccaggttgggtttaacgcctccgcccgcgcgcagattgtcccgggctgaaggcgccacctctggcgctcaggcgcaagccacccctcccgcgcggcggtcctccccctcccccgccatctctcagcacctcctcggcagcccctcggctccttctcggtcacgcgcctgccccaacctctggctggcttcggagcctgcaggcactgaagggagtgcagggtgtggatcgctgccccagcccgggccgccgcctccgagcagtcggcacccggaggcaggaggcacaatgcaggcgtgcgggggcggcgc

SEQ ID NO: 33626 - DNA, 2300 bp, Homo sapien
gcgattctcgattctcgtgcctcagcctcccaagtagctgggattacaggtgtgtgctatcacccccagctaatttttgtatttttagtagagatggggtttcaccatgttggtcaggctggtctcaaactcctgacctcatgtgatccacctgccctggccttccaaagtgctgggattacagtcgtgagccaccacgcccggcccaaatgacattatttagggcagaatagagagcttgctcagagttatggggaaataggaggaacagtggtcagaacccaaaatccattccttttctttcacctgcatctctaggagacaccatcccaccatctactaaattttcatagacagaaacttgtactttgagcagacacatttatcagctttcttctggaatgaggttaggtggctgaacctgctcttggtttggcacccagtagcctcgcctctggaaaacaccagggttgagggtacctgagctttctgccgttgctaagtgcctgtgaggttgattatgggctacttgtgctcctgcagccccttctcctatagggtcagagaccctcaggaagattcactcaggccacagaagggctccagcttctaccaggacgggagtctgtggactaaacccgaggcgccttgaggaaactgccacgcccggtcggcctgggcgtccccattccagctttaatttccctgagtttatcaccctgaaggagcggacgcaggaagcagggaaaaaccaaggactgggctgccggcggggcagaaggccagaagctaatgacctaaaacggaacaggctgtgagcaattcgatcaaactcgaaatgcaactttccaacaatgttcttaaaccgctgtagccccagcttgcttggcttggggtgaaaagtgtgggagaaagtcttcacggcctgcagacttgcttgccgactgaggttgatccggcagttttccgttttgttttgagcgcgaaagcgtggctggctggtggagctccaatctattccgcagcacaaacggcccttctgaggctctgctccccgaggctggcggaaggaagggcactggctactccggtacccaccgaaacaaaaccgacaaacgcaaccgaattaacactattgcttgtttgggtcactgaagaaaacttttcccgtgtcgacagaattctagcccgactttcgtttggaactcaggatcagacctttacaaaattaccgacctgggttagaggtgcccgcacgtgtcgagaccatctggccaaggacagagagatgccccctgggagaatgttttaaccggcgcagcggagccgcttggctgcgcccgccgcagccctactcccactccgtgcaccgggctccgcagtgacccgggctccgcagtgacccgggctcccgcagcgacccgggctccggttgcccaggtaacgcaggacgcaggcgcgaaaggcgggtgcctggcgcgcgctgcagctccccctccccccggcgggccgcggaggcgacgcgctgcctgcgccctgaggcgagtggttctccagccggaaaatcgcggctccggtgccgctctgggctcagccagtgagaggccgggggtgtggtagagagaaggagccggccgggtacttaggaccgcgccagcctctgagcccggcctccttcgcactttcgagtgcgcgtttgctgcccgccgcagcccgggcgttgaaggtagtaaagcggccacccggccgcatcatggtgaccccctgtcccaccagcccctcgagccccgccgcccgagcggggaggcgggacaacgaccagaaccttcgcgccccggtgaagaagagcaggcgtccgcgcctccggaggaagcagccgctgcatcccctgaacccgtgcccgctcccgggagactccggcatttgcgacctgttcgagtcccccagctccggctcagacggcgcagagagcccctctgcggcgcggggtggtagccccctgcccggcccggcccagcccgtggcgcagctagatctacagaccttccgcgactacggccagagctgctacgccttccgcaaggcgcaggagagccacttccacccgcgggaggcgctggcacggcagccacaagtgaggtgctggtagagccagctccacgccgccgctcttcctctcctcccaggctctctcctctcctgccggctcggccctccgagcgcccgggcccgcgacagcccaggtcccgccccgagtcgaagcacaaggggccgtggaggggcgtcaccggcctcatttt

SEQ ID NO: 33627 - DNA, 2300 bp, Homo sapien
agaatcgcttgaacccaggaagcagaggttgcggtgagctgagatcatgccattgcactccagcctgggaaacaagagcaaaactctgtctcaaaaagaaaaaaaaaatagatgaaagcataattagatttaaaaaaaaaaaaaggaaaaaggagttgacttcctgctcttttcactttaccacactggccacctgggccaatatgaaaaaatcagaattcctggattctttcttctcacccagaaagcttctctaggaagaagtctggtatctgagtcctctccacaggttcaattgctcctcccataatgttgctcctcccaacaatagtctgagagacagtaaggcctggcaccactcccagtgtttcttagctcgtctcccatgttagagatgagattatttatttatttttcttttgagacggagtgttgctgtgttgcccaggctggagtgcagtggcatgatcttggctcactataacctccccctcccaggttcaggcgattctcgattctcgtgcctcagcctcccaagtagctgggattacaggtgtgtgctatcacccccagctaatttttgtatttttagtagagatggggtttcaccatgttggtcaggctggtctcaaactcctgacctcatgtgatccacctgccctggccttccaaagtgctgggattacagtcgtgagccaccacgcccggcccaaatgacattatttagggcagaatagagagcttgctcagagttatggggaaataggaggaacagtggtcagaacccaaaatccattccttttctttcacctgcatctctaggagacaccatcccaccatctactaaattttcatagacagaaacttgtactttgagcagacacatttatcagctttcttctggaatgaggttaggtggctgaacctgctcttggtttggcacccagtagcctcgcctctggaaaacaccagggttgagggtacctgagctttctgccgttgctaagtgcctgtgaggttgattatgggctacttgtgctcctgcagccccttctcctatagggtcagagaccctcaggaagattcactcaggccacagaagggctccagcttctaccaggacgggagtctgtggactaaacccgaggcgccttgaggaaactgccacgcccggtcggcctgggcgtccccattccagctttaatttccctgagtttatcaccctgaaggagcggacgcaggaagcagggaaaaaccaaggactgggctgccggcggggcagaaggccagaagctaatgacctaaaacggaacaggctgtgagcaattcgatcaaactcgaaatgcaactttccaacaatgttcttaaaccgctgtagccccagcttgcttggcttggggtgaaaagtgtgggagaaagtcttcacggcctgcagacttgcttgccgactgaggttgatccggcagttttccgttttgttttgagcgcgaaagcgtggctggctggtggagctccaatctattccgcagcacaaacggcccttctgaggctctgctccccgaggctggcggaaggaagggcactggctactccggtacccaccgaaacaaaaccgacaaacgcaaccgaattaacactattgcttgtttgggtcactgaagaaaacttttcccgtgtcgacagaattctagcccgactttcgtttggaactcaggatcagacctttacaaaattaccgacctgggttagaggtgcccgcacgtgtcgagaccatctggccaaggacagagagatgccccctgggagaatgttttaaccggcgcagcggagccgcttggctgcgcccgccgcagccctactcccactccgtgcaccgggctccgcagtgacccgggctccgcagtgacccgggctcccgcagcgacccgggctccggttgcccaggtaacgcaggacgcaggcgcgaaaggcgggtgcctggcgcgcgctgcagctccccctccccccggcgggccgcggaggcgacgcgctgcctgcgccctgaggcgagtggttctccagccggaaaatcgcggctccggtgccgctctgggctcagccagtgagaggccgggggtgtggtagagagaaggagccggccgggtacttaggaccgcgccagcctctgagcccggcctccttcgcactttcgagtgcgcgtttgctgcccgccgcagcccgggcgttgaaggtagtaaagcggccacccggccgcatcatggtgaccccctgtcccaccagcccctcgagccccgccgccc

SEQ ID NO: 33628 - DNA, 2300 bp, Homo sapien
tcaaaatcaggaatgaagaaactaaaaatgtggactggaaaatctaatccttattccctccccacccaaacacacacatacactcatacactcttccccccaactcctctacccccattataaaaaaaataacaggatagccctactttcacattttaccctctttgctcaaaattttactgaagtcaaatttagttccactaacatctcattgggtagtgttcattctttgatttcataccaattttattgcttttttaatctgcagaaatgtaatcttggttctcctgaagatttcctctccaaagccttagatcctcctcagctccaagtgatcagcaatgcaatgaatttgctccgaaaaattggagcttgtgaattaaatgagcctaaactgactccgttgggccaacaccttgcagctttacctgtgaatgtcaagattggcaagatgcttatttttggtgccatatttggctgccttgacccagtggtaagtcaaacaatgctgctgcttctttactttaaatatcctttgaccaggaaattacaagtttggaaacaattgttaagtaaaaatttttttaactaaatagaatgtctatacgaacattaaaaccgagagggcctgaatgcttgaatttttttttttttttttttttgagacagggtctggcactgttgcccaggctggggagcaatggtgcaatctaggctcactgcaacctctgcctccggggttcaagtaattcatgcctcagtctcccaagtagctgggattacaggcacgtgccaccacacctggctaatttttgtatttttagtagagatggggtttcaccatgttggccaggttggataagaattttttaatataatatttaactttttatatttatatacttgaaaatctgttcatccattactgaagtgttctgtaagtactattttgtgagtgattttggcttgtctaaacttttgttttcaacccacttgaaatatttaatggaatatgtagtggatgattcttaggaagctttgaacactaccagctttgaaaagtaaaattaaaaactttttttctttccttttttgtcctctctctctgagccaataattagcagagttctcttttctcaaattatgtcagaattaacaaattcaaatctgtctgagtctctgggcacaaagctttacaactttatcaagctatggccttttctgggattaccaataaaggctatttaaatacagaatggaagcctgggcaacatagtgagaccctgattctgcaaaaaaattaagattaaaaaattggccgggcatggtggtgcacccctgtagacccagctattcaggaggctgaggtgggaggattgctagagccccggagtaggagggggcagtgagctatgattgggccactgcaccccagcctgggcaacagaacaagactctgtctctaaaaaacccaaaaataaaaataaaaacagaatgaagaaaatgtgacttattactatagtctctctttgtttggtatttgaaatagatattcactggaattttgccaagttcaaaaaataacctcttccatgatagtttatctgaaaacctacaacaacaaatggattgttatgtagtccaaattatttttaaagatcacggcagactaagagtggaaattcagtggtcttgaggccaagataactgagttaggattcccagattgcctctaactgtatgacagactgtaaatcatttatataaatgttcagatttttttctctgattgtggtgataattgcctccttacctcacagaaaggttataaaaggatttatttttgaaattccttaaaatgaaacaaaaaataactgtttaaaatgaaaatataagttagctatagaatattttatattaaacattaattagtataataatactaataaacataataaaatattgaaaataaacaggcaacttaaagtgtgattgttttatgatttgctttcttttataagttaactttcactgtattgctctttaatgataaattgttttgtcatttatgatttatggataggcaacactagctgcagttatgacagagaagtctccttttaccacaccaattggtcgaaaagatgaagcagatcttgcaaaatcagctttggccatggcggattcagaccacctgacgatctacaatgcatatctagggtaaaaacataatctggctgttatcagtaagccaattacctgaggttatttactttaaaatatattacctttgacttatt

SEQ ID NO: 33629 - DNA, 2300 bp, Homo sapien
tgtaagtggccaagaattggaccctagcaattgatttcagagtctgaacacttaacccctactgcctcccttccaaacaaatgaatgataaaacctgttttgttatcttgatacactttatccttttgtgctaccttaaatctgttataaaatagagtagaaataagtcacagtacagaaagttggaagacagactcatacagtccacagatactaaagttctgacagtatacctcatccgtgctcttccctaagatgcatgtgttggaagagcataaaacccttttttctgacagtgatagagattctgtcggattcctgctagttaatgcctctttttctacctagtagataaaccatctgtcttgtaatggtgacagtatagttttatattagtggcagagatttaggagtcactcttgcttctaagtgaaatttgggatataccttacatcttttttttttttttttttttttgagatagagtcttactctgtcgcccaggctggaatgcagtggtgtgatcttggctcactgcaaactctgtctcctcggttcaagtgattctcctgcctcagcctcccgggtagctgggattacaggtgcacaccaccatacccggctaatttttgtatttttagtagagacagggtttcgtcatgttggccaggctggtctcaaactcccgatgtcaggttatccgcccgcgtcggcctcctaaagtgctaggattacaagtatgagctactggcaataaggaactcctttttcatgcacccctcaaacttagggttgcacccagccttatcagctacatctgatctgatttgcaaaccgtctcctagggtagagtcatgctgtcatggctaatctagttcactatatgattttcagtgacttccaattttagagaatgactttattttcagttctgaagatctgtcttatttaaaacttacagcttctccctccccgcacatgtactgactgtacttagatattgaataacttttagtaaatctgggtgtctgattgttcaagcctcttactagaatttatacaatatatgatgaacttttttattccctttttaaaactaggttcatgaaagaagtgtccagtcagacttcctactaattatcttgaaggaaattttacagaaacgttctgatctacacttgattctaatgagtgccactgtggacagcgaaaaattttctacatatttcacacactgccccattctcagaatttcaggaagaagttatcctgttgaggtaagttttctttataatgtgtgtataagcagaaactgcattcccaccaggttctttccctagaagatgggcacttgtagtcagaggccagaactattcctaggtacagtgagtcagcagaggagctggacacagccttaagaatcagatgactgttactgccttgcctgaggctggataggagagaaaggagggtattgactcaagacagcagtgagggctaaagaacataaacctattttcacgtgaaaatcattatattcagattaagagttgctgcccttccctggtcatctgatggctatgggaaaaaaaaataaaaagagtggctacctggcaataaggaactcctttttcacccacccctcaaatttagggttgtctttgaagcttcctttctacatattccattcttgattcttaccttttcagttcagctgatacaatctattcttaactgtttcacattatatgtgtatatataaatatatctcataatgtaatttgtcctgagactttagaggcaatccctctatgtcaaccaagtcttcattcccaaataatactaaaaattttttttcataatattctaaattaacatttggtgacattcaaaaggtggtgtcccctgttctctttaaaatgatatttactgaaacgaatttgaattcacccatttatatgccttattctatgcaggtttttcatcttgaagatataatagaagaaacaggctttgtactggaaaaagactcagaatattgtcagaaatttctggaagaggaagaagaagtaaccattaatgttacaagcaaagcagggggaataaaaaaatatcaggtaaaaagaaaatattttgaaagatatcagataatgatatccagggcctaacctgccacaagagtttcaaaatcatgtggttaacacagtgaatttgagtataatttgatagatgaggaacagatctgagaatgaacaaattttaaaggtcatttctttaatctttatttcatagactgtagt

SEQ ID NO: 33630 - DNA, 2300 bp, Homo sapien
atgcaaagtgaaatatggaaaaacagaaacaaggaagtcgaagaaaaagttagtttggggaaagaagagtggtttagtactagccctgttaaatttgagatgcttgcaaaaaatagggtcagagaatccagcaaaatgtataaattgccaacttgagcttggaagagaggccatctacaaaggaaaagatagaagtaatggaaatagatgaacactcctagaagggctttaggagtgaactatactgtcaaggattgacaccttgagaaagggtcacagtttggggctggaggaaagggaattcaaagaatacaacaaatgactatcggttcaaattcagaggaatgtcagtaaaagacaaaggaaaagtaaaaaagaggctgatccacagaataaaactgccatagttgtcagggagaaattctatgtatttgtaattacaagtatgctaactctgtagctaacactacaataaatcgcagggcaaagaactgtttccaccttctaggtaaaggtctggtacctgcctactttttcagtctcatctcatttcatcctttggcgatgctttatgttctgtgaattcctcaagagccccaagctctttcctgactcaaactttttacacatgatgttcattacgcccgcctggaatactaatttctgccatgcttcacagagttaactcctttttcattctcctcatctcagcttaactgttacatttccagacaccatccatgatacctgctcatcccgagaaaaattagattaccctgttaaactgtcttccctggcttttctttgtggcacttatctattataaggctataaatatgtctgtgtgcgttacctattagttaatacctatctctgacattagactggcaagctccatgaggtgatgtctctttttgctcatcacattcctcacatcttatcagacacatactaaatatttgcatatatacacataaatgctcagcaaatatttcttgaatactccaataagtacaagcaaacaacccgagaagaacacaacagaatgtaattgttcatcttttgagctcaaccgtaatatgtggcctgctcatctgcagcaggaatcggccatctataagttgagttgtcaaatcaatttgtacagtaagcaaaactgcatggcggcagaaacgagggcagacaattttacaatagattacacgtaaccagtgtgtaaccagtgtgtaagtcctgtaatttttattaagtattgatttttccagaacgcatggagacactagattgttgctgaaaatgatatgaaaaactgacagaaaatggggctggctggcaccaggaggtcaggaactccactcagtactcgtctttgcgttagcctagctagctgagatggtgctcaggatgaattcctgctgaaacaggagctaatgcaattattttgtttttagaagggggagaagtgtgagttaaaagagaaatgccaggctgcaacagggctactgtcagaattttggaggcccaaagagcttagacttttttaatctaaaacaaggccaccccatggggaggtagcagctcgagtgttgggaaatagaaatgttgggcccgaagctcctcccgggttctaaggccctttcctcaggacaagcagcaaggtctcagggcagacagccaggggctgggggacctctcgtaccttgcttgacacggggctccctggagccggcagcggcagcggcagcggtggccggcctggacactggcttcttgctttgggcctccccggcaattccagcctcggcagatttggctctggaagcagacacggcggcccggaccaccgcggccgctggagccttgtgtttcttgttcttgccgcccatgttgcagctgtggcagaagatccttcgcggcccaggccccgacggtaccactgcacagccgagagctcttcacattccccggctccggggctgccaccctgcgcttcgatccgggcttctcgggccggggcgaccgctgcctcgcaattggtcgaattcagcaggctccgcctccttgagtcgccagctgcctgccacacgccaggcgccacgcgccgccctcgctctttatccactgagcagcttatccactttaggtcggaaaggaaaggaaagaaaagcaggaaaaaaaaaaaaagtcaggggaacatttttgtcggctgcgcgactcgactacttttgtctcctgcgggccactgttgagccttcacgagacgtcactgtcttcggtcgcggggcatcgtgggtaggagg

SEQ ID NO: 33631 - DNA, 2300 bp, Homo sapien
ttacttccccacagagatctctatctcaaggagaccaattcaaatgatattcaaatatatacctccagtcctggtctctctccaaaaccctattaaaactacccagtggacattttcctacagacatactagcatcccttcacattgtctcaagccaaattaatgttatcactatatcaaaacctctgaacgtccctgtttttttcaccctgacatgcaaattaaacatctcttttgacttcctttcccttgttttccttaattaatgaaggcctgtccattttttccttaacatgttcgtacctttccattcctctgccactgcctgagttgaggttcttttcatctttacaaccagataactaacataatttcctaatttactttctcactgtctatcttctttccctatactattatagtactctgccaaccactgccaaattaattttcctaaactatcattctacttatccaatcaccttgttcaacagggttttaaaaatgaaatcaaaactcctctgcttgatattcaaggcccctcatgttctcaaatcaatgtatattcccagtcttatctcttgtagtccctaaatgaaacagttcctcttgctcaatttatgctcctaaaaacaaacaaacttggcaccattaacaacacaatttccttaactcagaatattctcttgtatataaataagccttcctgaaagtcagaaataggatctccctttcttgaacttttataacacttaattgtatatatcattcattttaagttaacgacctcctcacctatactgtaactctttaatgggtacctgttctctttccctacaccgaaaattccttgagagcaaaatcatgtctaatttaatttcaagcatctattgggtatctggccccacaatgccaagagtatattttgttgattgttaattaatcatcttactttatttaatacaagtaatagcttttccttgttctactataaacagatctgtacactttctggtggctgtatgcaccagtctaaacatatgggtagggtccagtaatttttaaattttttctcaataaactcacgatagctaccatttattagtgatagctagctaaccactgttaggcactttacacgtgtatctcattgaatcctcatatccaccagtggtaggcactattatctccattttacggaagagaaaactactacatcttggagattaaatgtctctcccttctcatgttattatctgccctttcccctccaaatcaattcatatcattttttctaaaccttttcaccttttactcaactaatcattcgttttgtttattaacgactatgtgccaggtgttgtgctgatgcaggagacaaccgcgaagatggggacagaatcagtaacatcgacgtaagggaattgaagcagaagatcacgctgcctgcagacaccaggaaacgccaagaccccccttccacgaaccaacattcttccaccctctccaacttttttctggaaccccttcacttccaacgccactcaatgtacacttcactttctcgtgctcttcctaagagagtagtgttttcttcctccccaccgagaaaaaaaataaaagcaacaactggaacttcttccttaccctgccttgtctgcagaccctggaggccccttccatttccccttgtccttttccttgtcttttttggttcccgccgcagtggtcgagtcgccctcgaacacgctgaacagctcatctccgaatgcgtccgccatttttgggagcagtgagagcaaatctccctcctacccacgatgccccgcgaccgaagacagtgacgtctcgtgaaggctcaacagtggcccgcaggagacaaaagtagtcgagtcgcgcagccgacaaaaatgttcccctgactttttttttttttcctgcttttctttcctttcctttccgacctaaagtggataagctgctcagtggataaagagcgagggcggcgcgtggcgcctggcgtgtggcaggcagctggcgactcaaggaggcggagcctgctgaattcgaccaattgcgaggcagcggtcgccccggcccgagaagcccggatcgaagcgcagggtggcagccccggagccggggaatgtgaagagctctcggctgtgcagtggtaccgtcggggcctgggccgcgaaggatcttctgccacagctgcaacatgggcggcaagaacaagaaacacaaggctccagcggccgcggtggtccgggccgccgtgtctgcttccagagccaaat

SEQ ID NO: 33632 - DNA, 2300 bp, Homo sapien
agttagtaaccattacttttcaatgtgcagtagaaatactgttccgctgccttgtcattgaggctcttgttaggttgtttggaaagattaaccctggaattgctctttgtaggctatttcagagtacattgtatttatagtggtttagtctactaattttctactggatagattaatggtgagaaatagttttcagtaaggttctgtggcttaaaatattcttgagtaaagtctgcatttctaactataaagcttcagagaatataattttagatattatcacagagtgacactgtagtccaactatagtccaaagtatatatttatttttttcagaacgtggtgtagtatgggaagaaactattattttgcttcctgataacgtccactatgtctttctttcggctactattccaaatgcccgacagtttgctgaatggatttgccatttacataaacaggtattttttcctccttttttgatgtcttcaatattcaaaatgttacagattagtcttgctttactctccctttgcttttctcctgatgttgtccagaataataaaaaaaacattttaatggtaaactgcttctcaaatcaagcagcttatcaaaatcaactgactgactttttagaaatgttgatttctgagccccatctcaaacccactatatctaaatctcaggtaatagtgccttgggaactccaattttaaaaattccccaagttgatctgatgatctgccaggtttagaaactactgcatttactcaaatagttatccatgagtacacagaatttcccctaatgccttggtgccaggaaaagctgggcatctctggagcatttgatttgatttttctcatgtaaacacagactttttactgactttctgttattgcctttctagtctgactttagcgtctgtatatgcttgtaataggcatttgtttatgtatactgaatttattcttgcttttatttttctgcccttaattttcctttacactgatgttctcatgaacttatctgtttataagctccctgatcgtgtttttatggcattctcccatattgcttctgtaggatagaaaaatccaatggatcttggggagaagctagatcaagtgctgctttatactaaggttttgaaaagcctgggtggggcagaaaagttccattttacttcatggatcctttgtatcaccgtatacctcctctatagaaaaataagcatctttccgtaattacagcattccagggctaggtaatgggtagttgatgctcaggtcatgtatttagccctggttagggaattggtaagttgggaagatggtagtataatttcatagacctaatttttctacgtttttctcttgcctgggttttagtgaattttttgaagtgttttctttttgaaatgttgaattcattacttgattttcttaagatcttttaggttggactaagatacagttttattttgaggaaataaaattttgtatgtttaattctttctttttacagccttgtcatgttatttacacagattatcggcccactccattgcaacactacatttttccagcagggggagatggcctgcatcttgtggttgatgaaaatgtaagagagtaattgtcctttttaaatctataatgtcatactttattattaatatcttgttgttgttgtttttaaattttgaattagagaagaatggaaaagatacatttgtttgtcttagttttaatcaatcgatcttgatttttttgtgtgtttttatttcaaacattatgtttgagacttgtgtttttcttatgcatgaatcagatttccctcctttcccagtatttaaaaatacctagagaataggggttctggacatgtttcagatatcttatgttttgcttttcttcattttttattccttctttttcaccttttaatacctcttaccacagatcatgtttggactattttagtggctttcattattatactaaattatttttatttggggaagccttatgtatgaaaaatgtttgaattatgattaagtattagtgaagttacacagaaaaaatttgtgattccagggtgacttcagagaagataattttaatactgcaatgcaagtgcttcgagatgcaggtgatttggccaaaggagaccagaaagggcggaaaggaggaacaaaaggtaatttggaactttgctttgagagaattttacatgtaaattgtatattcagattactctgatattttttgtcttagtttttttttctcaagctatgt

SEQ ID NO: 33633 - DNA, 2300 bp, Homo sapien
actgtacaagaaggcagtgcaatggttaagaaagagcatgggctttggaattgtttttctcacagttaatagtggtgctaattattaaaaactaagtttcactttacttagtagtaaaatgtagataataatagttcctgtgtcctgtaattgttagacttaaatgttgtatgtaaagcaccagatgtggttattgttactatttttgtaagatagtacttttttcatgaattaagtctactagatatgttttgaaaggcagagaattatattgattatgtggtaatttttatctactttctgcttgaccatcttaaatgccacctctttacttttgctctttaaagactctttttttttttttttttctgagatggggtctcactctgttgccaggactggagtgtagtggtgcgatcatggctcactgcagcctcagcctcctgggctcaggtagtcctcctgtctcagcctcccaggtagctgggactacaggtgcacgccgcaatgcctggctaatttttttgtattttttgtagagacagggcttcgccatgttgcccatgctgttctcaaacttctggcctcaagccagccacctgcctcagcctccctaagtgctaggattacaagcttgggacaccacgcctggcctttagattcttattctttgtaatgtgtgaagtttggtatcactaactcattttgatatttctgtacccttgaattttctcctagatgaagaaaagaagatggttgaagaagtattcagtaatgcaattgattgcttatccgatgaagataaaaaactccctcaggtgagttttcagtatcagtagataaaagtgtagataataatagattgcatatattcactttacattgcttggttttattactctattgcacttttcacacactgtagcatatgggttgtgatatgcccttaatgatactttgacttttactttaaacttcaaaaaggcaataggaagaaagatttgctgcctgaaggaacttttctctgagagctagtatggtgtgaaaattactgctagtgttctcagtattacagaatttttaatgctagttttaagtcattaacttttttaatccagaaggctaccacataaaataaaagagaacacttactgaaaatcatgtgtttagtgaggaatttaacatacctactttgccttaatccagtgtatttttgctttgactgttgaaacagcctgggaattccaaaatatgctgatgcttttgtgccacttccagagattctgatttaattgatctgatgtacattctggacatcagaatcttttaaaggccccccaggtgattctgctgtgcatccagagctgagaaatagtgctttagactggtatgaaagttttgttgagtggaaagaaacattgggagatcatcatactctcctttacagatgaatgccttgatttgtaagggattttccataagactgtgataacatgtttcttgctatttgaaaagggtatttaatgtataaacttttttgtagtttttcttcctggctgaattattagtatctaagggctgagccatgtttttatacatctttgttatagcgcacttctagtagtaagtatttaatggcgtttgatagattgttgaaagaattcttcaataattggtttatttttagattaagtacatattcatgttaaatatgtgttacagtgatttattttttgggggtttgagttgccagtatcttttaagtttattttctacaggcaaaaactctgcccctataatgtgtaattgttttttgaggagatgaagtgatgctggaaaatttaagacagcaaagcatttgtaaagtatacttactatatgcctttcctatgagcttggccagaattatattgaatttaataatccgtgagaatataggtttgagttttgcttttattctggaaagattttattaagtttctttaaagagaaagcattctttactgtttttcttaatttagtttaacattttaaaaatccttttctcacatcattataaaatcagtgttattccaaaatcacaggtagaacatgtacttcctcttttgaagaggggaattggtattcaccatggtggtttacttcctattttgaaagaaactatagaaattctcttttctgaaggattgataaaggtatggttttatttttattttttatgcccccatatcatgttgtatgaagagtttgaaaatgagagaacattgtttataggcaatatgtgtgtttttaacaaggct

SEQ ID NO: 33634 - DNA, 2300 bp, Homo sapien
attttcctctgaaatgtaataacagaatattataatttgggatgagaggaatagtgattttgcctgtgtaaactgaattgattagaaactctaaatgctgatgactaaggtcttataatttgatatgtgactatcttacaagctttaatttgttaaaacgggtagtgtgaaaaaccagtaactttaaacgtgggtttttatatcttgttttccttttcttttatagtctagtgagatgcccaaattaacagaacaattagcaggaccacttcgtcaaatgcaggtaaggttttttttttttttttttgaactacatattttatgaatagtagattgtaaaataaacatttttgataatctaatcatagtagtttatcatttcacagagataacctataaggattaaatgttacttgatgtcagtcatgtaatttaatgttactctgataacatctcttgtgatttttactttaataattaaacagtatttcttcccattattgtaatgaactgtatagcattgttgtgaacagagattaaaagcttcataatgtaaataggctgtattgacagctcagtgcatgtgtcattttcttcctcagtactgataatggtatcttgaaggactaggatttagtttatttttaattttttgcacattttttcattctggtttataacaaagtttggttgttttattgttttgtttttgagacagagtctcgctctcttaccaaggcctggagtgcagtggcgtgatctgggctcactgcaacctccaccttccacgttcaaatgattctcctgcctcagcctcctgagtagctgggattacaggcacccgccaccacactcagctaatttttgtatttttagtagagacgaggtttcaccatgttggccaggctggtctcgaactcctgagctcatgtgatcctcccacctcggcctcccaaagtgctgggattacagatgtgagccactgtgcccagcctataacaaagttttaaaatctgttttatcataagaaattgtctctggatcctcaaagccacagtagtttatagtaataaatttctctcttactattttcataggataagccgattttttctgtctgttcaacattagacaaagacaaggaaagatgagctaaggaattacaagagaggaacaaaaaaatgtgtcataaaagggccccttcagaacaacagacactggtgcctacttgagggaggagagtgggaggaaggagaggttgaggaagaaaaaagaaaaaaaaaacctgtggcatattatacttagtactcagctgactaaataatctatataccaaacccctgagtcacaagtttacctagataagaaacctgtacatgaacccctgagcctaaaataaaagttaaaatatttttaaaataataattcaaaaaattctgattaaaattaaaaggccagttcagtggaacatgtaacatgccttaaaatcactaagaaatttaaatttctagaaccagcaaagtcttcataggcctaggagtttttggccttttagattgccaagtaaagaagaatgaagtttctcaacttagaggaaaacaatatgaagatatgtacatttttaagcattgttgtggaaaaatgtattttgctctaggatttgtatttctctaaatctgttttgtaatgaaataattagagattagttaaatgctgctcttgaataattttaatgaagagttctgtttctttgttgaaaaggtatcactggctgaaaagcatgctcttgatacatttttcttagttaactacctcaacataatgggaaagattggccgtttaatcacttagcaatggaacaggcactgtgcctacttaggagcagaatgtccacattgcagacataatacctaggaagaaaaagggacctcctggaatactggcttggaaacctaaagaataaagtgatatgggagatcataagtaaggaattttaactcttttatctttaaaggaatgtgctaaaagaattgcaaaagtttcagcagaagccaaattggaaattgatgaggaaacttatctaagctcatttaaacctcacttaatggatgtagtatatacctgggcaactggagctacatttgcccatatctgcaaaatgacagatgtctttgaaggtatggttaaattttacacatatatatttacagtataagaaatacagttaggatggtattgttttaattaaacaagtataatatgtatttttaatatttggtaactaaatgaaatcttctccc

SEQ ID NO: 33635 - DNA, 2300 bp, Homo sapien
tgtttattttagcttcttcacagatgtgtaccaggtatccattaggggctcaataaatgttgaattaatgaatgtgtgaataaacaaaaaatcactaatcagtaaggtttttttgaatgcttatttttgaaaacgcactttaagagtaaattttttttttaaatagaaagaataagatctagtacttgatagtacaacagggtcactatagttaataattaaattgtacattttaaaataactaaaagagtataattgaattgtttgtaatacaaaggataaatgcttgagaggatggatacctcattttccatgatgtaattattacacattgcatacgtgtatcaaaacatctcattaccccaaaatatatacacctattatgtacccacaaaaagtaaaaataaaaaatttttaaaaagtaaatgtttttaaaaattacttttaaaaagtaaatatttcaaaagctgtttaagacactgagactagactgtaacacaataggtgctcaacaaatgttttttgaataaatacctaatactcagacatcacaagtactttgaatttattgtgaccttgcaatctgaggcccttgtaactctggaagtaaagaaagctacatgataaacaatggcacatctttctcaggtgtaaattgcttaaagcttttacggctatttaaacaagaggcaaaataaaacattagcattcgttttaaagaaaaacatctttcttcaaatgtatattttgtttttgagagcttacttggggctgtatctccagactctgtttaatgttatctttccattggctttatgagtgctttgcaggataagtcgaagaagtagtaggcacattttgtgatttgtgttttacatatttaaagagaaaatataccaatcattaacatctgtagacggtttaactctagataaagccactatcatataatcttttctgggtttcacttcttcctccagactggaacactgggcagcttaaagctgtaaaagctttaagcaatttacacctgagaaagatgggccattgtttatcatgtggctttctttacttccagagttacaagggcctcagattgcaaggtcacaataaattcaaagtacttgtgatgtctgagtattaggtatttatttaaaaaatccccattttacatattaggaaactgagattactaaatgtgggctagggtcctcctgggtatggggcagggggagtgcttgctgctgttaaagaaaattatcctgacacttgtcaaacacatgaataatttattcaagattattacaataagggtcatgactattggaacaggagagagaaattgagctcaactcagaatacagcaaagacagcaggggatttatagccaaggaacaggcaccgtgtctgtgagggaggtgacggtggatggaaaattactaagaggagacatcaagggtagagggattctggctaaaggcaggtcaagggcttctacaacaaaggtgtaatataaggaatctaatccgatattaaatatcaagaattcaacggtgatcaggtatcgaggatggatgatttagcatgcttcttgctaacatttgggctcagccaggacacagggaggtcaacgttgaggcctaagtgagaaagggctcagaggtaccaaactaaaggagagcgtctctgttcctgcctactctgacctcttttccccccttaaactcagtggtaacaatctgacctgtttattacctcatccccatggaaggggtggggagtggcaggcagccggtgctctaggatcgttgggtagggagcctagctctctgaaagcagcaatgcctagtgggggtaccgaggccgagttcggagaccacctgagcaattgcggtccagagcaaagccccctggatcggaacgggagccgcccccacgccccgcccggctgccgagagccgcacttctgggcggatgccgcaggtcgggagggatgaggccgacggcgctgattggctgaccgccgcggcctggggtttccctggccccgcccctgctgcactccccccgcccgcgaacccgcgcgctgcccggtcctgcgctgctcagcgggaggggctggaccccgcgttcctcctccctgccggtccccatccttaaagcgagagtctggacgccccgcctgtgggagagagcgccgggatccggacggggagcaaccggggcaggccgtgccggctgaggaggtcctgaggctacagagctgccgcggctggcacacgagcgcctcggcactaacc

SEQ ID NO: 33636 - DNA, 2300 bp, Homo sapien
gtaaaactcatgtttttaattggtacaccctaaggctttgtggcaagggttgcagaatacataaataaagtcgtttcatgacataaaatcttttcaaatgctaaaattaggaaaggaaagaaaagttgattcaaatgccacggagacaaaaatgtgtttttctgggacaaaggagaatgaatgatttaagttcatggcaatttttagtctcatttgtgcacacatacaaataatcctttttaaaaattgtattcagcacttgggtacaagtacatgttgtacccaggaagttcaaatgacgattatcattattaatacccttgttttccttgcttgcttattgccaaataaaacaacaaattaaacacaaactgctgtagtaaaatgaccaggagcacaagtgtcctagatagaaaaggcctggtcagcatttctatttcctataaggaaggcctcttcacttgcaaagatgggctctcggagaaacttaacactgtatcgcagtgacaactttcccatttcacaggcaaaagaatgtcccacatttccttgactatgatggaaacagggacaaacactccttaggtggttacctgctcagcagggaaaataaaaagaggccctgagggatgctaaaaaatattaacttgccattaaaagtaattataaaaaacgcaattacttttgcaccaacctaatactatctcagagactgtgttttctctctggaaatacaagctctatgcagggtcaggtgtggttttgtgttgttttctccggggggtttttgcacagagtcctcctatctttgtagacaattctcagtcagttttgagacaggagactggagtggggatgctttagtcccagaggtatgcagttttcagcgaaagtggccaaaggaatgtcccaaccagacatttctaccaatgaggcaagctaagggattcttactaattttttggaatttcactgagctgtggaaggaagaaatgagtatggtttccttttttctttctttctttttttcttaaacctgaaacaggagcaggattgtagctgtcacaagctgactcaatatcttttgcagcaccaaagcctttaaaatccttggagcacttgtgagaactaatgtttatgttgggacctttacattagttgaggtgtgtgtgagtgtgtgtgcgtgtgtgcatgtgtgtgtgtgtgtatgcaagtgccatgtgcacagtgccaaccatctgcccggtggctccacatctgaggagggtggcaagagcgaatcattctctccttggtctggaataacttaaccctgcagagaaatagacttcagttcaacagttaaaaaatggaagaatcagaatgaggtttgcagcaagcccaagaacgcccttgacattcaaaccacgcaccctagcctccctcactaccagacctgtaagtctcctgtctctaccctgtctgtataagttctgtgcagtgtcagaattcagactgtaggcctcaaaaccttgtgagattttatttcttggagataagcctaagacccagttgcagagggttgatttcaattcctcccttaagagagaccactaaattaaaaatatactgaacaaaggagaccgtgtggcttgaaaaattcacttttatcagatttataccagggtaacttagcatttatccagtaattggttcccaagttaaaacattttggaaataaatttatggatcagttccctggaatgttcaacgggtacttgtggggaaaagcaagagagatcagattgttaccgtgtctgtgtggaaagaagtagacataggagactccattttgttctgtactaagaaaaattcttctgccttgagattctgtgaccttacccccaaccccgtgctctctgaaacatgtgctgtgtcaactcagagttgaatggattaagggcagtgcaagatgtgctttgttaaacagatgcttgaaggcagcatgctccttaagagtcatcaccactccctaatctcaagtacccagggacacaaaaactgcggaagaccgcagggacctctgcctaggaaagccaggtattgtccaaggtttctccccatgtgatagtctgaaatatggcctcgtgggaagggaaagacctgaccgtcccccagcccaacacccgtaaagggtctgtgctgaggaggattagtaaaagaggaaggaatgcctcttgcagttgagacaagaggaaggcatctgtctcctgcctgtccctgggcaatggaatgtctcggtataaaacccgattgtatgc

SEQ ID NO: 33637 - DNA, 2300 bp, Homo sapien
taaaaaaatttaacactaagaaaaactgctgcccataactctgatgcaataacctcttaggacttagagtttttgttttgtatttactgcaagagctcttgggccacgcacggtggctcatgcctgtaatcccaacactttgggaggctgaggtgggtggatcacttgaggccaagagttccagactagcttggccaacatggcaaaacctggtctctactaaaagtacaaaaattagctgggcgtggtggcgcacacctgtaatcccagctatttgggagactgaggcatgataatcacttgaacctgggaggcagaggttgcagtaagccaagatcgtaccactgcactccagcctggtgatagagcaagactctgtcaggaaaggaaaggaaaggagaggagaggagaggagaagggtggggagcggaggggaggggaggggaggggaagggaagggaagggaaaagggaaaagggagaactcttggacttatgtgatattttatcctatatttcttgtgcaattataaaaatgaaaatagaaacaaagtatattgattaaggtattactgacacctcacatttagaatatgattcttctgaattattttttgatgtagagtcatcaaaatagttgtttcccccaccacacacacacacacagaattgtccttagtgccattaagaaccctggtgctgtaacatttcctgaaaagattttcttccaggtcactgacacttaagttttgatgcttgcactttcctgatcttaccagaagatgtcacaaaaggttttctaacaagaacatgacccatctgtcttcctcaaatggtccttaaatggtttgtctgacatgaccacggatggcagttacctgtcatgccatcaggaataactactatcatattgtcacttgctgacagtgatttttttttttttttttgagacagggtctcactctgtagcccacactggagtgtgatggtgcaatcatggcttgctgcagccttgatctcctgggctgaagcagtcctcccacttcagcctcctgagtagctgggactacaggtgcatgccactgtgaccagctaatttttttttaaattttattttgtagagaaggggtcttgctgtgttactggggctggtcttgaactcctgggctcaagcaatttgtccatcttagcctcccaagtagctgggactacaggtgcacaccactgcacctggctaatttttcaaatttattttttgcagagattgcatctcactttattggccaggctggtcttgaactccagggctcaagcaatcctcccaccttgccctcccaaagtgttgggattacaggtgtgagtcaccacgcctggctctggcagtgatgaaaaagtgttctagattatgagattcatccttaattagaagtgtttaaatatgtatattagaatcagtaaaatatgatgtaataaaaagaattaaatgaggcatattctgctctcattgggaagactctgaagatgtcatagtcttcaaattttaatccataaatttaatgtgatttcccccctaaaatgccagcagcctattccaaagtttatatggatcagtaatttcacttctaagcattaattcacattgtcaaaaattgtatgtgtacaaggttgtgtaatgcagtattttttatagtagtaaagattaaaagcaatcaaaatttcttacaggattggataaataagttgtggcacatttatacaatggaatattttttcctcttaaaaaggaggtggctttattacatatcaaaatggaacaagtcttcaacttattttgttaagtgaaaaattgaagtacagagcagtgtgtatagtatgccaccatttgggtaaaaataaataaatataatatgtataaatgaagttttgggtagtaaataggaaactgtaagatggttgccccctcagagggaaactgagtgctttaggcgggatggtgtggcagatactgttaggtagacacccaacaattaatcagcaaccctacctattccttaatgtcaacagaatccttatttttttgagtcacaatgggtcttcatccaagagatgaaagatggttggtttaagctaatcttgataatcctattttcattcgcacatacttaagtttttagtctttcttaaaactagaggtggaaatgtgaaatttatcacatgagaaatttatcattgtcatttatagtggccatcagaaaagataatgaaataagacttttgattcttacttatataatccaatgt

SEQ ID NO: 33638 - DNA, 2300 bp, Homo sapien
gttttttcttcattacatgttcccctggattttgtgagttttttttatcagtttcagagtttccaaaaaaggtgctcctgacagttttgccagcttattcatttttgagttccctacttttttcccattttttgctgacatcatttcatactatttacttttgtgtttcccagccttgcttgaaattattttctcagcctggaatgcagaaaaaaaagaaaggttgctatcactgaaactatcaaaagaatgtattactgacttgtgttacttgaccagccctgacttgaaggcagggccaatgaacagttaaaaaagtttttgaacaagaataccatcagcaaaacaacttttatctcccttaaagacaacattcattaaatcgtttgccttgcatttgtcaagccctccataatagacgcaatgtttgagagcacgcaggctttgggataagatcttagtatgaattccagatcttctgccacttagtagttgtttagccttgtacaaggcacttaaattctctgggactatttccttttctgtaagacaggaaaaatatacatttctagagctgtgataaagacttaaagagatattatcatttccagaactgtggtaaagacttaaaaagatatacacgtaaaattcttggcattcaatgttagctatttgttaaatttgaatttttattttattttattttagagactgagtctcgctctgtcgcccatgctggagtgcagtggcacaatcttagctcattgcaacctccgcctaccggattcaagcgattctcctgcctcagcctccagagtagctgggattacaggtgcacaccaccacgcctggctaatttttgtatttttagcagagacgggtttcaccatgttggtcaggctggtctcaaactcctgaccttgtgatctgccctcctcagcctcccaaagtgctgcaattacaggtgtgagccatcgcacccagcctaaatttgaattttcaagtttaggttttttgttttgtttcgttttgtttttgagacagggtcttgctctgtcacccaggctgcagtgcagtggcaccatcatagctcactgcagccttaactcctggcctcaaatgatcctcctgcctcagcatcccaagtaagcttgactacaggcaggtgccaccctgcccagttaattttttaaattcttttgtagaaatggggtctccctatgttgcccagactggtctccaactcctggcctcaagtgattctcccacctcagcctctcaaaatggtgagattacaggcataagccacggagccggtctaaatttttagttttttttctggcattacagacactgtttcttctggtttaaacagaaaaaagaaaaagaaacaaaaagagccactggcttcctttgtaagaagagcttagggtggccatatgcttttcagggactgaccttgaactgattttcataacaagcacattaattttacttagactgtatgtttacttggggaggttttggggaaaattgctgggtatgtggggtgggcctctaaaatccttctaaagccccttttagcctagagactaatttgcaaacacatttttaaaaaacaaacccaaatatctagacgacggagggagcatgccaactcaacagttttttcaaaccagcttccctttgtgtctgtagggtccaaggacgtaaccagatcatacaacacgcgccaggaaagcccaaaagaggggtgatccctcgatggaggtgccgcatcagcgttttctcacgtggcctccggggctctatgaatggcaagagattgcattccttctactacccctcccagcctccagccgggacaaggaactggagcaaactcggggctgcagttccgactggactcgcccacctgggcgcgccggctgcccagcctcctgaagcctcggggctgggccctgcggtgatgggcgtgctggccgtcgcagagccctctgggagttgtagtccgtagcggcgagaggtttgacagcgaccgcgggcttggcgcattcagaactccaactcccgccggcccctgcgacccaggctattgccgcttcctgtttggactaggagccccgcggtcgcaaattgcgagaatttgggaagggaatctttatcttctcgtctagttctccgaggttgaaggctcggcctgctcaggtagatcacgttcccacgtctagcaaactcgcccctcggggaggtgggaaggtatccgagggaaggcggcgggaagggttgaagttggggcg

SEQ ID NO: 33639 - DNA, 2300 bp, Homo sapien
taatcccagcactttgggaggctgaggcaggaggctcacttgaggccagaaattggagaccagcctgggcaacacagggagactcttgggaggctgaggcaggaggctcacttgaggcccggaattggagaccagcctgggcaacacagggagactctttctctacaaaattttttttaaaaattagctgggcatggtggcttgtgcctgtagtcccagctattcgggaggctgaggtggcaggatcacttgagcacaggaggttgaggctgcagtaagctatgatcattagtgcactcccctctgggtgacagagtgagaccttgtctcaaaaataaataaataaataaataaaaaatatattcattttgatcatcttgagaatagtctgacaaagtttattgctaactagatgaatcctgaaattcttggtggtgatggttctagagataaaaagtatgaagcaagcctgagcctattaagtgctttatcctttatgtaccagtatcaaactgtgttgctatttatgttcctgaatgagataggaatttcttcagattcagagaagggaaaatgacagaaacgacaacaaaaatgagaactacactttttttttttttttttttttttgaggcggagtctcggtctgaggcccaggctggagtgcagtcgcgcgatctcggctcactgcaagctccgtctcccgggttcacgccattctcctgcctcaacctctggagtagctgggactacaggcgcccgccaccacgcccggctaattttttgtatttttagtagagacggggtttcgccgtgttagccaggatggttgcatctcctgacctcgtgatccgcccgcttcggcctccccaagtgctgggattacagacagacgtaagccaccgcgcccggcctctgagaactacacttttaaaacagcccatggtcacgcgttttgaagggctggggaaatactgagggattttacctgcttttggggtggggggtgggggcagaacaagaaaatctgattgaagacagcatgaagtatcaaaataacccttggccactttggctagtgcccgtaggaatataaacaggtgggccacaaatccaagccttgatgaatgacctatgccagcaccaatttcctccctccttctggatcagagcctgtttccttccaaagtggtggacccccgaaatcttacaggcttttttttttttttttttttcctctgtctcactctgtcgcccaggtagagatcaatggcatgatctcggttcattgcaacctctgcctcccgggttcaagcggttctcttgcctcagcctcctgagtagctgggactacaggcagccgccaccatacccggctaatttttttaattttagtagagacggggtttcaccatgttggctaggctggtctcgaactcctagcctcatgtgatccgcccgcctcggcctcccaaagtgctgggattacaggcgtgagtcaccatgcccagccgagtctaactttctttacgatttcctggggtcccagctggacggagtctcatccctgccccccttactgggaggaaaagggaatgcacctcctccatgagcctcagctgcactttgaggcacctggaatccccggatgtggagcgagtctctgaaatgcagaacccgaggggccaacccatggactgtgatgggtaaaaggggagagagcactaaagaggccaagtagggaggacattatccctttccccttttattattattttttgttagaaaaaggcaggtggacatatttagcttgcgaagcttgcacaaggaaaatccagagcgtctccagaataaggatcccacgagagaacgtggacacaagtaggccctcagccagccttgtacccacaggcccaacaggccacttggctatgaggccagagcgtcgccataggggcccgaacgctagcgtttagggaatccgcaggctagaagtggaggcgggacgccactggtcgtctgagcgctgattggctggtggcgctagtcaccagccaatcgtcaacagacgccatttgttgttggagccacgcacctgacgcagtgggcgtcttgcacgtgcagccgtttaagtcgcgtgggcgcctgcgagggcttgggagagcaagccgcggagaggtgagtgggccgcttttctacgggaactggcctgaactcggccgtacgggctccccagtaaccgacctttggccaaagtgtggatggagtaggaggagttttgaagccgtccttcgaagcct

SEQ ID NO: 33640 - DNA, 2300 bp, Homo sapien
acacttttaaaacagcccatggtcacgcgttttgaagggctggggaaatactgagggattttacctgcttttggggtggggggtgggggcagaacaagaaaatctgattgaagacagcatgaagtatcaaaataacccttggccactttggctagtgcccgtaggaatataaacaggtgggccacaaatccaagccttgatgaatgacctatgccagcaccaatttcctccctccttctggatcagagcctgtttccttccaaagtggtggacccccgaaatcttacaggcttttttttttttttttttttcctctgtctcactctgtcgcccaggtagagatcaatggcatgatctcggttcattgcaacctctgcctcccgggttcaagcggttctcttgcctcagcctcctgagtagctgggactacaggcagccgccaccatacccggctaatttttttaattttagtagagacggggtttcaccatgttggctaggctggtctcgaactcctagcctcatgtgatccgcccgcctcggcctcccaaagtgctgggattacaggcgtgagtcaccatgcccagccgagtctaactttctttacgatttcctggggtcccagctggacggagtctcatccctgccccccttactgggaggaaaagggaatgcacctcctccatgagcctcagctgcactttgaggcacctggaatccccggatgtggagcgagtctctgaaatgcagaacccgaggggccaacccatggactgtgatgggtaaaaggggagagagcactaaagaggccaagtagggaggacattatccctttccccttttattattattttttgttagaaaaaggcaggtggacatatttagcttgcgaagcttgcacaaggaaaatccagagcgtctccagaataaggatcccacgagagaacgtggacacaagtaggccctcagccagccttgtacccacaggcccaacaggccacttggctatgaggccagagcgtcgccataggggcccgaacgctagcgtttagggaatccgcaggctagaagtggaggcgggacgccactggtcgtctgagcgctgattggctggtggcgctagtcaccagccaatcgtcaacagacgccatttgttgttggagccacgcacctgacgcagtgggcgtcttgcacgtgcagccgtttaagtcgcgtgggcgcctgcgagggcttgggagagcaagccgcggagaggtgagtgggccgcttttctacgggaactggcctgaactcggccgtacgggctccccagtaaccgacctttggccaaagtgtggatggagtaggaggagttttgaagccgtccttcgaagcctttctgcctcggggtctcagagtcccacgggtgcccaaagtctgggcttgaggcctgcagaggaggcgaaggggccttattcctggcttcttcactgcgttttctctgaacagacatggtccgagtaccatttgtgtacaaatccttcttgatgaagctggttgtcctttgtcggcaggatttgggcaaccatacccttcttcccttccccactaaaatccaaggcctccctcttcaccgagtcgccgcccccctacccagtcgactcccgtacccctgtccccgcccccacgcacgccacaaacaccccaaagcaaacatcctatccaccttggatgttaatcatgcgaagggagaaatcttaagtagtttctgaaaaaagttgcctctcccttaatattcagtaagtcgtttggggaccctttgagggaggagataaagtctatgaacagatgtttgggaaaagcctaagtcttgctggggacatggcgattgctagaatgactaggtaagaggttcaactagtttctaaagctaagaaaggatggagataaatgccacctttagataagaagagacctaattccttctttggaaaaaacttttggggtatcagcacctagttgggtagtttcaagatgtatgtgaaacaatgagtttatgcttttaaagttatgattctgatctaattgagtccaaatgtgcatttttttttttttatgaatagaacttgaagccaccatgggagatgaagattgggaagcagaaatcaaccctcatatgtcttcctatgttcccatatttgagaaggtaataacatttaaagtttagttattaaatgctacggattttatcaaagttgaaaatcactgtggtgagagttctaaattatacagtctgtgtcagtgtttatctccatgtgatt

SEQ ID NO: 33641 - DNA, 2300 bp, Homo sapien
tataggtggttaggcaggctaagtgagaatgcgtgtaaaagcacacagctgaataccagacacattcatgacaaacactcagatgtcatccatctatcttcattaaatatttgaagctgatcttattaaacactttgattcccaaagtcaaaaccaagcctagacctgatcaccttaaaacacttttggtataaggccggattttaattatcaaatgagactgtttctccaaactattgccagtctctttctccctacttctctttttttctcctatcccgttcaaatgaaaacatatatgatgtagaactagtatttgtgagagaagaaaaataccatcatttttattcttttccatttctatgtgtttctgttctgatctcttttaactcatttaatattcaagatcatttctacttatacacagacctttctacctacttgacccctttgtagagatggtgggccagggagcttttgaatacaaattccagtttctcatggcacttgagagaacttctctccgaagtggcctgcttgctttgttttgatctactttcttcttttttcgtttttagttcccctaaaaaaaaaaaaaaaaaaatatatatatatatatatatatatggattgaattcattcattgtctcagttgttagcaagcccaagttctgagctcacggtagaagctttttactctggacacaaatggatagtatgtttttaaatttttttcccctgtcatctactttgcttaagctggtatattgtagtgataaggaactcagatactggatttgaacacgtaggtgtgagactcagatcctcctcctggcaattgtattatcttgaaaaagcctgtaactttctgcttttcattttctctatttgtataatgatgactatatctacttcacaaggtttttgtgaaactttagactaaagttaatacatgtgatacatttagaacacggccaggtacatactttatgtgttgttattattatttttcgagacggagtctcgcactgtcacctggcctggagtgcagtggtacagtcttggctcactgcaacctctgcgtccagggttcaagtgattctcctgcctcagcctcctgagtagctgggattacaggggcccgccatcacgcccgactaatttttttttttttttttttgtatttttagtagagacggggtttcgtcacgttggccaggctggtctcaaactcctgacctcacgatctgcctgcctcggcctcccacagtgctaggattacaggcatgagccactgcgccaggccatatgttatttttgtataattaataggttgtaactaatcttggtatcattatctcatttttgtttgtgcttagctttatttcctaactgtatagagatcacttattttttaaagtaattttttattttgaaatagttttattcataagaagttgcaaaaatagtacagaggtttttcatgtacccatcacccaacttctcttaatgttttctatttttattcccactgtgatcaaaataactgtaggtttattttagggaaataattggccaaagatattgtgagactctttcccttgccaggtcccagattagtagttttgttttttttttttttttctcgaaagcagtaaatattagttatcatcattgttattccagggccaacttttcaaaacttatttctttcctgcccttctacattgtattaagtcctgccttccagaaagttgtcttgttaatggctcttcaggattgtttgtcagttgtcagctgcagctgaaataggagactgcaacaagagctttgggtcactgtttattgtagaacattattagttgttaaatggattgggactttcacacaggaacttagctaataacctgcaagctgtttggtcacttgctgtcattattttgacttaatgttcccagatattaaatattaatgatatgtacaaagatcccttgaaaccatctttgtattcccaaatgtgactttttttggaatcttctggaaagcctgatgtcatagtaataacatagaacttttacatttcgaaaaatcattcctttcagaataaacatttctgggaatggggtctaggaatttatttttaaccaactctccaggtagttttcaggcagccttcagtatagtaatctctcatactactattttaaaactctgggaatgttacttactaatatcaaaaatggagaagctaggatatccccaaattatttcattagcatgaatgggggaaagtttgcata

SEQ ID NO: 33642 - DNA, 2300 bp, Homo sapien
tacaatagtcggaaagaagaaacaatccaagtgtccgtcacatggataaacaaaatgtggtaaatacattatattattcaaccattaaaagaaatgtagttttgatgcatgctacaacatggatgaacactgaaaacaagatgctaagtaaaataagccaaatacgacaggacaaatattgtacgattccacttgtatgaaatacctaaaatagacaaatttcatagagaacatggaatagaggttaccaaagaccagggttaagggagtacacagggaattgttgtctaacggaatacaaagtttctatctgggtgatgatagtgatgacagaatactgtgcacttaatgccaaaaattatacacttaagaatagttaatatgggaattttatgttatagagatcttaccacaaaaaagctcaaaatatcccaagtttcatgaaaactattaatctataaatccaagaagctcaactccaaggagggtaaacccaaaaagatccacatctagacacatcaatataaaacatcaacaaatggtgctagaacaactgggtatccatatgcaaaagaatttggacccccaccctacaccatctataaaaatgaattcaaaatgcatcaaagacttaagtgtaagaactaaaactataaaattcttagaaggaaacaaaggaaaaagtctgcatgactctggattaggcaacagttttctagttataacaccaaaagaacataaaaagataaactgggtttgataaaaatgttaaattttagtgtttcaaagggtactatcaagaaagggaaaagacaacccacaggaggttattaaacatttgcaggccagatgcagtggctcacacctgtaatccgagcactttggaaggccaagaagggagaactgcttgagcccaggagtttgagacaagcctggacaacacagtgagaccccatccctacaaaaaataaagaaattagctgggcatggtggcacatgcctatagtcccagctactcaggaggctgaggtgggaggactgcttgagaccaggaagttgaagctgtcatgaaccatgactgtgccactgcaccccagagtctgggtgacagagcgagactctgtctcaaaaacaaaaaaaaaaaaattagataaattaaaaaaaaataaacatttgcaaatcaggtagctgatgatactcacattgagaatatataaataaatcttagaacataaaaagacaacccaattgttaaaatgagtgaaggatctgaaagacatttctccaaagatatacaaatggtcaataagcatatgaaaagctgctcaacatcacagtcatcaaaaaatgcaatcaaaacaacaataagggctgggcactgtggcacacatgcttgtaatcccagcactttgggaggctgaggcaggcagattgcttgaactcaggagttcaatatcagcctgcgcaatgtagtggaaccccatctctaaaaaaatacaaaaattagcagggcatggtagtacacgcctgtagtcccagctacacagagggctgaggtggaaggattatttgagcctaggaggttgaggctgcagtgagccgaaattgtgacagagccctccagcctgggtgagagtaagaccctgtctcaaaaaaataaaaaaacaaaaaacccacaatgagataccacttcatactcagtagaatggctataattaaaaaaacaccagtaataactagtatcggtggatgtggagaaatcagaaccctcataacattgagagtggtaatataaaatggtacagctactatagaaaataatttggcagttcctcaaaaagttaaacattaagagttagcacatgacacagcaattccactcctaagtatatactccagaaaaatgaaaacacaggttcacataaaaacttgtacacaaatgaatacggcagcattagccatgatagcccaaaagtggaaacaactcaaacattcatcagctgaagaataaacaaatgtgatgtaaccacacaacagtagagccctcatgaatggaattagtgttcttataaaagaagccccagagagctgcctggccttatccaccatgtgaggacacagagagaagacaccatctatgaaccaggaaatgggccctcaccagacactgaatctgctggtgccttgatctcagacttctgactctccagaactgtgagaaataaatttctgttgtttacaaagctacccagtttatagcattttgttatagcaatgcaaattaagatagctttttcttc

SEQ ID NO: 33643 - DNA, 2300 bp, Homo sapien
ttttttttcaattttagacattatctattgacttcttactaactatggaagataaagactgaagtctcttaccaattctatacacaaacacacacatatgtgcatcctttcctaaccccattctttcaatatagttataacttttgttaaatccattaatgttttcattgttgtgactctatagttattcatagctgagccacatattggactttaaatatattttcttatataacattttctttttcctggaattaataattatgccattttttggtttccttaacttactgagccgattactcatccttctccaaactttctaagagtgctgcaaaacttttcaagtttcaacatctgtcagatccattgggtcccctccatgtattttttcattggaaatatccctccttgagcctggcgtctgccactcacttgggctagttgctctccaagcctgttgtactcttatcatcttgggatctcccttggccaccattcttggaattctctctcttctatttgaaatttgctgtttttgggagcccatttttcctttttgttttggcttatgctcttgtttttgtagtcacttttttcaataacatctcgaaaatggtcacatgggagataaagttcttgaaacttggcatgttggaaaatgcagtttcaagaacgttgttttacctttctttctgatggatcatttggatgggtagagcatcctaggtgagaaataattttccaatagagttataaaggaattgatccattgctttctaacttctggttttgttattaagtctaaagccattctcatccttgatcctttgtatgtgacttatttttttcctatctggaaacattttttttctgtttattcttgatattctgaaacttcactgttttgtacttcagtgtagatttattttcatttattatgctgtttacagtgggccctttcaatctggaaacaaatgttcctcaattcttgggaattttattgtatcacttctctcattatttctttccctccattcctctgttctgtgcttctgtactgctggtagtcagatgttggctattcttcatctctttgtcttttcttctatcttctggaagatttcctcaactttattttctagtctttagacttcagctctcatattttgaatctccaagagttcttgttctctaattatgcctttatcatagcatcctattcatattttgtgggtacaacattttttcttattttctatgaaggtttaactaatatttcttttaaaaaatattctgctttctgcattgcctttctttcaagttttttccccccatctgctgttgggatgggagaaatttaatgaatttggctttgtggggttaggattaggtagtctatttctttttcagattttcaaccaatcttatgatttttgtttcagaggtatagtcaattctcattattccttcattattcctggcaattatgttcaataaaatcgccacaaacactgaattagaaaatactgctgagcgtggtggctcatgcctgtaatcccagcactttgggaggccgaggcaggtggatcacctgaggtcaggagtttgagaccagcctgaacaacatggagaaaccccgtctctactaaaaatacaaaatcagctgggcttggtggcgcatgcctgtaatcccagctacatgggaggctggcctgaggcaggagaatcacttcaacccgggaggtggaggttgcggtgagctgagatggcgcaattgcactccagcctaagcaacaagagcgaaactctgtctcagaagaaaaaaaaaaagaaaaaaagaaaatactgaattattctctgtgggggaaatatagagttaggtgcctgtgagcctctggtcacaacatttttgtcagctaatcaatacataaccttgttttgtgtgtgtttctgtttaaagacaccttatttaatatacattgttgattcatcaacattgaactcatggctaataacagtactatgactcatgcctgaatagagcttatttaacacacatattttctccatgaggcacagcctccttctgcttaggaacaccagacagcactccagcactctgcttggggggcattcgaaacagcaaaatcactcataaaaggcaaaaaattgcaaaaaaaaatagtaataaccagcatggcactaaatagaccatgaaaagacatgtgtgtgcagtatgaaaattgagacaggaaggcagagtgtcagcttgttccacctcagctgggaatgtgcat

SEQ ID NO: 33644 - DNA, 2300 bp, Homo sapien
acagcactccagcactctgcttggggggcattcgaaacagcaaaatcactcataaaaggcaaaaaattgcaaaaaaaaatagtaataaccagcatggcactaaatagaccatgaaaagacatgtgtgtgcagtatgaaaattgagacaggaaggcagagtgtcagcttgttccacctcagctgggaatgtgcatcaggcaactcaagtttttcaccacggcatgtgtctgtgaatgtccgcaaaacattgtgagtattgatttggggggttacaaataattcctagcaagtaggtgaattcacaaataaggaagctgtgagtaatgagggttgattttacctacctagtgtctcaaatcctgagccgtatgagattccgtggcataattatgtttgcttattgttggcaaccttattaggcatttctaggtttctgctttctcatctttaccagttcagttatggcttgattcatttctctttttccaaagatttgttgacatctcttatttgctgttgcctcttcccatttgttttgtcttgtggttctatatctttgccataatttttgtggagtttcctgagagagtagagataaatgtatatgctcaattggtcttgtcttaaccagaattctatttaatacacaacacctttagtgagctgttatgcatgtaataggtgtttactaagtattggttgaataaattcaagaaatgcttgctatttttgtgctagcatttagcttttctctatagtatattataatggaattttattttattttattttatttattttttgagacagagtttcactcttgtcgccaggttggagtacaatggcacgatcttggctcactgcaacctctgcctcccgggttcaagcgattctcctgcctcagcctcccgagtagctgggattacaggtgcctgccaccatgcctgactaatttttttgtatttttagtagagatggggttttgccatgttggtcaggctggtctcaaactcctgacatcaggtgatccacctgcctcagcctcccaaagtgctgggattacaggcgtgagccaccacgcctggctggaattttaaatatctcataattataatcttctaggtaaaagactagctctctttctcacccttattcctcctacttagtggaacattgcctaaggaagatggggaatgggttaaaaattaaaatgtggggctggaaagcatagcttgttttaaaacttagttttctttccttttgcatcataatctcttccccggtctatttatttctcgtggttttgtcagtccattacaaacggttgcaaaattgtggtactagaagggatcctagaaataatctaatttgaacctttgattgctaggaaactgagagtcaggctgccttggttcaagtcttggctccaccacccatgtaggacatgttgcttactgttttgacctcagtttccttgcctataaagtgggaataaaaatactcctgatgttataggattgttgtgaagattaaaagagataattaatgtgaagttcttagtactatgcctgacacacagtaagagctccacaaattattaatgatgattattactagtggctaaactgaagctctggtttctcagttcagtatgttttcctttagacgtaaataagaatttgtaagcctctttttggagtcagctaccattattttctttccttcatctccttcattgtctaaagacagttaacatgattgcgtatttctcatttcaagctaaagatactctcactgtttcagctattaccacatttgtaaggacttcctgaagagaaaatttaaaagttagtcacttcttttagttgtttctggtctttcagatgatcctttttttttgtagagttgagtgtttttgtttttgcttttgtttttagttaacaataatgcaatccatttcccagcataagtgggtaagtgccactttgacttgggctgggcttaaaagcacaagaaaagctcgcagacaatcagagtggaaacactcccacatcttagtgtggataaattaaagtccagattgttcttcctgtcctgacttgtgctgtgggaggtggagttgcctttgatgcaaatcctttgagccagcagaacatctgtggaacatcccctgatacatgaaggtgagtgctaattcatttagaagagtgatagtttgatcatctttttctactttataaaagtctttttctgttttcttcagtgaaattatgggtcagacccaccacgtgaatttctcc

SEQ ID NO: 33645 - DNA, 2300 bp, Homo sapien
agaagctgtgagaacattccatgcttctctaggagccaagctgcaaatgtattagggccagagaattctgactcccattaaaatgagcagctctgaaaggagggagcggggaatccctccctgccactgtagaggatttatgggttgcccttaagttcccaaaccaaattgtggcactggggtttttatgagaaacgtgtcaacatgacaaaatgattcagagcacaggatttggagtcacacagatctagttttcagcgagactcctgtttccttctctataaaggggacattttaacacctacttcacatgtatttaactttcgccctaacactgaactgaagtgcaaagccttggaaacaaatttaaataaattgaaaatactgcaattcacaaataagagtgagaacaacatttttagttacgtaagactatattatattaaattaggtggcagcagtatttataataatctaaattgcctgtgagaaaattaaactggtattgtcaatacatacttaaaataagaaaaaaatcccactacagtctgtcctttttgacactttctccttcctgtaatttttttctttcactcaagattaaaaacaaacgttcaagattatccctaaagagaaatagttggaaagcacaatttaatagcaagttggttctataaatgtaatatttcagttcatagttcaaaaatacttccaaataggaattaacatgaatttaagaaattaacataatggcacacagctaaactgatgatctgagtccgtaatttcaaattaagagttgttccaacttgaagctggcagtcatacacagtttaaagggtttgtttacagcactgtcaaaagcaaataccacaatctttcagaaaattcaccctggcattctaataactagttattttaaggcagtataattgttgaaatacttcacaaactaagccaaaatgcgtttccttctgaaggcaaaaaaaaaaaaaaaaaaaaaaggtgacgtcttatttttaacctgtgattttttttttttttcagtttcggattatgaaataaaatgctgttcatccactgaagaacagacccttgcttcctgcactatcttcaaaagtttaggtcggaggaggtaaaattttaaaaactgatttgttctccttgggatacagtgagatgtggaattcgttaggaatgataattattaatagaaaagatcaaaagaaggaaagaaacgttaatagtgtttataagcattgtgaactttcaacaaagctgaaacgttacgatttcaagatgaaaaaacggctttggggaagggaaatccacctcgagaatgaagacaagtgcggagcgaatagaatttcaggggagatgaaaaggggattgggaaaaacgtgggatctggtaacaaaaaggggggtttgttcttgaagggcgttctgcggggcgggcgttaagaggggtgcgtgcgtgcgcctgggtgaagtttgtactcagggctgcgataatcgaggtgacaaagttgtggaagtagaattcggaggtccgggagcaggaaggggaaggaatgtggggatttccaggctgggctgacaagttccgggcgctgctctcagggggaagggaggtctcctcgagtgccagatagcccgtccgaaaccaccgacactctaactccagctacgcgacccagcacccggcccctcctcacctcaggccgcgccgcctcgaccctccgcgtctccacagcgcacgaaccccttggcgccaggctgggccagacccgtcggcctggcaggcgcggcccccggttcagctgcgccggggcggcccagcgcgactccgcgggccttttggctgctcgccccggctccggaacactgtcagatccttctccgcagaggtagcgcgccaccccagtcccgcggcggggcggggcgctccccaatcccgcccagctgcgcccccggccggccaacgctgcgccccgccccctaccgggacctaggcgctgattggcccctgagagaccctttgcgcccaggcattggtccagtggccgcctgtcgacgagggggcgggactccgaggggtagcgattcccgtaacgcggctcttcgcgtcccggattccggtggctgcgtccgcgtcgcctctcccagactagatcgaagggttccccccacctcccctctgtgggcggaaagagcggaatgttccatttttctgtggaataacggggtcatgaactggagcccgggtgctgcccgccgcccgctgcccccgccctccct

SEQ ID NO: 33646 - DNA, 2300 bp, Homo sapien
actcccataaaatgtgagtttcttgggagcaggacctgagctgagccaataaaaagacacccataaaagcactaactcagtcatttgttttcctaatggtgccaaggcaggctggtgtgttgtgacatatcaatccacttctgtgtacctgcccttccccgtccagcaaaatatcatcatttttaatatatgttgtgatactaaaatatttcagaagtgttgaccgagtagacattcaataatgattatagctgatacttacagagcacctactatgtgccaaacactgtatgtattttaactcatttaatccttgcaacaatcctgttaggttggtattgttattctcattttgcagatgaagaaatttgaaaagacttgcccaaggtcacagagatgagaaatagaggcatcagcatttaaacctaggcaatctagaaccagagggtacatttaaccactatacatctcccctaaatacatctttgcatcacacctgttatctcagcactttgggaggccactaaggccggaggatcgtttgttgccagcagttcaagaccagccgggtcagcataccaaaatcttgtctctccaaaaattttaaaaattggccaggtattgtaggggcacctgtagtctgagatacttgggaggttgaggtgggaggatcgctagagcccaggaatttgaacgtgcggtgagcatgatccagccactgcactccagcctgggtgacagagtgagactgtgaacaacaacaaaaaaatcaagtttcctggatctatacaaaattttcaatttaacaaatttttataaaaatttgttttaaaataaacacccctctaaatggcaaagctagaacagaatctggtcacaatctataggttagatataggatgacagggaggagcaagagctgaacacatcagctgcagcaccatctactttgcctgcgactccgttagcaggcccactttgcccttttataaattatctgatcaacaactaagagattaaaattcgatctatgttttactctatctgaatcctcaatataatgaagaactttataattgttaatttatggatataatttaagttcattaaaccattatttccttcctatatcctctcattcttccacaaaaacctctacctttgggtgtttacttttacagacacccacgcacacaccccacacgcacgcacgcacatgccttatcttttaactcaagattctcatcttcctttggggagaaacaaacatcatgagccttgaggtccattttctgagggaaaggggggggcggaggcgggatgaataggtttttacccggtattttttatcataaacggggaggtacaaaccgcaaagaaacactagtcgcttggtgggccaccacctctggggctcactgatcaatcgcacccaaactcatttactaatttaaaaaagtactgtggcaaggctcgtttacgtaagtcttggagagaagccgccgccacaatctgccgcagtctcgtgcggagtcacggccaccgagctcttcactttccccaagaggctcccacgccttccccatccccaagggagctaggcggtccctcgcggctctgagtccctcggggaaggccgcgaagagaggccgcaggcgccctggcgagaagggagggcgggggcagcgggcggcgggcagcacccgggctccagttcatgaccccgttattccacagaaaaatggaacattccgctctttccgcccacagaggggaggtggggggaacccttcgatctagtctgggagaggcgacgcggacgcagccaccggaatccgggacgcgaagagccgcgttacgggaatcgctacccctcggagtcccgccccctcgtcgacaggcggccactggaccaatgcctgggcgcaaagggtctctcaggggccaatcagcgcctaggtcccggtagggggcggggcgcagcgttggccggccgggggcgcagctgggcgggattggggagcgccccgccccgccgcgggactggggtggcgcgctacctctgcggagaaggatctgacagtgttccggagccggggcgagcagccaaaaggcccgcggagtcgcgctgggccgccccggcgcagctgaaccgggggccgcgcctgccaggccgacgggtctggcccagcctggcgccaaggggttcgtgcgctgtggagacgcggagggtcgaggcggcgcggcctgaggtgaggaggggccgggtgctgggtcgcgtagctggagttagagtgtcg

SEQ ID NO: 33647 - DNA, 2300 bp, Homo sapien
atttctccagcaaaatacttaaaagtgggatttgtaggttataagtatgtgtttaacttcggaaggaactgctaaattattttccagagcagctcttaccactttacattcccaccaggaatgtatgaaagttccagttgctccatatcttcaccagcacctggtattgccaagctttgttctctttgggttttttggtttgtttgtttgtttttcttattttagccatcttcataggtgtgtattggtatttcattgtggttttaatttgcatttctctaatgacagatgttattgagtacctcttcatgtgcttatttaccatccatatatcttctttgacgaaatgtctattctgatcttttgctaatttttaaaattggtttattttcttattgttccgttctgaaagattttattattttattttattttattttattttattttatttattttttgagatggagtctcgctctgttgcccaggctggagtgcagtggcatgatctcggctcactgcaagctctgcctccccggttcacaccattctcctgcctcagcctcccaagtagctgagactacagggcccgccagcatgcctggttaattttttgtattattagtagacacggggtttcatcatgttagccaggatggtctcgatctcctgaccttgtgatccacctgccttggcctcccaaagcgctgggattacaggtgtgagccaccgcacccagccagttctgaaagattttatatactaattaccagtattagtaatactttgttgactatgtgatttgcaaatattttctcccagcctatggcttgtctttttattctcttaagaaaacactggttatacagtttaataaaggtttaaatactggtgaatatttttataccttttggccaatgaaggacttttttctttttttttgagacagagtcttgctctgtcgcccatgatggagtgcagtggtatgatctcggctcactgcaacctctgcctctggggtttaagcaattctcatgcctcagcctcctgagtagctgggactacaggcacatgccaccatgactggctaatttttgtatttttaatggagacagtgttttgccttgttggccaggctgctcttgaactcctgacctcagatgatccatctgcctcaacctcccaaagtgccagaattacaggcgtgagccactgtgcctagccatgaaggactttttaaacataacatcatgaaagaaagaaaaaatgaataaggaattaaatgtgatttttttttaagttttatagaaaaatcacttaaaaattgaaagtcagccaggcatggtggctcacgcctataatcccagcactctgggaggccaaggcgggtggatcatgagttcaggagttcagaaccagcctggccaacatagtgaaaccccgtctctactaaaaatacaaaaattagccgggtgtggtaacatgtgcctgtcatctcagctactcaggaggctgaggtgggagaatcgcttgaacctgggaggcgaaggttgcagtgagccaagaccacaccattgcactccagcctggatgacagagtgagactctgtctcaaaaaataaaataaaaataaaaataaattaaaagtcaagtaacaaattacagaaaatgttttcataaacataacctataaaagaccaatgcctttaatataaagagcacatacaaattagtaagaaaaacacttatactttaatagaaaaatgacaaaaggcattagtcatttcaatgaagaaactcaaatggcaaacaaacttatatttcaaaagttcaaaccttactataaattaaataaaaaggaaaatgacagtgaagcatattttgcctaccaaaatggacaaagatttttaaagttagtgacaatactcagtattacagaaggaggagaaacatagctagtaggaggacaaattgactcaatcttccggaaggcagtttggcactatgtataaagaacctcaaaactgttcataccctttgacccactacttcctcttctaggaaattgttagaaaggccagagagtgtagatggcagggaatacttagagctagaggagaggcccctacacatgtccaccatcatccttcgggctcatttaacacttactatttctatactgtaaatggcaacaagattttccctacctcaacctgactttgagcaggagctgttgctggctaagcagcctgaacaattcacatgctcagacgcttgtgcttttttcacatggcccctcc

SEQ ID NO: 33648 - DNA, 2300 bp, Homo sapien
agagtcaatcttctcagactgaggtgaaaaggctgctaccactggagatggggaggctgcttctactagggattgggagtccacttccactggcaaagaagactcctcagagtttagatgctcagtgtcccccagcttcatcagggtcttctcacatgtctctatccaatttacagtatcctctactttcccaatcaatgtcctcactttaacagcagacatcctgtgaagctgggagtttgacttgcgctgtaattcaggagttcaatttgcattgtaattcaggcagctgcagcatgagagcctgcatttgattgcagcatcctcagcctcatggctacaggaggtaagactctccttcagggtacacatacacacctccaggtcatctatatggcacctgagctgggaattagaatccgtgagctaatccttttctttcatcactttgtccagtgacattaggagcaaccagccatattcattaagtttccaaaaatgtttgagggtatcatctacacagtcacccaactccttgcctgttgtgtccagtgattaattaggaatattcagtgcagctttttgcatatctctattaccacttcacaccatggactatcaatgctctctttactcctagaaataaagctattagaatccttaaatttaatcagatttgagagccaattccagaaaccctagaaccaatcctcaagtacatggtttcttgtttagactagaaaatttcaaggactacagaagttcttgtcagaaagttcttaccccatgaaggatggttaattgggttccaatgttacaatgtcagtgagcaggttgtcagcttgagcaaggaaagttcttcagtgaagtttcactcatgcactgaaatgtactgagcacctcctttgtgcccctctctgtgctaggctgtaaggacatggagtggacaaagcagacaaagaaagagtagacaaagaccctgcccttatgaaatgtaccctcttgtggagaaatattttaatttgggtttccgtaaaagcagaccctgagacaatgattccaatgcaagtaacttattgagaagtgcaggaaatatcagtaggaacgtgggaaagtaatacagggagggaacagcagcccataaaaagaacgttattagacctattctcacaggtggcagtggagtttaaccctgaaggagtttaatcctgaaagggaaatggcaaacggagtaaaacaccatgcctcagaatcatcctatccaagggcaaaggaagctggtgtttattattagattcaacaagcatctactatatggctatttgacttatccaaaaatctggttgtgcctagaatatagaactttgtttgaatttagtatatcatatttttattacaaatacaagataatagatactggttattaacaagccaaaaatacagagattgatacagaacaagttagaaatctcctactctaatcacagtggcctgagggaaccaatattagcagtttagtacgtatctttctacatctttttcagtgttcgtctgaatatataaaaataatgtatacagtgagtggtttccggttttattaaaacacgaacaaatgaaatatataacttgtttatttcatttaacaatagattagtgacatgtcaccagataaatacacagatttatttatgtcagatttttaaatctagagtacgaatttactaccatttacttagctgctccctgaatgaggtacattcgggtgatttttcaggttttactacatgtaatgctacaataaacacccttgtgacagcagactgttttaattttatcaccacagacactcgagccttgaaatgtcacctttcaaatgacgcctttccccatcctccctgtcaattggagaacggagctgaaaggggagtgaagaagactgccaacatggataattactccacacagcacatggccagcagcctcctgctacaatatttacatcctattccattgagatggcactctctgctcacatgacccaaatgcagttctcactccgccaaaagcacagccgaatgcgaactgcattggcagctttgcacatgctctgtctggccctgtgaatcctcactcacccattcagatttctgttggtgtaaagcgacattccagctgctgaagctccgtgatctgctgtgtttttccagcccagatccaaggcaggtggcccatacaattttactatctttttggagtttgagtaattgtgtttattgatttgggggtggagggtgtattat

SEQ ID NO: 33649 - DNA, 2300 bp, Homo sapien
gaagtgagagaattgtagctagttcatagtgctgcgctgggtagccctctccctttgatccccagtttcaaccactgtacaaacagtcaaaaatcagttttgctggaatctcctttttactctgctactctggctaaagtcttccacttacttttctcacttacaggtacctgaatatgtgcgtgcaaatgtaaaagtctttagatcaaaataggaacaaggaaagtttatccgtttcagtttaggatttggtgggtgtggcaacccaggaagacctgagaaataaccactgtttggtttgaatgatacatttgactgccattaaaatagcatataattatagcctaaatgtagacttaatttttaacagatttatctgaactttcaaaatttgtaccgttgggtgtaacgatctaaaactatcttatgggagatgttacagcagttttcaaatcattgagctaatatgaaatctggactttttaaaacccctctgatctaacctggttacgcagttaacattgtatctgggaaaggggctttcattttacctagtctccagaagtcaatggaattattctgtaaatagttcaggcttttgtctaaatatgtgaagactgacaagactatctccgtgagaatccgcacccccccaccccaacctcccccctccttaatcatgtttcacaaagtaaatctatagacgttcctcctgggttttgggagattccccatcctaaacaaaccagctggaggaaaggaaaggaaggaagaaataaacgcaacacagaagttctcctcagttgacaaaaggtcaaaaatcattaacgtgtaaatgttgctttttccatcccaaagcaccttctcacgtagagtccagggactaggaggactcacaacgcagcgatgggcagccaggccctgcaggagtggggacagagggaacccggccggtggcccgaccctgcagggaagaaggacgtgcggcgagaagcatcggattcggggagggccgggacctggccgagggtgacattaccgagcacttcctggcacagcgctggtcccctccccaaacgcgctatatgtggttctgtacgggactgcctttcccaaagacagccaaggaaaaactaaagatcgacggggacacccgcctcccttcctcgccccaacggtttctcagaggctgtggggacttggtgagggtagggggtagttgtcccaaatcagcagcttcaggatgtaaggtattacagaaaactttgaagttttgttatctgtagcacagggacaggggtgggacaatagagaaggaatgttttcttttcaaaagaaaacacaaacaaaactttatttttctggtccgcggcagcctgtctgctgaacgttgacttgctttcgctttgcagcaggcgacggtcccgggcgccacctgcgcgtcggtgggaggctggtccacgcccgggtcccccgacgcccactgcaaagggcagtgggaatgacagactgtaaaccctctcgcctgcgtccccttcaagcaccagaaacccaagttggaactaattctttctttcggaaggtgcaactcccctcccgcgagctccgcggtgccgggccgagattgccgagaggaagcggcgcagcgctgccgccaaggctcctcctgtcgccggtgcggccgggactacctggcggcgcggcgcgtgcagcgcgcagagtcccgggagcccacgcctccgcctccgcccccgccccctccgcctcccagtccacctcgcccgcccgccctctcgcccggcggagagcacagcccactccctcccacctgcggccgccgggccgccctccacccacacctctgccgcaggccggacccagtgcgcccgcccgtcggtcagtccaggccaggcgcccggcgggccgcgctcacgcagttggcgcaggaggccttacgctggcggcgcagtgcccgccccctgcgctctccccgccccctccctccctcgcaggggccgagcgaatgtagcccgcgagagaaaatggcggcggcggcggggaatcgcgcctcgtcgtcgggattcccgggcgccagggctacgagccctgaggcaggcggcggcggaggagccctcaaggcgagcagcgcgcccgcggctgccgcgggactgctgcgggaggcgggcagcgggggccgcgagcgggcggactggcggcggcggcagctgcgcaaagtgcggagtgtggagctggaccagctgcctgagcagccgctcttccttgccgcctcaccgccggcc

SEQ ID NO: 33650 - DNA, 2300 bp, Homo sapien
ataaaaatttttggaaagtcaaaaatagaactttaaaaaacttcataaagtatacatacctactagaaaactacagtaaatattaaacttgaaggcaaaacctcaaaaatagaagaatgcagtagacttaaaccaatatgggtagatcttcaagatgtatttttgaggaaatcaaataagttgtggatccttataatattttaacaatactcacacaaaatactatgtattttctataaaaacatacgcgggtatgtaaatacataaaaataaaactggcagaaaacacacccgtctgataacttctgagaagcgccaagtaccaggattggtggaagtacaaggtacggtgtttggttaagggtgacttgagctttagctaccatgtttctatttgtataactttagatgcttccattagaaaagaagaaaagattaaaattagtgacctaataacctactttaagaaactagaaaaagaaggttttcattaattacttagctaaccaaaatttaattttaataccataaatataaaaaaactgtaaaaatatacaaaaactgatttttttctttttttagacaagtacattaccataggtaaagattaaactagttcttttgggttctttgttaagtttggagactataaagaaactttcttgtatgccacttattaatacatcctggaactgaattgactccatttagcaagtcaggtaaatctagattatgccaaattatcaaacaaacacagagtctgagagaaagcctctagagtttgctaacattctatatgatatgaacgaaatagagacattggtagatactctttctctttatttctttcagaatagaacaaattagtcccgcagctactggcgattggctgaattttttttttttttgagacgggatctcactctgtcacccaggctggagtgcagtggcggatctcggctccctgcaacctccgtctctcaggttcaagcgattcttctgcctcagcctcctgagtagctgggactacaggcacgtgccaccaacgctcggctaatttttgtatttgttcttttttagtaaagacggggtttcgccatgttggccagattggtcccgaactcctgacctcaggggatccacccgcctcggcctcccaaagtgctgggattacaggcgtgagccactgcgcccggccttggctgagtttttattagatctgagccgttcaatttcaatagtttaggatccaacctcactctcaggcaaagaatagaggaaatgataccaacgtatttatctgtcaataaacacttggtgatttgaatatggttaagggattcctgtagtttgccccccttaaaactgaactttgtccaaacctgttctaaatatgtgtgtgcgtgtgcatgcatctgggtgttggggaggagcggtcgtaaagttccttttaaatttcacctatgggggactacttcccacctcatcctatgaagtcaacattagcctaaataccaaagccagattaagacactacaagaaaactacgaaacaatatctctcacgaacacagatgcagaacttctagacaaaacgtttccaaattgaagcgaagaccatattaaaaggacaaaagcacctcagtggttgcttggggactgggggaggggctggattactatcttggctgtggtgtcgaaaacctatcaaattgttcactttaaatatgtgcagtttattgtatcccaaccattcctcaacaaagctgtttttcagaaacatttgtccatgtagttttgcctttgaatggttgggtcaatgaagagaaaaacgagtgaaaacagggaatcatgacactttgtttttttacgtgtaaatattcgcaaaacgcccaaactggtaactttgggaacacgggttcacgcagaagaagggctgctgtctggggaggactgaaactcgggttcccgaagtcgggctgctctggggccacggagagaaggggagagaacgtcgaggaagaggcagagctcaagtggacggaggatggaacacagagcgcggccgggacaaaggggcaggccagacagccgtgacagagaaactaggcggtccgctcctgggacgcggtctcgggggcgggttcgcccctgaggcccggtgacccttcgcccgcaaccagggctagcgcttgtgtgcgcccacggaagcacccgagcgaccggagaaagaaaaagtggtcaaggggacctccttccagctctacgcgcctctcattcagagaggtgaggtcaggaaag

SEQ ID NO: 33651 - DNA, 2300 bp, Homo sapien
tcaagtcatgtatgtactttcttccctcccgttcagtctttagcttggcttcttccaccatgctataaggccaccaataattacttttttagagatggtctcactctgtcacccaggctagagtgcagcggtatcatcatgccaactgcagccttgacctcctgggcttaagcagttttcccccactcagcttcccaaagcccagggattactggtgtatcccaccaccctggctaatttaaaaaaaaattttttttatagagaaggggtcttgcaatgcccaggctggtctccaactcctgggctcgagcaatcctaccttggcgtcccaaagtgctgggattacaggcagcagctaccgcgcttgtcccaggtcaccaataattcctgattgccagatactaagatttcttgtctttctcttgctcagtttctttttggaatttgacccaagtgaccattcttgattatccatacttgtttctgccttaatttaagtaatcctactttttcctcgttctattttctggcttctccctctttcttattttatgatcttttctttctttgcccgcattttaattaacattctccagggttttggctattatcgtctcactctgtgtgccttttctgggtgttctcactcaaacccactgctttaactttcaccttaaactcatcgttaccatcccatccttaagtttatcttgtgcttctgtctcatagtggtgctatagttacctaacttctcaggccagaaatctggcaatccatttagactcctgtgttgctttcattccttgtatcaagtaactcaagaaagggatctttccctaaatttcactcaaataatccccctccttagttcaggctctcattctacttcccttacaacattatttccaaaatacaaatcatgtttaagaattttcagacatacccattgcccatagtgtaatacatctgaaagttcttctgataagcatagatcccttcctcttttctctctaccctctccgtgggtgagctcatcaacttctgtggctttaaatatcatctagatgctaatgaatgccagatttatatctttagcccagcctggttctctgagctccaggctcctggccaacctgacttttctacttggatgtttcatagtcctcttaaacttaactgtgtcctttgcagaactcttgttgttgttgtttttttcttcaaaaaccttttattcctttagtattctttatcttggcagaagttaccaccatctaggcaattgctcaaatagaaaactggggagtcctccttccctttccctcccacgtccagtgacccatttggttccacctcagaatatgtctcttctcttcacttctctcctcttgtgtatcagtaccctcacctagcatgaggctttttaagtggtttccctgcttctcttgtatctctccacccttcttaacttttcttcatgcaggtgttcagtattttaagaagaaataatgccatggtactccctttttatgagtctctaatggctcctcattgccctgggaatgaagtccaagttcctttccctggccctgaggccctttgcgatctgtccctgcctctctttccattctcttgagccattcttcattctactcaccaaactttggccacttggcttagcagggaaccaccttcaggcctcacatatgtcttttttttttgcctggaatactcttcatgggactggccttctcagacttcaggcctccgctgaagattgctgactgtctttccctgctaccctctggaagtgggccccgagtgttactctgtatctcagggctctatttgtttgttacactcatcaaacttggcagccctatatttgtgtattgtcaaaagccttgtcatctttcaagacttagctcagtcttcaccctctgtgcatacctccatactccataccagtattcttggggtgtaggtctgcccttgtctatagtcacaattgaatattgaagccatcacattgtatcataatggctaactcatccttacatccttacagactttgagacttactcccactaagttcctcccactaagactgaattccttgtgagcagggattcttcagtaaatttcatttgtatgtccagtagcaagtagctagtagccctcagccaagcacttagaactgagtaaatgatgggaaggtggaccatcagtgcataaaaggtgaaaattgccactccccatttcagggagagagtgtgaaactgtgaggttctgcggaaatacta

SEQ ID NO: 33652 - DNA, 2300 bp, Homo sapien
taaatctgtgtatatttcagttatggcaaaacatataatctaagactacatttatagtttggattagccaagtttgctgggaagaaaatgtttttcccagtgtaatgtatgaggcaggttgttggagacactttcttcacgtggctcagactgcggtccagctgctcagggcactgtttcatggttctgtccacagcgcgtgctcactgcgtcatttctaaagttattcacttgtacttaatttcaagccatttttttttactttgaaaactctgaacgcctcattgaggacagtacatacaatgtgtgccaaggtctggtttcaaagtttagctgtttttgagttatttgactggacaaaaggtcgaaagatatctttcacagcagggaaagtgtaattttccatgtctttatgatgtttagaaatagttggagtgatttttccctaaaatttccataagtaaataacttttacccgtggcataagcttgattttgagatgccttggcaaaaaatttgaaaataaccctctccctacctccagtctccagcctcatcctcagtatgcactccagcaataagggaattggagggaccccaggttaaaatcaagacctttcatgtttggattaaaagtatgacgtatggaaagttttagcttctaaaaacttgtctttatcatttaatattacgtatgttttagaaaaaagctgggagaagagctctggtgtctgagatcactctctccaaattcctgtagggtcctgctataattcctgatggtatttgcatctcacttattcatgtaccttacagccgactttcttttccacagatagaattggcctcccactttaggacaatgtgtcctccaaatttgctagggcaactccataccttactttaacttcttgcaggacctaactctccaatcagtcgttagtgtatatttttgtgtacttggctcaaagtctttcagtgtggatgtggaccttccggagagtaatctcctccaatgaagagcaaatggtcataaggaacatgtacgagcaggtattcctgttaagccttatgctccgtctttcacccatccacttgcacaggggactagtttccttttatgatcctacccaaacgtttggcctttttggagaagtgagggaagtgaggggtagaatttttgagactcagttcagggcctttgatatgctgttcctgtccttcaacagatgtatcaagtatctctgggtcatcccctaagacacgttggtgatgaacaattcctagaactggtctaatttttttttttttttttttggataacagcacagtttatattttttgggcatcttcttgaactgtacaagtatattcagcatcatttctctgccctgtcgatcttttgtcttttcttctgtgctgtcaataacctgtttggcaaatgtctacttccattgtccactccgtgagcagtgtacaccggtctccatctcccattcctgcaggtcccttcgtggaaacggcaaagtgcctgactgtagtcctctcattctggactgactctgccatccaccagcctcttctcccatttcccagggcttcctcccacatctgtctatttcatagatcgcctcctcctcttagggaagttgagtctgtcgagttcccctgcacatcgcctgccagtccaagtctcctgcccgcctcccgcacgccctcccgcgccgcggtgtctgtgggtcggttcccagacgcgcccgccggctcttgggcctccactggctggacgtgggtctgtcccgcgcccgcgcgtccgtccgtcccccacttgcctccaattcggcaggaactttacaccagccaggaggagaaggacggtgcgcgcgggtgcgggtctggccggctggggccggcgcgggggcggcgaggggcgccgggcggcgtcggcttgcgagcgggccgggggcgtcgcgggccgccctgccctataaggggccgtgccgcctccgccgccgggcgggtgccgggcggaccgcggcggtggcggcggcggctgcgattggctcaggcgccccatccggggactgggctcggcgctgctcgttcgccctaaaggtaccaatatggcggaggtgagcagggaaaccgggcaggagcagccgggctggagcgggcgcccggcggctccccgcgacccccgagccagcctgggggatccggggctctttccgctgccccatgaggggcggcgtggcgacgcgggggtcgcggggcggcgactggccgtggcggggctggcc

SEQ ID NO: 33653 - DNA, 2300 bp, Homo sapien
gctaatatttgtatttttagtagagagggggtttccgctgtgttggtcacccgacctcaggtgatcctccagcctcagccttctgaagtgttgggattacaggcgtgagtcaccgcgactggtccgcccttcactttttaaaagagtgggtgttatctttttcttaataatttgtaagagctctttatattttcttatgcaaataaaacatacgctaaggatggtaatcgaatataaatattaacttgcttgtgatttactacaattgtttctctgtttcactaccagttgttcgactttatagtgtcttctgtcacatgaaaggcacaaattgtgtgtctaagttatcagttttatccttgggtttttttttttgtttcctttattttttcttggtttgatatcatgcttacacataaaagcacgagcaggtcctctcccgacacataagttgcttatacggaaacaatgtggtgtagagaaaagaaagtggatcaagcccctaatagacttgagtttaaatgtggtacagccaagttgtggcgcccaacttccatattctgtaacgttaaacacgtcaatctcatcctgtttccttatctgcaaaatagtacccaccccagagggtgatacaagcattaaaatgcccggcacgggcaaggcatccagcaagtgttaattccctttcctctgccccgcagaggggcattattaattgcttaaagtggccaactcccgataaagattaaaacagaaggttggggacggtaaattttggtgagtttacgttccacccgtttttcaggtatcttctagaaacattccattaaactacaaaccccataatgcatgtacaactaccataaaatttctacgttatgaagtccttgtggcttaggggagggcgaacagccaaatatctttattttccagactttccctctttgagacaacctctccccaccttccctctaaacaaatgtgatttttctttttcatagaatgccaacttcccaggtgttaaagtgaggctacggttataaggcgaaaaggtgtcacaattagagaaacaactttgaacacggtaatactgatttttaaaaatctcgaatgggctctgtggttctgatactctggctgttgaaataattcacctactgcagatttagtagaaagaaaaataattagcatgattatacctagtagccatttctaccctcttgagagtctgggcttggctccccgcacgtctgctttcctcagccgcagggctcccgcgttctcatgcctgacacagtccgcgttcgcatgccacggtggagcatcccctcagcgtgccctaccgctccggcgccggctcggcagatgttccgcctgcgcagagctgagcataggcgccgtgtgagcgccgattcacccaggcccgagcgcgaggcccaagcggggtacccggcgaagggcgtgcgccgcagcgtcttccgcagcttgaagctcggaggagctgcggcgcagcttcgggagcttagagctggggaagacgctgcggcgcgcgccactcgagcctgcgcggccgcttcccggcgcagcacccccctctcgccctctgcgcagccccaccagcccggactccgaggcagccccggacggggggaggtgcgggaggaggggctcctcagggagcggcggggaattcccccttccaccgaacgttcccgattgttcaccgtcctcacgtcagcagcagggggtaatccccgactccagctgctcctgacgtcaccgcgtggagccaccgccccccgcgcgcccctgctccggggcctcctcgaagccccgcccccagccttagccacgccttctccccctccccccaggcgcccgacgtagagggcggagcttctttgaccgcggcgtgagcggttgcttgggccagaaggttctctggtggaggcgctcttcctggtgtcccgcccagtaggttcgttcgcaccgcttcttccacactctttctccctccttctcctcgccccgccttccctccctcctcaatccctctagttccttccccgcctcgccactgtgcacgatctcgcgagacttggcccagaacattgcggatcgggtcggcgccattttgggactgagactggttgtgggggagggaaaagcggcaaaaggggattattcaaagtaccgaaaaccttctcccgggatcaggcgcggcggcacccccaggccaggggcacctctggtggggcagaaggtaacaccgtcctctaggctccacgcccgagcccggg

SEQ ID NO: 33654 - DNA, 2300 bp, Homo sapien
ttctttgaccgcggcgtgagcggttgcttgggccagaaggttctctggtggaggcgctcttcctggtgtcccgcccagtaggttcgttcgcaccgcttcttccacactctttctccctccttctcctcgccccgccttccctccctcctcaatccctctagttccttccccgcctcgccactgtgcacgatctcgcgagacttggcccagaacattgcggatcgggtcggcgccattttgggactgagactggttgtgggggagggaaaagcggcaaaaggggattattcaaagtaccgaaaaccttctcccgggatcaggcgcggcggcacccccaggccaggggcacctctggtggggcagaaggtaacaccgtcctctaggctccacgcccgagcccgggggaggaggggagtgcccgtgtccgtgttggggtttgaggggtcgggagcggcgttggtggcgcgaggtgtgaggctgcccgccgacggaggggcggcgagaagcaaggagtgagaggggggagaggcgcagataggcccctctaggtattgactcggcccgggtggagcggaggtggtggttgtgaggagggggtgggtggtttagccccggcggcttggttggggggtgtttggcgtttggcggaggctgggagcgagtccgacgctctcagtgctcggccttccttcccccggcctcttgcacacgcccgcctggttttgcaccactacccttctcagggctgagggagtcgaggccgagttgtggccttcggcggtttcttcagcagcgcctcagctttccccgcctctcccaggtccgtggcacttgccgtggactggggcgaaggctactttgttcctttgagtcctgtggggtctgaggggacatgtgcatttttgagagagaaccattctttggtttacgaaaagggccctgtaccttccaccccctcagttttgggagaaacctgttttcttaattcgaggaagtggaaacctacaccttctagccctttgctccctcagaagtggggaagtctcctcgggagaatttaagaagcgggtttgccctacttctagttcacctttctggccttactgggtgggaatatgcctcctctagtagacgttctgatttggagggagcctctttctctttacacttatctctgagttacattcgctaatactccgtggcagcacacctgtcttcgctttccttggtccatcgaagagggttggagatcttttgtaagattatgtgtcaatttcatagttttaaaatttattcaagaagtataagaaggtttgcttatataattccccagtatgggatctgcaccccttcccaggtgaaatctgcccttgccctccataataccgtcacctaccgtttttccctccctctactccgatgtcttgttcattcagtagacttttatcgggtgcttgcttgggtaaagaagcccttttccaggctcctgtagggttatatagaagtgattttctctccagaggttgactttttaagttggggattgatttttttagctcaaaatcaaaactcagtatataattttttttataacttttacaggtgattgaattactcagatatgaagatcatcatctaggttttgtgtaaaaggccctggatattttaagtggccattttggatttacagtgtttttggataattttgccccagaagtttattaaaattggcaagaatcgtctgtgaagtgaattgatagtagtgaacaattcagcaagctacttaaaaagagacccaggcagcatttcttcagtattttggttcaaacggattatataactggttacagtatttcagctggtggtaatttttgcctccccttcccccaccccgttgttggggttcttcagccgaaactgagagacgttgatttgtgtactgagtagtttcagcagtttcaaatgactgagtattgctgaagtttcatggcagtttatttttacctttattgaaagttttaggaatttttgacttcagctctttcatgtcacaatgggacactttttctgaatgaagagattgaaagaatacagagtttttttccttttatcttttatttacgtggaaatttaagatgttgcagttttccggcagcatggtagtattgagatagctatgtgtgtctctgtatatgctgatgtttaggaatgctcttcagatgtgaaattttctttttgtttttgctttttggctcgtaaattggatatttcatctggagtggacaagtacaacagtggca

SEQ ID NO: 33655 - DNA, 2300 bp, Homo sapien
agatcgtgccactgcaccccagcctgggcgacagaacaagactccatctcaaaaaaaaaaaaaaaaaaaaaaaaaaaaaaaaaaaaaggagttgtctgtcttctcaacccttactgtcattatatattggccaatgggcaagaggtgccagctttgttctaatcttgcattttgattacaagagaacctggctatgttttcatgtgatttgtggctctttaatttttgagaactggctttttgctcatgttttccccattaggttgtccttatttgtattgatttatagagctctattttcctttcctttccttttcctttttcctttttctttctctttccctttccctttccttttctttttttgatggagtcttactctgtctcgtccaggctctggagtacagttgtgtcatctcggctcactgcaactgcaacctgcctcccaggttcaggcaattctcctgtctcagcctcccgagtagctggaactacaggcgtgtgccaccacacatggctaattttgtattttttgtagagatggggtttcactgtgttggccggactggtctggtctcgaactcctgacctcaggtgatctgcccacctcagtaccccaaagtgctgggattacaggcgtgagccaccatgcctggcctttttcaaacatttattgatcattttcatgcattttctttttagattactgagacgacttgttaaaattttcccttcccttcccatcccgttgcatcgcatcgcgtcccgtcccgtcccgtcccgtcccgtcccttctcacatgcaatggcgtgatctcggttcactgcaacctccccgcctcccaggttcaagcgattctcttgcctcagcctcccgagtagctgggattacaggcatgtgccaccacacctggctcatttttttgtgtttttagtagagacggggtttctccatgttggtcagctggtctcgaactcccaatctcaggtgatccgcttgcctcggcctccgaaagtgctgggattacaggtgtaagccaccgcgcccggcctaaaattaaattctttaaaaaaactgttggaagttttgattgtggttttatcagattagtagattaatatttggggctagtgacttttatacattgttagaacttttctgtatttctaattttttggaatacttattgtacattcttttattttgatacctttttaaaaacacttggtttggggaagaggaatatggaaataaatttaagggacttagaactgaagattcatttgacaatttttctctgatgtagaaggaaactgagctgtagtgaaaatttatatcaagtagtgtatgataaagacttaacattttgttgagaaacatcgtattttaacttgttttccatacagtggcattttacctttatattttttggaaaaaaagatgtcgaactctaagcacatgtgcttgtttccattagatagaagaaaatggaccatcggtgaatccattatacagttacccagttatcaaataccttgaaaataactgcaatatgttgttcttaatcatttaaaatttttggaaataagtgaagttggagtattactagtttttaaagttatatttaggtttcataaatacctgtatttttataatttgtttcagtcgtcattgaattttgagaagcattctgaaaactttgcatggacagagaatcgttatgatgtgaaccgtcgacgacacaactcttcagatggctttgattctgctattgggcgtcctaatggaggtaaaatttgctaaggaatgatgtttatggctaattttctttatgatttttaaagaatgttttgatgtgattcaatctttaagcttctcttctttgaatttatattactttgctattatcaaataaaggtaactttggaaggaaagaaaaaaatggatggcgtacacatggaagaaatggtacagaaaacataaatcatcgaggtggataccatggtggaagttcccgttctcgtagcagtattttccatgcaggaaaaagccaaggactacatgaaaacaacatacctgacaatgaaaccgggaggaaagaagacaagagagaacgcaaacagtttgaagctgaggattttgtaagttttttatgacttttatacaaatgaagtttctgtaagtgctattttaagtgattctcctgcctcagcctctccagtatctgggattacaggcatccaccaccaggcccgcctaatttttatatttttgtagagacagggtttcaccaggttggc

SEQ ID NO: 33656 - DNA, 2300 bp, Homo sapien
aggtcctcctcagctgttaggttcctttgtgtacactctaaattgaaactttttatttacttctctagaactgtgtgttgaaatcattttcttgctgatgactctactcctattttatatagttgtgtttggtttcctcccttacagtaattttaatataagaatctagaagaagataaacttgtgtgcttagccacattgaactagaagtctctgttagccatgtttaaacttacttagttgtagtatagtgatagaactgccccctgctttaacacctggattcctctcagatgagattacctttcacattttgtagcactgatcattcctcagattcctgggctttactcaatttagattttgagttacatgctaagattttctctcacattttattaatgtcaagaattttttttatacttcatccatgccattatcatctgtttaccaaaaataattggaaatcttacattgttgagtacaatcctaatattatttactattctttgtttgagattttttttttttttttttttttttgagatggagtcttgctctgtcgcccaggctggagtgcagtggcgtgatctcggcttactgcaacttctgcctcccaggttcaagtgattctcctgcctcagcctcccgagtagctgggattataggcacatgccaacacgccccgctaattcctttttgtatttttagtagagacggggtttcaccatgttggccaggctgttcttgagctccggacctcatggtctgcccgcctcatctcccaaagtgcagggattacaggcttaagccatcacgcgcagcctgtttgagatctttattcatttttgttttgttaactttgttgtgtaatatcagaaaagctatactttggtagtaatactttgtgtgtttttgtgtgccagaagttgtcttttttagccctttatattgggctttttttagaccgtcaggaagtttcaatctttaccctagtaagtcaacatgtgtttaatttttggaaagatgaaccttttctcagattattttaagcccttgttctttttatcctttagcatttcaataggtgaagcaccataccggctttatcttttggagagcttgaatcctcccatgaactggagagtccctccgggtttccctaggagtccatatttagttttgggttttgagatgatccatgaggaagcttgatttagtttttgaggagggaatcattacagatatctacccagctcactaattcacatgatcttatttaatgtggagaacttaatttattctaaactttccagctgtgaaactgatgcttttaaaagtttttgtaagggaagaaagaaagacttcactgcaatgtctgtttgattacacacacacattgattaaattataggaataataggtatttttggcaactgcagtagtcttgagaaaagtctgcctttagcaattattcgtagtatttatcttcagaaatcaggattgagttggttggtctgcattcatataatgctttgaatgtagataaatggtcaataaatacatgaatgaattgatattgtgaaatagaattctcagtcataactgaagtatttagaaataaaaggaatgtaatttcttgcttattggtaataactttgtaagtggagtaaaaagaatgaaaaaattgaaattttaattctcttcaaatggggaagggaaaatagaaatgtattttatattctaaatcttaagagtcattaggttgatgtttgcaattttttatagttaatgcaaggcatgttaaaatataatttgtcttggttttaacattctgagccactgtgtagcagaatttatctgtattacttgacattgcccaattcttcctatattctgtgggataatgttttagctttacttgttcaattggaatatagtttgtacttttttagtttagttattttacccaggaggcagctgttagttaaaaaaaaaaaaaaatttggaatatactgttcttttggtggttttattctatactaaaacttgaaattgtgagtgactcttggtcatgctttatttatgcagaatatcctccgaatcctaaatctagagctccaaggatgctggtcattaagaaaggtaatacaaaagacttacagctatctggattcccagtagtaggaaatcttccgtcacagccagttaagaatggaactggtccaagtgtttataaaggtttagtccctaaacctgctgctccacctacaaaagtaagttctaaattaccacaaatg

SEQ ID NO: 33657 - DNA, 2300 bp, Homo sapien
ctgatgaaatttgctcctgggacaccggaattaaagcaggctagacagtctctagcaaaatcacacatcagccacactctcaaggcatcagttatgctgtgtggactcagtaccaaatatcccttagttgaaggtgattctaaggacagcactctagtaagtgtaggatctaaggctgcacttggtactatgtgggctcctccactaacatttccaccaacttggctttgttttatattccagaccggagcattcataaatggggacttgtgctaaatacaatgtgtatttcattttttccattttgtaaaatgtgcatgtagtttgttatgggattttaaaaaattcccagaagcaccatcctatagcaataaaatgttgttttaatcaaaagcttggttgtactacataacaaggaagttcataaaaccattcagtgtgaaggtttttaacactgttgaagaaggaattttgcagttacagaaaagattaaaggaaaggactgttttggtgagccctaaagcaaaaccatggatcttgtgatgaaacatacattctgccatgactgattgtcaccagaaaggttttgaaggcatattacagcactggataaaataaatctatatcaagctatagacaaagaagagggctggatgctcacagcttgatgctacaccatgactctccaagaggctcactgggcaaagactcaggttagttctcctggccttgagctggagggtgttttttgtccagtaaataggggctgtgctacctcttacaaagcaagctttattgggtaaatgaatgaatgatgaacccaaataaagattattttggagaactcagatgtagacatggaaaatttctttgctttacaagagctcacaaagataattatattctattcgcctaacacataggggagcagaagtaatgagctttcttaaatgctatttctctgtaacacattgctgatgtcctacattttaccatcatacacatcttttcaggtagtctgtatttctatatgaaacatggaacccaaacaaattgttgctatgaagtgatcagggtgtaatatatcttgaaatggaaggaaagctagtataattctaattgtatagattttaataactacatagaggtttaatgttataatatagtatatgtatcttgaagatcaaaatgttttaaggattagtttaaatatataatttttcaaatttgtcttatcacttcattttgtccattgttgcagaactcaagagttgttgcaaataaataaatttttataacctgcatcttaataaatcatgcaaaatagttgacattcagtcattatacaattaacatggacccaatgaacctggttctatgaacaatgtctagacacagtaaatgtttaatgaaatttggttgttagaaatttatatcagaaaaaagtatctatatgggttaactttagcaatcattctattcctttcgcttgatctctgatggattagaagtctattaaatatctctacattttgcttgacacaagtgcattgtaattacagccatcaggccatccttagccatttattattttcatttactaaaacagtctctacgatgatgacaccctgtgggattaggaatctaatggaaacaaaaatcttgaaaaagtgaagattgcagggtaagacccctcatcagaacagtatcttaagaatgaaaaggtaagctagtgtaggaaaagtgaatcctcagggacgctaaggagggagccttcctcccagcagtgttgccatacctagcaccagctttctttcatcttgcttttatatcccccactgcatcatcatagttatctagagacctcaccaggcaggctgacggtcatgtgtgggttgcctaattacaggaacctgagatttgaccacttggcagccaattttctctttatgtagaaagatctaattgtttatgtaatcatcaccatcattaatacctcagagatgacctcatccagaaatgctgggaactggtggagtaggacatgggcggagtcagtgtgttcctttaaatacctgtggtcccggtgcagcctcccgtgtctgaaagcatttctggagtgttttaggcctgttcactttctcttactcactgtctattcacttgtcctgttcactcgtctggaagatctcagccagcaccatgactgacaatgagctgtctgccttggtagtggataatgggtcagggatgtgcaaggcaggctttggtggtgacgatgccccccgggctgtgttccc

SEQ ID NO: 33658 - DNA, 2300 bp, Homo sapien
atgcctttaaaagccaggatatgattcaccatattttcttgcccttactacagtgaccaatggtattatttaaaaatgtattacctggcacatacttacactaaaaaagtatttgcttatctgaaattcaaaattacccaagtgtcctatgttttatttggcaatcctatctccagcaaaatcttgtagttgttacattttagggtttcaagataacctaatagcaataaaatcatttactatgttcaatgttatttcagaatttaaagcttgtacctcagtagcatttttatttaatgtcattgtttagaacatgtgcagggatgtgaagcaaagattggacaagtgaaacgtttgtcaaaggggtgttaaatagtgtcttagttggctcaagctgcaatgtcttactctgttttggctgttataacaaaataccataagttgagtgtcttataaacaatggaaatttatttcttacagttctggaggcaggaaagtccaagatcaaggtgctaacagattcggttagattcttgttcacaggcggcatcttctttttgtctcctcctatgacagaaggggctacctccttcaggcttcttttttaagggcactaattccattcatgaggactctgctgtcatgaaccagtcaccttacaaaggtcctgtcacttaaaattatcacattgggggttaatatttaaacatatgagtttaggatacacacaaacatttggaccatagcaaatagtaacctatgcatttgatgcctctgacctaatgggtcttaaagaagccgattatgcagaaggcattttaaaaaattataatttccacttttaatttaaattcagagggtacgtgtgcacatttgttacatgggtatattgtgtgatgctgaggttttgggtttgattgataccatcacccaggttgtgagcatagtgcgcaatggttagatttcaaccctattacccctccctccttcccccctctaatagttcctagtggttattattgccatcgttatatccacaagtatgcagtgtttagctcccacttataagtgagaacatcagaaggccttattataaggacagggtgtggctataaagtctgaaaacatgttattgatcatgtcatctaaaataatgtaatagcaataaactacttgttagctacatttgtttatgttttcagactttgtgactatcttataatttctctgctcttcagattaaaaaagaaacaggacctaagcttcaaacagtttaatcttattctgtcaaaatttctccccttcttagtgaagttcctaaagtacctgcatagaggagaaggcaaaggaaatgtgtgctattactataaggcttttgcctcaaatcttagtctagcctcttggtgagaaggactggaccacataaaagtctcatttttcctagatcagtcaagctgagcatattggttacctcgaagctagtatcaaagttcttcctttcctagcattccagtgcaaggaaagataagccaaaggaaaggagaaaaaaataaaccaggattcctagaacagagctgatctctgctctccaggcgaagccctctcattgcagcacaggggtccatgttagcacttcagctgcctaggacagagtccagagggaagagatagcacagcaccagagccttgggaacttggcttctctggtccttcacataaaaaaactccaaatgaccagcacctgacattgtttcccatgggtggcaaaacatttatttaacatcaaactatatgtttgtatcatattttttcaattcaaagagaccctagacgcaagtatgatgcacataaaatttactatgtttttcaaggtaaaaaagaagtagtacattaaatgtatacattaactataaaatcaaactcaatttctcaactgttttgtgaaggggcacaaatgatattggaaacaaggaagaggggaatacactcacatatttttctcatagttaccagtactgtgcttcttcagagtgggatggagaagaggaggtggaaagagtggggagagaaaaggtgttgagggcttctgctgggagatgcactatcatgaggaaacacactggaggccttggtgtgtcctggtggtaagtagggggtaagggaggaagcactctctttcttcatttgtttacttctagtgtttatggagctctaattatccaccaggcaatctagttgctgatgctacagtggtgaaacagtcgtcttactataggctgccattctggtggtgggagacc

SEQ ID NO: 33659 - DNA, 2300 bp, Homo sapien
tcggctaatttttgtattttagtagagacgggatttcaccttgttggccaggctggtctcgaactcctgacctcaggtaatccacccacctcggcctcccaaagagctgagattacaggcatgagccaccgtgcccagcccagaaactattttttgtaagtctatgcttcatcttagatatatcaaataggcacacaaatctgtgggattctgtgagggattaattagataaaatattaaaggcctaaatctgtacctaatccatcctaggtcttcaatacatagaagctattatttttttcttattatgttatttttaatcttgcagcataagaggcaatacatagaaatagaaaattggtaggcagtgtttaggtcaacatatttttattatctcatttcagtcttgaaaaaataatatctaatgattctctgtgaaacctgcaggagcctgtaaatgaaacttctgacagtcattcccaccaggcatccagccacatagctcatgctccctggtgccctgcatacatattccaaaatgctgtcattccacgttcctatatttactgggaccttggaaaatgccctatttctctcctctgtattcaaaaattcctcagatcagttgctctcaccaaaaacagaagtagtttcattgggctttctgccaaatgcctgagcagggaggactaccttttctagtgagagaactgcaagcaagtaggtcaagctataacccacaggcctgcacggtagtcctggatgttctactgcaaatatccctttccctacgatgatcactgaagacatcgctaagccccatcttattttcagggcttaaaataaaatattcagctgcctcaatcatgcttgcaagaactgggtaaaaattataattaaaatgcagtgcaaacgcagcattttaaaattacacagacttaaaaaataatgcacagttcaggcttgacactacaatcttttaaggtaaaaactgtggaatataatgaattattattagatgaatagtcaaataaacagtatcttagtatatgaaatatgtactacagtgtccaaagtgtcactgttcatttagccaaggtgaactgaacactgcacagctgcataaatagaaaacgtcacgtactacagtagtttctgaaaggtactaggagtgtggtaaaatcacacagactagctacaaaccatactgtgttggttagctcaggctgctgtaatagaataccataggctgggtggcttaaacaacagatatttatttatcacagttctggagactgtaagtccaagatcaaggtggcagtagattccattgctggtgatggttctctcacttgtctatggaggactaccttctggctctgtcctcatatggcagagagagagagagagagcgagagagcgagagagagagagagagcactctgacctctcttcttcttctttttttttttttttttttttttttttttttttttttttttttttttttttgagacgaagtatcactctgtcgcccaggctggagtgcagtggcgcaatctcggctcactgcaagctccgtctcccgggttcatgccattctcctgcctcagcctctcgagtagctgggactataggtgcctgccaccacgcccgctgattttttctatttttcagtagagacagggtttcaccgtgttagccaggatggtctcgatctcctgacctcgtgatactcctgcctcagcctcccaaagtgctgggattacaggcgtgagccaccgtgccaggcctcttcttcattttataaggggccactgacctcatcacgggggccactgacctcatctaaacctaaaagctaatttacctcccaaaggtctcacttccaaaaaccatcctaaggggagtaggacttcaacatatgaatttggggggacacaaacattcagtccataacacacacactgaaaagtaaactggtgctgaattattttctagcagctattgggaagcagaagagtgagatgggcaagatacgaagccattcatcatttccttgaaaggctaagaagaagggattcatgcaagtacaacaagggcagtatagagtcaaaaagcaacactggaaaagggagagaaaagagcaaaacaaaattaggctggagtgggttttttagtttagtttagtttagttttgttttgtttgtgcattaagaagcatagcaggcttcaacatgacttgctggctaaaagttctaacatgaagagtcttttcaagcaaataccccacagaattc

SEQ ID NO: 33660 - DNA, 2300 bp, Homo sapien
cccctaagccccaccccttattccatccctgacaatcttggggttaaagtctattgtcacttatgagaaacatgcctggacttgccctgcactctttaaagaatcaaaaacggaagtgacagcaaagactttccctttctcctcgctaatggcaaagcctttccctttctcctctctaatggcaataagcctcttttccacattatgctggaagtatttgagacacagtatttttgtaaatgttcgattaatgttgataccacacatacctaaatttgacagtggactgcagcaactttttgtatgtaccttccagggattcaataatctggtattctaaatttctctggaatttagcttcaaaaaactatttaccatatcctgttaacataggtaaaaagattcaagtgtgctgctaattaacctaacctcgatgatctagtaaaaatatacaataattacctaagttctccaagcctcatctataaaatgggaataataatgtaggagatgagaatatgccaccccaaatatggccctgggataaagattattttaagataattattttgagaaccagcagacccaggaaatgctctaaaaatggcatattaccctttcgtaagggaaacgtacattcactaaaaaaaaaaacaacaaaaacaaaaaacaaaaaaaccccacaaaactccatttgtaaaagtgtctcctctgtaccaggaagaatgactctaaatcatgaaaaacttatcaatgaagaaataagaaaccccactcctgtttaccgtacatttcctggtcatgattccttaacttgcctgccccactcttttcttttggtttagctaaagatagtatttaagcccgattttaaaccatctctaattttcctggttatctcccatgtatatatgagacgtatatgttaataagcttctttgttttcttgttaatctgtctggttacagcgacccaggccaaaactttgaaaggtggaaaattatttttccttccttacaatatttctctcagaattgttgtaggatgaaataaggcatttaaaaatactgcacagtcctcaataaatgttactctatcgtaattagaacaagaaaaacaaacaaaaaaacgtgttcctagattagtcaaactgcacagcaaaatctggaaatgggaaactaagctgtgtttgcactcactggcctacgctcctctcttcatcctaccaatctccctaccccagaaagtctcagattgactctccaggaaccagggcagctcatgagccatctcaacagatgcattcggaagaagtcatagatgactctgattggaaactcacaatcggcatcgatgtttagtactagtaactgtcaaaggcccacggttgtcaaccgctgcccacttcgacacctaacggcattccggaacattccacaagatggcgcccttgctttccaatcttcgggctacgggcggaggacgccttgccaggacgccgacctcgctctgcaaggttcaggggccgacctcagacagaggctcgctctaggggcatgggcgggggccagacgggcctcgagtgggatcctggcacggttggccgatcggcccgggatcccggctgcgggcccgtgtctgccctagcgcgatgggctcgaatgcccggctccacgaatcccggcctttcacccccacggcctctcggcactgccccagctagacaccagcgagctcgtcacagcgcgggcaggcactgcggggcagctgcagacgagccctgtcatacggccggaggaggcctcgcctgcccgtgcggcgggctccgggcaccctgataccttgacacaggaggccccgggcggccgggaagggctgtgcgggggagggactgcgtctacacccgcgcccgactcgctcgggtcacggcactgccctgccaccaggcggctggggcgggggtgaggccaggcgtcggccctcgcgattctgttttgtacgctgaggctcggagccttcgaagaacgggacagcggggcccacggacggctctgaaggccttcccgcggccgcaagagatctcggcggccggcgtttgaggcgcgcggctccgctgggaagcgagacccgggtggcgggacaagacttgcttcccggccacgcgcgctcggccggccgtggggcggggcataggccgtgacgtgatgtcgcgtatcgagtctccgcccccttcccgcctccccgtatataagacttcgccgagcgctctcactcgcacaagtggaccggggtgttgggtg

SEQ ID NO: 33661 - DNA, 2300 bp, Homo sapien
caataaactacttcctaagccctttactacccaaaccgtataactgtagaagaaaaagcaggaaaagaaaacctagacataattgctgtgattaaaaaggaactgaaaggagacaataaatatgtattttgcgaggccaaagattgggaagtaggaaaatatagaattcaagacataaaacataatccctacaaatgacaatgatccaataattctattttgaatatatacagcatttcttttataaacttgaagaataattatatccattacatcaaaaaaattctatttgaggaaagtgccagtcattttccctccattttattttccgttagaaaaactaaagtaataaggggttaagcaacttttttaacttcaaagggcaaaagctgaatgagcaccagttgtcctgccttctagagaaaatcataattttatacaaacattgtataaattgcctttcttacagatgtatgcctaggcaggtgagtgtgtatattatttggaggggtggctaatactgaagttaaatatagtggtgagaatgtggagcacatcaagttcatagcttcacaacttcataacctccttcactgtaagatttttgtccaggacacccctattctgccttaacaccttattctatgaggcttagctcaggtcttgccttccctgaccaccctctgagctggatgcctctttcctttacctccactgtccctgtccataatcctgtctttcttaggcattatcactttgatctgaaatgttctgtgggcgcagcagcctctctacttggctttaagtgctgcagggagcttattcactcttgcatcctcatctcttagcacaatgcctggcataatgtcagtgctcagcaagtgttaataatacgtcctgtccttccaatgtccagtagttatttcagtaactaaatcctcttttttaaaaccaccttatgcaaagttaatcctctgtggttcaaaaagttccaagacaacttaaaagacaaattttccattactttgtcatctcatctgtcgaattcatctgtaatttgtctaattcagcatctcccactgtgtgtgttcccatgagttggactccaagagatgctcttggtaagcgtatctatgtgggaaacatgttactcaatctagcaaggcagccagtgcagtggtttagcacacaggtgctgggggcaaactgcaggctctgtcgggcaagtgatcattctgtgtgcttctgtttcctcttctgtaaaataggactaataacagtttttctccctcacagggttgttgccaagatttgctgagtattacacaaaaggtttggagtacttagtgctaggaacatactgactactattattaagcaaagttaaacaatttctttttcttatttggttttattttgtttgctggctgtaagactgctgagagcctttagcatgctgatgtacccatgaatctccagggaagcagtattccccacatttacttgatggaagagctgctagcatatctcaggggtaatgggcctcaaaacataccttaggaaattcctatttataaatttaaaagaacgttaacattttccaaacccaaattgggacactgatttgacctgtatggctataacttgggagcattggtacataatattaatatttgaagagaggactggtctagcaacacaagtaaataataataataataataaaagcccaagacctatgtgttactacaattaaaatatttctttttttaaaaaatcaaagtacaagtgaagtgacttttattgatattaaagtgggaactgcaaatatggcccaaataaaaaaccatgtaggctttacgtattattttctgacacagttaaaaaactattacttgacaaagatgaagggccagacttccttattcaaaacctcacgccatttatcttaattctgctgcatctgatactgacttcctctagagccaggaaactttgcaagtattaaatagcgtgaacgaaggagggaaagaaggaagtaacccaccaaagtgaaaaagaggaacaagttctaacccaatgcaggtttaaaacataaccaaaagaacaaaagagagagcttgacacaccaatcttgaggtaagtaagaacctgatttaaggtatttggatgattaaacactataagaaacaagtttgtctttaattaatcaatgatttttatcttactacagtttttagaaaaaaatgccttacgtagctgtaagggggaaacccaatttacaaactgagagtgatgtt

SEQ ID NO: 33662 - DNA, 2300 bp, Homo sapien
aggccattattctaagtgaagtaacacaggagtaaaaaaacaaaaactgtatgctctcacttataagtgggagctaagctatgagtacacagaggcatacagagtggtatagtggattttagggacttagaagcaggagagtggggaggaggatagggattaaaaaaactatacattaggtactaagtacactactctggtgacaagtgcactaaaatctcagaattcaccactatataattcatctacataacataaaacacttgtatcccaaaagctattgaaatagcaatttaaaaaattgtatctgcctttatttgggtcacaacatgatggcatgagacttttttcaattatcacaactggtgataatctattttcccccttgctgacttgctactgtgagtgtgtgtgcttgcctatgaataagattggcagaagaggttgttggctgagtctaggtaatttagggtgtcaaaagtcccacttactgatccctactgcctatcacagagtctgacactcatgccattacagagtttttctccactgccaggagtctccagtatttctttatttaaatgtacatatcctcatacgatgtgctttttaagtattattcacaacctattactttgaagagttaatgtttcaggtaagttacaaggatttggacaagcagtatcaaccatttgagaaacaactgctttttttctaagaaaaatggtagcttagtgcagggtttctgggagtctggtcttagttcaaggcgagaatactatacaagattagataattcggggtaaaaatatactattaaaggatttagccaaatgtcctcatactgctttgaaattcttgccagggatttttttttttaatccctgactttagtcattatgtctgcctaattcacaccattcaccctttcaattcctcagcacagtattaagctaagaatacagacaggtgaagggcaagtctctgttcttgagggtttacagtctactcaaccttatatcatatactaatattgccacccatcatctgatttgcactgttaagcctgtaaactcttggagcccagtagcattctagtacaacatgcatacaagtgtgcatatgccaggaaccattctaggccatagtcacacaaagataatctcaaataactcatagatgactgcaaatatcatataaataaaccaacgattttagtacaatgtaataaatgatattgttagtagaagtgcaaactcatagcttcatgagcaaagatgaggaaatctattgctgtctgaagagtaaaacatgtctacagaaagaaattcatgttgagctgagtttgggatacaacacaaaactttattaccttggaactttctggaaaaattaagtaaaagatacacatctttttttttttattttgacgcagtctcgctctgttgcccagactggagtgcagtggcaccatcttggctcactgcagcctccgcctcctgggttcaagagatcctcctgcctcagcctaagatatacatcttttgatatgaaagataatatgagcatcggaactatggactcccatcaaggcatcatgagcaaagaaggagtatgataataaattctggttagctggagatcagagggagttttgaggtttggagaacactaaaagtgggaaagagattcaagaagaagatgtgggaagctggcaaaataaatgttaatgcaccttttttcttagtctttttgtagaagatgtacatgaaagtgaatataggcattttaaatacagggaatttgataaaggaattggttactaaggtgttggagaattgatggaactaaaaggagaaggcgagtttattcaaaagatcaggaactgaaaaaaatctattctcttctatacagcagcaaggagagctcaagcaaagtggacatgatcagagtccacagttaccatgatcctgagacaagctcataaaagcaagctgcatgagcaggaacccaagaagtgacaggcaccagccaccactattgctgccatcaccacagggaattccaacaaagcagaactaatggtttcttgcttcatcccaccttctaatctaacaaaaagcccactgtcaaaggagttggagaaacacagtttgtaggctcccatctccagtggtagagaagacatagaaaaatgattgtagagccaagagataatagacacaatgtagcagccacatgtcctggcttaagaatccacttcccttgcctcccttctcacctccctccaggtatccatc

SEQ ID NO: 33663 - DNA, 2300 bp, Homo sapien
actctcaactatgaggtttatgtttttaaatatatgccttttctattttttttttttttcagatgggggtgtctcactatgttgcctaggctggcctcgaatttctaggttcaaatgatcctcccaactcagcctttagggtaactataactgcaggcacgctccaccacacctggcttaaatgtattttctgaatagttataaaaactacttacctaggtgatatcgcattacattctcactaattgcaagattagaagacagattatagagttgttaaataatacaatcaactaaaattaatggaaatattgaatatggtaggttcccaatattagactgttgcattattgagtccataccgtgacatttttgaggtttgcacctttgaaaaagtgttacacatagattcttttaagacaatgtttctcaaattatggcaagggaaccacttgcatcagaattgctggagtgtttatttaaaatgctaatttccagacctctcaaaagatctagtgaatcaatctctacctgtggcttaaaaattttaactttaacctccgtctcaacagattttcaagtacgtttaagtttcagaacctctgttctactgctgcaatgaagtttaaagctgattcaagttattccttccatacctccatgccaatatcacaatcattcctttttcactctgcctccgttataattttgacttcatgacaaggcagggctgatttgctggatgatcaacgtttacttttaagtagagagggctgtctctagatagttacagaggacatggatagtcatacctatcagtcaactgacaggaaaaggataagtctaacaaaagtacagttcctagatttcaaaaccatttttttgaactaatctgggaggagtatagttgtaatataaggaatgactttgtgttaaagaaaggacaggataacttaatagaggtctcccatctcattctgtcacggtgcttttgggttccggtgatgaatgtgttcattttatgtggcttgctctgggtaaataacccagtgccctatcagctctgcagcccgcggccagcggcagtgtgtgcgcgctaatgacggcggaaggtgcctgggggagggcctggggaggggctggccagcgctatcgcgcccctggcacttcctaagagactgagccctttctctgcagctgcagcttggattccacgctttccctccagaggaaagaagccctccatctaaatcagctgtcttctccacatccctcctttttctctccgccagacgccacccctaccccttctattgtgttgtgccttttcattttagccccgcttcctacgtagagccctaacctcctttgtagcgagggcacttgagaatttctgaacctcgagttgtaatggagctgtatggaaaggtaagcaggcgaaaggagttccttggggtgcttagccagaaatctcgctttcacgcacttcggtgtgcgggttgtgtgtgtgactatgtacgcgcgcgcgacttctcagtgcaattatgcggataaaccactttccttatgtgtgtaccgttaatcgtctttctcccctacgtttggtgaatgagattgtaaaactgccccactctgcctaaggaaacgtagaaactttcccgattcggatggggaggggtagggcggagagtcccagagaccagctctggcttcgtttgcattggaaattagcacaaggtagtgttgtttcctaatcagaaaatcaccatctacttccgaaggcgatagttagcaaagaaaaatctccagctgagataagctggggtcacattcgcctgcccctggcgaggaaaagagcaggggagactgggagaggtaacccaggagcgtttggaaaggagtagggaggctccgcggccgagcccgactggcggatcgagcctgtttaatggtttgcttgcttgccgggagttgtagttcaccgctcgcccgtttgccgggaacacccggagggcgagactacagctcccaggagtgcacggggctcctcggcagtacgcgtgtgcggcgccaggagaggacagctccagtgctgatgttggagccggttagcgaaccccaagagtgcagagtgtggagcgtggagcgccgggactgtgcacgcttgaccggaagcccagaccagtgcggtcctagccagagagaaaggacatttgccaacaatgagacacgaagcgcccatgcaggtgggtccataaagaaagagtggcctcgggaggaattgaaagagatgcttttcc

SEQ ID NO: 33664 - DNA, 2300 bp, Homo sapien
ttggtgttggtaccttcctttcttttcctaatgcaactgaaaaattagactgaaaattatttgacttaaatagccatcctcagagtgaatcagcatttcagtttttggagatggggatggaagtagaaggtgcacaaagcgtcctaagatggcagtttgaatgttagcatcgcatctacatgctcataagaggaattgcttcaggacaatgaatcagttcattgttgctgcccccagtgaacagctccaactgccttgatgaacttctaatgactgtgaaagctaggaggttcttctagttcctccttagggtcacttgaagttcagtatttttttgctgcctggtaactaagtgctaagatttttacttggaaagaaaactatgacaatgccttcagttgtagcagaaagttgtggcattgtgataataaacaaaatctacaaagttacaacccaaattatacaagacatcaaaacactcagtaaacaaatatatatatttcacctacttaaatcttattcatattaattataggccttttgtttagtacactggttattttttaaggaaccaatttaaactttcaattttaaatacatctatgctgacgatagactttcgggtatatacaaccttcttcttctcttttaaaagttaaatacattccactattaactgaacttccatgaagcaacattaattttagagcatggtagtccataatcagtggttcattgtgatgtgctttatccaacatgtatcttagtgcatggttgaggatgtactatgtgatattttagttaacagtgtggcatttgtgggactatattaaaagcatatccaaactaccaagctataccaagctgaggtaggtaacacctgcatgtgaaaaactgtgatatgaatcttatttataaaaaagtcataactaaaacccttctagaccaaaaagttactgtgtgtttgttaataatcttcatagtactactggaatgctcaatcagttatttttggtgtggcatacttcagagctggcctgtccgtctgaagaaccctttctctcacaattacagtttgcatgactagaacccggaactctgttcctttgcgtgtatagtcacttagtgtgctgtccgggtgccacatgagcaactacacccatgtggcctttctgtcactccctggaaaatgcaacctctacagctctgctcagctctgcctgtgtgcattgattaccttcgctttagtagtttgcctgtaaaatggtgaagtctttctgatatgctgaacctttgagccagcttttgggagttcttcatattttaggtgaatttttgaccaaagtcaattaaagacataaacctgttttatatcatggaatttactgggccaaattaagtaaaagatgaagtttatgaccagaataaaaaagcctttacccctgcacagcactgtatctaaagggctctaggttgtagaaatatagtaccccctaacagggaaaaaccaagttgggggatttatctaaaatgtatctacctattgttactggtatttcacaaataatttttttcttaaaaatatttacagaaatgcttgacactccggtcaaataatatttccctttgatagattgaaatatttgcttttagattacacatacagtgctgcccttctcaacagtcactcacacgctcactcgcctgtacaaaggtatcaggcaaacactgatacttttttttaagaaggcaaaattccatctatggtgctttctcagtgctagggaaaagggagcttttactatgttccagctataactcacatcttacttataaggtccataaaatcggttcttcacactgatttcgtttgattagtctgtgcatgtaattaatttcctccaaacagagagagtggaggggaaataaattttgcaagcattctagataacagaaatgagtcattttaaaacctcactcagagctcgagtgttaagatcagaccatctagctagtggacaaattgaactttctatttgcagttctcttttactttctgactttcttttaaattactgcagtttttcaaaacactatcctcatggaatgacaggaccaagaatagaaaatgagactcaaatttcaccatttacttcccatcagcaaccattactggtggagtttcaaacagtcattacttgctgaaatgaggtttgaggttacctgtgtatttcattcacctgtgttaatatttccttcatcgtggacaagtgagagttggctgtggctttatttcttga

SEQ ID NO: 33665 - DNA, 2300 bp, Homo sapien
gataaaagatagggcttgctaacaaagttgaatgaaggagggaaggtgatgccgtataggggaacatgccgggttactcaaggattcagctagatggtttatattaaacacctgacagtgtctgacgcacatgaaacacctgttgaatggtaggaaagagtcatagattccatctgagatactggaagaaatataggctcactgactgaaatggaagtaattatactaagaactactttaaatagaaaaatgtctcacagttttgaaaaagtttgtcgtgactagcagggcattcgagaggagaatcttgtattcagaaatatggcactgaagttcaagttagaagtggtcattgaagattgtgggcctagggaaaattaaagaagttcaggatcctgggagttgagggagagtagtaggaatgatcaaacatgtggaacacttcagagaagtagggagaccagagaaaaggaggaccttagtattcctctgggggtagctttagtggaatgttggagctttaatttcttccttttgtagaggagtaagagtgatggaaatgaatacaacagatgttaacaaaagcagaggactgtagcagctaaaggccaatagaaactcagagagacacagtgttacaggagtgcttatcagagagcatgctctctaagacagacatgccacatgtggaaatagttaaatgtcaggaagactgcagagtagccataccagcaagttaaagcacagagtagtaagcacaggctttgagatggagaggaggtaaaatgcacagaattatatgctaaaatcaactaaaacctagtttttccttgtttctcacccacaagacctctttagtattaaagttacagggtaatactacaccaaaccaaatagaaaatgctgtttttctagaaagaactttgatttctcatttaaccctcctcgtaaaatgtctgattactcttgagctcaattctggattcctaagagccactcattcctttcttaactttgtgtacagttattaaaatgttctgttctggctgggcacgttggctcacacctgtaatcccagcactttgggaggctgaggtgggcagatcccctgaggtcaggagtttgagaccagcctggccaacatggtgaaatcccgtctctgctaaaaatacaaaaattagccaggcgtggtggtgggcgcctgtaatcccagcttctcgggaggctgaggcaggagaatcgcttgaacccgggaggcagaggtgacagtgagccaagatcgcactactgcactctagcctgggcgacagcgagactctgtctctaaataaataaataaaatattctcttctgatcaaaatacagatcctgagttctatatacaaaacactgcattccttatgcatacacagtgccctagctttcacatttccctccccccagaattgcaagtggtcccacccctagattttgaaggttttagaactctgtcatacataacaatagaaacaaaaggagctgagagcagccatggcacacaggtgagggaatgtgtcattgccatctgtgccatctgtgaattctggacattagtcgtattgtttaatccctatgcttttatgttggatgaggggagaactacagtcatttctacatcaccagggagccacttgttttggatttgagagagggaagcaattaaaatgctcgattgccatttttggagcagtttttatttggaaggaagggaagccagaggacattaaaattcatagaaaatgccctccaaaaggatgggcaattcttaagaatgaactacgaattttgaggagttttatggtcattattcatcactgcaagagggaagccccgttcatcttttctcagggtggcctcagagctgcagggataccattattcaatggcgtttgtcgggtgaggagaaagcctccccagaggctggcccttgccaaccaatcccaaagcagcctgcaccgaggccacaccccctcgccttataggctaagagctggaatgcaattggtgcagagttggggttttatgggaggggcttcttgtcactcttcccggcttccctgcagttccttatttggtagcttttgacaggactagcctttcttgcaactaagcatcttgacatacattattcattaagccctggagctcgggagagaaagatgcagacccttagatctttagatattcctttatcacgtggattttctttattcagaatagttgctgaattttgtgccattctggagtcttacaaatggcat

SEQ ID NO: 33666 - DNA, 2300 bp, Homo sapien
aaacattctttcagaaatgttcatgtgagaaatggtcttacaagtggataaaactctgtaacatcaaatacatactttttttttattctgtcactaccttaaatattaggagtagaagcaaaacttaaatttaaatctcaatggtcttacaacatagcgcatctttctttctctgtaatggcaaccttgatgtaccaatccaaaaactttgagtattctggttagttccatacattgtcagattccccacttaagtttgtttttgccaggggagagggacgatttcttagtcattatggtactattatacagtctttagtagatgcccaataagtgtgttaggttttcagagaaagattcttggaagatgtagaatgttgggcaagtaagcaaggaacagcacatggggctgcactaaacttgtgtgtgtgtgacagagaagggagtagcatcaggctaaataagctcattgtaacatggatctgggggacggtagaacacaggctaattatttctggagagttgaaaactcaacagtcagacattacattctctgatcattgtcatttgctttctgaaatggcaactggaagctatttggtagaccttacatggagggaacagtgtttcaaataaatagtagttgcctaattttacttggtttgcttttgttctttcttttcccacatttaaattccaataagaaaaaaattaaacctcttcctctaaatcccctctcccctaaaaataattagtctcacaaaacttttaagtttccaaaaaaatacatgattaattaacctgctttaaaatgccagcaatatactagacatgggacagtgctaagaaagtgtgaatgtcccctggcagtcataaggaaactgaaaagcttaaggggataactatgtggaaagcaatttattggcatttaccgtaagaggcctgagagtcattgaaagaagactaagtcacaaatgcaccttgaagtgtgaccaggggagcagatgaagggtttgttgtaagaagcagccagagcctctggcggatgccgtactacattttccaagttgtttgggtgggtcacaactgcactccaacatcctgtctgcaaatgctaaataaacaccaagttcacgtcagactagagaaccaacgtactagctaatgccatttaagcaatcagaatgcttacattattttcacttggtaattcacatccaaaataattgaagttggcacacccagaggagtatatatcctctgtgtagatgttcagagagataggcaggctggtcaactgttccttctgttgggagcaattggaatcagcttagattatatctactgtaatagaaaatattttatatttaggaggtgggaaaggttttggccttcgaaataataagagatattgacaagatataaagcttcattccttactgaagagctgttaaggattagcaaacccaagtctttgtgtgtagagatgaatgaaatttgcattttttttaaaaaaaaataaggtttagaaaacattgtgcaagggaacagccttaatacgtgcagccacttgtccaggaataatacattcaatttttcagtttaaaattccagtatgttctgatccaagggtgcctgttacactctgctgaatttttaagaggtaatttacatctctacaaccaactccaaagcatgacatttcattacatccgctcaaaatgaacagctgctaagtcatcaagttctctcaactttgcttctaaagagaaaagtttagttttagtgcttcagtgaaatacttttttgaaagaatgacttttataaaattcatttgtttattatggtaaataaacaacttaatggcaaggggtgtgttccttgtaaaggtgatcacggaatgttacccagaataacacagacatctcatttcccagagaaggaaatggttttataagttttgtgaggtctcttgtctgcttggccggtttacagtgctggtctctggagctgatccgcccctttgctttgtaagtctcagcaattgacgaggctaggctgggcgctgggcttttctttttttttttttttttttttcctttctcactgccctgcggtgttttgaactgccttcttacagacgtcatacagcccttgaggaatagtttctgcctggtgagattgaatgatagttctcattcacaaaaccctggattctaagcagggacacacagaaattactttcgcaggtaaatcagcccacccagccaaagtgtggagagatttgttccttggctgac

SEQ ID NO: 33667 - DNA, 2300 bp, Homo sapien
gctggctttagcctgaatacaaagatagggtttatcttgctatcagtaaaattgggataacaatgaaaatatttttctgcttccaaagtcgtatacataaactgtagcttttattagaaatcagtgatgctgtttcacctacaaaaatttaaacaccactggacaaaatgagagctttgtgttgcctggagggtgaaaaaagtccatctttgccagcaacatcccttctactcttctgcttgtctttgtggcctccctccccctccctttcacaccaagccacctcaccccaccagctgttagggactcctcccctctttacgcagatcaccagttatcttacactgtctggctttagtctcagatgaagacattctaataagcaccaagttgttcagctcagtgctaactctgccaggaatgtgtgcatttcctaagagctgccgaaaatggaaattaaatagtttgaaagaattaaatgataatggtggcatttcatacaccagaagggcagattggcatcagtgtaagcaccttttcagtccttctttgagaacaccaggaaagtggctacctgttttgctcatgcgaaatttggatctctatacaaaagcaaaaagacagtttgtgaagcgttacaatattgcaagttgattcagggagaatgtgttgtgtttatttttgaactctctgctcctccaaggttgctgctgttcagggcagttctcactcacccactttctttgagctcatgtctgataagaaagaggtgaaactgtaaaaaccttttctattactcgtctccaaagctgatatgaaacctgtagcattcttaagaacccctggtgtcctggatgctgttgtgaaaacaagcataatgtttaatgtcttgagcttttattgaaattatatgaatattcaagactcccttggtgtacaagagacagattgagctttagaggtctcaaaatttgcagatatggtgatgttcactgagctcaactcttggtcaattttgtccagttcagagagggttaaattcactcttgggcacttgaagcctctctaatcttatcctgaagaagtggcgctctcccttggtttacagttgaggtcacccgcggggcagtgtttggatacagactgatgaaattatgctgcattgttaacattgaataccactcagtggtgaggaccgatgacggcactagggtcctttgactccttgggtacaatttcttgaaatagatgctttcccaaaatgtcctggactcataaaatatatgaaggattctatttggctttcatcatttatttaatttgaaagaaagttgttttaacagatttatcagagttaagaaatgtttctagggaatagaaaatggacaagataattgatctttgttgtcagagtcatgcattgtaattcactctctaaggtgacgcagcatctccttgagggcaaagctgccaaaagttctgaaagtgatctgcctgtttttttttctcacactgacttttagagaggcgctggtattttcaagacgagtaaatcctgtttacatcctgtggaaggttggctaagaattatatccatctctttttaagagaagttgaaataaggaaaattatagttggcagttagctgtgtgaaatttagtaatctttgtcagatgacccagtcataggcatgtattttttaaaattttttaacgaagccctgtgggtttacattttttaaagttcacactgatataaaggtttacccacttcaatcacaccttttgttgtgtgtgcatgcgtgtgtgtgtgttgtgcttttcaggagtggcatgtgactatgctgtttaatcagggctatatttaaaaacaaattttcgagggagtgtttctcacgttaattatgagataaggcctgagtgaagcaaactctgtcgcaaaggccaagtgtcatgcagcaggaagtcctggccatcccttccagccctgcctcagccagcctgccatctctctgtcagcgcataccactgcacaaaggaaatgccctcactcagctacaagtgcctcctgctccgtgcggggcctcagggccccagagccccgcaccagctctgacttctcgtggttcctggggatcttggcatcgtccttaaaaatggcttttgtttgggatcctctgggagccacggtgccaggaccatctacaagagccaaatcaagattgcgtttctcaaagtcctacaggtattactcttttccttttgtagctaggaagaattgtttaactgccttaggcccct

SEQ ID NO: 33668 - DNA, 2300 bp, Homo sapien
gagttggcaaaatagatgagaggcttctaagtaaaactgaggaatgaagaatgttttttggaagagattacgcttaaaaggaattagccagccagagaagaaagagaaaaatgttcttgccagagtacctatcatttgggaagccccagtgggccagaagaacagactgtgtacaggaaagacactaccaagtgttatttgtggctgatacaggagaggaagggagagcaaaacaatagagcatctctgtgctgagtattggaatttaaattttgaacttcattactaaataatgtggaactattggataatttcaagcaaaggactcacatgttcatgtccttgcatgagtttgctaagatttccattttaagataatcttggtaggtaagtgaaggatagatttgaggaggaaaaaatggaaatattaactctaggcaaaacatagggggaaagataattgagagagattaaagaatgtgtagagaggtagaagatatagtctggtctctggaatcagatgaattggttcctaactctgactccaccacttaacactctatgtgaccttgggtatatatcttatccctcagtgtcttgtttttctcatctgaaaaatgagtataataatagggcccaactcatattttatgagaattagtcaacctgccaaccacagtgcctagcacattgaatgcatctgatcagtgttagctattatctattgactattaatattattgttactatcaatagtattcatgtctctagggtttgtgacctgattagcagttattgtctggttattggctgaatggtggccagtactagggaatataagaagaaatgtggggagagggagtggaggaggggaggaacacagttgatttgaattacattataaatgctcaaatgaactagctatggaacttacaagtggaattttctcatgtgcagctgatggtaacagcagaaaaatgtgaactctgaataaagaggtgggagtttttcagcacataaagaatatttaaagccaattcattggatgcattgaccagtaagtgtagagatcaaaatcaagaacaactccaagaattgagagcagatgcaaaccccaatttttgtgggtctccagtccaggtatgagcagaaaacacgagggttggggagggaaggagtcttccaagccataagccaggggaaatcgttcagtcaattcttatgctctgatgtggtcattaacagatgataacctcatcctaaagatgagacttctttaggaacatcctaaagatgagacttctttaggaacatcctaaagatgagacttctttaggaacatcctaaagatgagacttctttaggaacatcctaaagatgagacttctttaggaacatcctaaagatgagacttctttaggaacatcctaaagatgagacttctttaggaacatcctaaagatgagacttctttaggaacatcctaaagatgagacttctttaggaacatcctaaagatgagacttctttaggaacatcctaaagatgagacttctttaggaacatcctaaagaagttcctccagcatttaaaattgctaaacgtaggccagggtagagttaaaggctgaaagaaccttaattaatatgtattattccagttattagaagaaaagtcctatggattgaaattgctgcttgctggcaattacttttaattgctgtgcagggcattattaacgttgcaacgtctagcatagtgatgaaaattgatgttccagatgctttcatgtgagttctccttttcttttaatgttctcaagagcatagaatcatggggatgataagtgagatttttgctagactctatacctgtcttccatagaaatcccagtatgcaaaaacaaacaaaacatagatgggtaatcatggccattccttaataagatttgagccttatttggaggtaggcctggtatggatggtagctctaatctttagatgaaattaaactctccaatgtgttcttattttcctaaagatcaagtccccaactacctctctccagccccagagaaagggaattgttgacgatagaaagattccattttcttcccttaagggccacctcctgctagttggccagagttctcacagactctgaattcttggcaggctggagtttaacagtaatcctctctcatccaaatttaagtacaggtaatccccaggagcccctgccaggcttttggtaaataattacctgggtacaagcaaaaatgcccctgctaagaaaactct

SEQ ID NO: 33669 - DNA, 2300 bp, Homo sapien
atgggacatgccctccacccaatcttgggtaatattttctgcaatgacaggacctcactggggaaatcctaaatgaagataatagcatgttatattaaatgttgccggtattccatttaatatcaagcaattgcgtaaaagcctttttaaatacctaagttaaaagtggtatattaatgttgagtgtacttctactgcaaagtccattctcccactgatttcaaacaaataccatttaagtgccaacctactattacaagagtttactattttattcttgctccaaaatggcatcaacagtgatggggtgcttttgggggattattgaacagaatttttgcaacaaaggagcaagcatgaagaaatgcaaaacatcagtgatagggattgcaacgttttatctcagcattcctcatatctacacaccccctaatcaaacaagcagttttatggcatgcgcaattgcaattgaagtacaactgacttctgcagaaccggcttccataggatttcctgtccaaaaatcaccatgtggtcatctgcagctaaatggttacaaatcatcaagtaaacaaggcttccccaccccggtgctttttttttaaggagtgaaatccaccaaactctatcatttgcaaattatctctggacttcttttatttctttttttttcactgggtaagaaggaaaacgagcaaacaaaaaatcctccctccgtatttgtttaaggcgtaatttccctgtgaggtgttttacaggcttctccttgtttagcttttcttgcctggtaattactgaaagaagtctgctcttccagggcgagctattcctttaaccccttttgcttgctcttacttggaggttagcaaggagtgcgcggctctgcaatgtctgggaacccacctagagggcccccttgacgccagcacatcccctgtcaggcagcagtctctgcagctgagccaggctgctgcagagttaatgtacagtaccacggagcctgcaagtgtcctgagctgatcagagctggggcggcacagcccagggcagacaaggcggctgcgaggattccaaaggttctgctggaaattcggcgctgggggactccagcaggagcctgttgccattgtgttttaaaagcatgcaaggtctgtatagcttgggcatgagaatctttcagaagatgtcagagcatcagaataaatgacacctattggaaaactgaatttggggtgaaaaacaaaagagattgagagaggaaaaaaaagaaaagaaagacatcgggggaagaattcttagacaacgtctgacttgcagctgtgaaattcattttctttccaaggcaaaatatgaaaagctcccacatggttttgataataacaaaataaaggggattctgcagtgaaaagatcaatagcttagtcattttacttaaagagaacagccagccttattatggggttaggcagcagaaatgaatttcatcgtgacagcatcttctgaagtcatgatggtagttaatggtaatcttgtcctgcagagcagaaattactcattgccttcctacttttgcagttgaaccagcaattctgaaatctgggaaagaagttggctttggtgatacatggtttctagcccctctgcccaggcctttgtccgacacgtctcagacggtagcactgcgttaaagtgaccatacatgaatatgtgcctaagaaagaagaaaaagcaatattcatttctaaaggacagcatggcaaagcaacctgaagttttccatttcccttctaacacttctttaacaaggatatcaagaaactgtcttttgactcctttcttcccacattccagagtccttccttaaggatgcattaatttacactcaaggcggttagattttaccaggacaatatttgccaccatttaggattattagttgaactggttattttagtatgttgactaactagtggaacctaaatggatggacccatacctgcagtgctctgtgatgtttcttttttcaaatcctggaaggccttttgtaattgctatttgtttttattggtggggggagattttttttttttttttgggattcaatacttgttgcaataattgcccacgatagctgctcaaacaagagagttggaattcatctgtaaaaatcactacatgtaacgtaggagacaagaaaaatattaatgacagaagatctgcgaacatgatgcacgtgaataattttccctttagaaggcattcctggatatggtgagtaatcaatattcccttcagtttgt

SEQ ID NO: 33670 - DNA, 2300 bp, Homo sapien
aatatttttttttgccatttcagtttaatacatattagtttttctcacttatcctatcatctgaattttttatttctttgaacctgaacaggctttgtgtctacagactgctgagcctttaattttgttgtcgtttgttttgttttgttttgcacaaaactaaaaacatgtacaaatacatttttaattgcatttgttcattctagtttttactcgtaaagtgcacttctttcttttctttctttccattaatttctgaaccttcccttcttaaactttacccagagttttctcatcatatacgcatttcattttcattgtacttttctgcatctgactatttcattttccagttgttctggtatgtttttctaagtattgtccaatcctttccattaagttacaagctccttgagggcaagcattgcacacctgttttgcacaacttctaaggccgttcagtccctcagcccactgtatagaaatatagtatatatatagacaatacacacacacatgcacacacataccttgccacttaatgatgtaaagtgacaaaaacttttatattggtaaaaattatgagaataagaataatcatatcctgattcttcaaattcaaatatttgtctaacattttttgatgaagtcatagcacttatgtgtcattgaattgttgtgggcatgctaacaggaaagatggaccaagtggttgaccctgtccttctgtgaatagaacctcagagtacacttttctgtaaacatttaaaagacaaggaattggaacttaaaatggagcaaccaggggggcagggaaacagaataaacttttaaaattgacctaatagtaatcataggaaacaaaaagaatcattccagtctccatttttttttttctggatgcattttgtagctccctaagttattgggtttttaagaaacataaaatattcctagatcgttagagatgtgatttgatttcaatcccacatggtctgtagcatcactaagctactgggaacttccctatgcaaaggtttgagtttctttccaatgctgtttaatgtctgcacttctagtgtccacataaatgagatttaacaggctttacttcatactttcttgttacaacatttttactttttttccaattgcaaaattatttcttttaagctctctgaataagtttgttgaagctctattcatcacacataaaaatcttacattaaaaggcaataaaggaaatcacgaaaagctagatgtattccaccctcttatagttgaatacataaaattgtatatatcacaaatagtaattgaaactactcttatgaaaactatctgtccttctggaggggcattagtttaaatgcaaagagaaaacatatcatttgtgagtctaaatagtgttgttagttctttgaaagggccctaattaataaggttgtagaacacaactgcaacctgtaaagcgttccatgtgtagtattttgaaaccttttgtttgtttgggttctaactagagacagagggagaaaaagtcaatttcattctcatgggatttgtcttatgtggttcatcagattgagtttagtaagcagggaagtatttctccttgtgtagctagtgcttgtttattcttcccttattaaaaaaaaaagagagaaaaaaacaaaggattggcatttttcttttatgaacgtggactgtagggagataaatagccctgcgggagaggaaggtcaagttcaaagtttttctttcctttggattcaggaataagcaaatggaaagactagccaaacaacccagcagcaggcatctgatggttaagccctccccccaggactttttatgtacataagcagcagaagtcactcgcgcagctgcggcgcattagttccaatagtttaacaggctgctttgtagcacggacaaagccgtgcgagcgcggtgctttccctccttgttcatttgctatgcgagcttgtcagtgatctttggcaggggcttgggagaggaggggtgacgtttaatacgcttccgcggaggagtgcgctcgcctcctctgcacccagccccaggctctacagagagactgaggcaggcgactgaatgcactaacagcagcaggctcagacctgcttccctggacatttccgggaccgtgagcgagggaaccacgttgccctggattcttgccagctgtacaaagttgaccaggaaaatggctcagcagacaagcccggacactttaacagtacctgaagtggataatccgcattgtccaaacccgtggc

SEQ ID NO: 33671 - DNA, 2300 bp, Homo sapien
ataaagttttcatgagtaaaaaggaaggagcaaattggtggtgaaaatcaggttggatttgaattattccaatttaatctggaaaaaaattataagtcacttgtactgttagtgtatgagaaattagaataagagtttcggatagaggtattttgccacagttatattgaggcgaaaggtggcaagcatttcaggggaaagaagaaatttgtgtacttctttaaaatggttttggatgttaataatgcaatgaattaaaagaaaaaggcagtctatactgcagaacacttccatttctctccttttgtgtttgggaaaatactggcttagtgccctcctaggcatggtaaatactttgaccactgccaccagtcacacttgtgtctgcaaaaggggcaaaaagagtgcctttgtaaagtatggtttaatcctacacagtggagagtggtgcttaggagattgccttgtttctcttaagacacaacctttctcagattttgtgtatagtccacatatgagcagagggctcatattaaactgatggaggaaaggtatatttccaaccataaataaataaatagcatgaagagatgatgaaggccttctcctgccacttgcacatttcgtggactgttcttgctgataaacaaagtgagcacttattttcattggcattattttcccagtggcatctagactgtgtggagagtgttgaattttcagcagtctagagagtttgagacatggttcctgattctggtactctagcatccattacatgatatgcttgaaatgtacatatgaaaatatgttaagactgagtgtgtgggaagaatagaataattacacagccaacaagttgttgtgagtcctaaatatattatcgttcaaataatggatggtacgtggtaacttccacaaagaaaaattctagaattattttaacagtaagcaaattgcatttcatctttaagtaatatggtcaaataaaaaaggtacagggaaaaaagtgtctatatattgccctgaaatcctcttggcttctttaaaaaacatttgacactgcaggaaaatgctaattaaaggaagacaaaagttgaatttggattctagtgcctcataggactctaatttctgtgaatattgatacaacatgtttttaaaacactttagtaatagagctgtgttctgctggaagtggcagaaaggcaaattgcaggcaggcactgaagatagagactaccgaagataatcagaggtttgtaattgaaaaggtgccttaaccttaactctggccagcgggctcagccatggctctgcaactaaggacgactcgccttgatttccagcgaggaccactcccgaggccaagttggaggaagatcttcaagaggaaacattgggcattctccctgctgtgggaaagagccacacaatgttttatcctatgtcagggaaagagactgaattaatcttactattggatcttcacccagatccaatttttcagcgacgcgcatagacaatattccaggcaactttgcctggtcacattccttatctttggaagcaccagcatggggctcatcgtcaacaagctctgagaaccagccaggaatcgccaaactccatttctctaagagcactgaggcaagcggaggtgaagaggaaggctccggggcagtggggagcagtgtggaggagggaggcgcgggcacggcgaggggaaggatcaagaggacaggtctgactcctgactggctggagtggttttggtgaaagtcacagctcgggcgtgccagcctggagctgtccaacttttcagcagctccgggatcagggttccggtgccctggaggcggctaccactgccgccgccgccgttgctgctgcttctgcagcccgagttgctgacaatccctgctctcgccgccggcgcccaaaggaagggaagaagaaagggaggaagaaggaccaacctctggcgaaaccgggcaccgcgcaccctagtcttggtgacttggggagcccgggagcgtgtctctgccatagcctcggtggaaggagccctgccgcgttctgtgacccctcccgctggcagggccccctctcggtagccctgaggctctggcgccttcaagtgagaagctaagcaccagcctctgctgggctgcagaagcggcggcggcggcagcagcagcagcagcatcaggaaggcgctcgggccagcgcggtgaacccgggctgggcagcaggtcgcggagccgcgagccaggatggaggcagagggcagcagcgcg

SEQ ID NO: 33672 - DNA, 2300 bp, Homo sapien
gattgatgtacttttcttgagataaacattgacagatgtcgctgaatttggcaaccaactgtacttcacatcttctgagacattctagtccacttacccagtacatgtgaaaggactttagtgcctccctcttttgttctctgggctatcttctccaattctgatttgttgatgtagatggctgttaccagcaacaatgagagcgtggggcctggggaggcagagagctttcattctagtgtttttgtgattgttttggctatagctaggccaaggtactgtcctattctgtttgtattgcagtcaaattaatcaacaggcatttttttctcagccatcttcaagtcgtgtcaggaaaaatttggcctacatgaggtttaggaaactatcttttatttccctttattttcatgaacatttgagcttgaggagaatgtgagcatttttcagatcattgggtcttatagtttcaggcttcatattttgtgcattcccacttctaaagctttgttttcatatatttgcccattcctccaatctaagtctcaccatttaaaaagttaagttcacatctggtttctggggaattgttgcctcatttatctttttgtctccttttcagaaatcccttttagtttattatttattttattatttttattttagtttattattttttcacatgtagtgtcactggtatttattatttttagtttattattttttcacatgtagtgatattatttttatttagtttattattttttcacatgtagtgtcactggtattaattttactaatttttgcttctcaaagccaaggactttgaggaattttcttttctttccagggtgccttatacagtgctctgctcataataggtgtttatttttcataataggttttcattgcttgattttttgatagcaggaaccaggtaggtatgcctctataagggtgaatgttgttcataggagacaaaataacaaaactggtgtcagtttgtttgagcttacattaaacgggttcacaaggcctcctgagctctgtgtattgaagcaacagaaaccatgaagcattttattgcaagagcaatcaggcaacttcccagatgttgctaaactctgctttaactgttgtgtagagctagttttaactgcatctcccactgctactggagacaatgattctagagatgttactaattgtcacttgttctttgcctagatttcttctctgctccttgtggcgtcacccagccgctagacgggcaatggattagaatttacatggaggctgtggtcacggttgtctcaggtgttaaggaacaaagaaaaagaggtgcagaaagaataaatcaaatcattattttaaaatgtcttagtttccaaccaggcaatggaatttaagggagattccctgacggttaccctaagacatctgctttggagcccttagcagaactctctctgtgggatgattggtcctaagcctcattaacagaggctttgcggctccattggaggttggtgcagcacaggtgggcgttagcacagaggtttataggaccaaacccacttcagcaaccagcactaattggctccccagggaagtcccatgagaagctgtcaatcgtgaagactgagtttttgtttataatatgtagtgatttctcctttgctgctctttttcctcccctatccaaactgcctttccttcttgcacaaataggtggtggttcccaaagtacagataattagaaagttgaggcaaaccttactttgattccaactgcatttttctccactctctattctccctaacccttcccctatccccacccttagtgtgaaacaataccctgtcatatgggaggaaccctcgctgaggttgtgctgacaaagctagaaagtagtgttgaaaaataaatgtacatcatcagtgcattttatgaagtgatttctagtttctgtaatgtgacttcaattatgctgaaaatggagatcttagtctcatcacgtacttttgttaaatcattgtattttaaggttaagtcacagggcaggaaacaccttctctgcaggatattgggtgtaaaataaagagaggctttctgtgtcctgggaatgttctgctaagaagacagtgatgataatagttaccactgaataagtactgacatgtgaggaactaccaggatccctgctttacaggaagaagccgaggctcagaagtacacttgtctaaggtcccagaacaagtgtaagtgtcaggatttgaacttaagtttgcctgattcc

SEQ ID NO: 33673 - DNA, 2300 bp, Homo sapien
tctcaggaagaactgaagtgatggaagtcccagaggaaagtaccgatgcaagacgtaaatactcctagtatacacccaccagaatttccttgagccttggttttaaacatcctctgaattatataggcagctgattaatgtttgataattaagcatttttatgtgattcatctcaataagagcccaagcaaggtaatgtaaacaatgaaggcataaaaaggtggaaggagatgtgaatactacaccaagtgggccacatggacctaaggaaaaagaggagctgagttgaagtcaggagctgattcagataaagcagcttcaactctactacttcttactcttagatgggctccagaccaccttgagggatgggattatatttattttatagatgcactcctttctcccactaatacagtcagttaggaatgtatagctaagaatgagccaaccattactattcgtgtctatggctacagaaactcaataaatcaactcactattctgggtcaataaatgaactcattatactgtttcttcatgaagtaaatgtgtttctaaaggaatgtattaaaattacatttttaaaaatctatgtattttgcatatatttgattgatacagaaaaggagtctacgttggctacttttctttctttctacaaacttcattcattggtgtgatctgaaaggggataatatttcagaaagcaaaaatatttttaacaacaaaactttgtatttccagtgtgatctaaacacaaaattatgcaaaacacaactaatatttctctcctactggctaaatcatgccagttgtttaggtgcaatcaaaaataagccactaatgttatttttataggaattggcaagtaattgccaactatagctattaaaagtttatatttgccacaggagcctgtgattttaaatactgttcaaatgatttatgcttgagagttatacatagcacaaatacatacatttgtatctacaggtctaaagaggaaaaattagacaaaaagcaacttgaaaaggaacccctttatttttaatgacctacctttgtgctgtattgagaaaaagtataaaaattatttgggaggaagaaaaatatttctaagcactaatttcataggcaaaagccctattattttttatgataggctaggggaaatcaataatgatttaaaagcaaacagtaaactgctcacatttaccagtctatactcagtattaattctaccctgcagtgtatgctatagaaggtaatgaaatgctgatgttttctggttttccacttcaatctgctccagctttatcctaaaccttgtcagcaacagaagttaccccccagcaatcatacaaacctaataacggcttccctggcttaatttgatctgctccaatcacaaattccaatccacatactttcttctgttatggttgtgtctgtatgtgtttaatgtactttttataaggcttttttacaacaagcgcatggtttttcattcagccctctaccacataaacagaaccactgaagagcatttttgttcatataaaaatgttttagttattcatagtgtatgtcttcaattggctgcagattacagtgaacaaaagtattgctgccatcattttacatttctcctgttactgtgccctatctgctgtgtacccctgtccccaaagcatttattataatatttgctgcttgctctcagttttggactgagatgcttgggggtgggaaaacttaaaacttgcctgactcaagtgctctctaagctttgatcccagcatcctgctttaacctgctcctgttggacctctgccactttactgaccccataaaacaaacagagctagcaaatgcatcaaacagcctccttcaaaatgcagcttgactgtgattcatggcacaaagctggaataaccctgccagttcttagaagctttaagattcatcgtcttgaacttgatacacatagtatagcaccttaaaaacgaatcatctgctagttcagtattttctacttacaatcactccctcccagggcatgtaattaatttactgagcttaaaaaaaaaatatcaggattactcacacagtcttgaagatgcaatgtcagctatttaggacagaaacatccaaggccgtgtcagaactcaattacgactacatatgcattaaggcaggaactggcaggcctcagggtacgccaactataggactcgtgcttctcgtacgctgggctataatctatgaaactgagctccagagccagccaatcactt

SEQ ID NO: 33674 - DNA, 2300 bp, Homo sapien
atgagcagcttgaagttgagtcaaacaaaacttttagtgtttgtaagggtcagggagccaggggacagtctgtaactcagttgtatattgacacagagaatgtacaaaagctgtgaaagcttccacttgaatgactgcggatggttgctggtgacggtcttggacagtaagggttttcttcggagttgtaggaggtgaagtcttcctatgggaaatttctggacaaaaatacaaatgaaatgacttgcaggcctcagtttagagtattgttggctttgtctgtcaacaaatggagatttgaacatgggagttcaaggggattttaatgaaattttattaaggagatgagaagcagggagtctgtgttgaaaattcaataaagggcttgttttccatctcagcctggataatctatgttatctctgagtaaagggggtaacaattctaacaacctggcttccttagaagtttccattctcatatagtcaccgaaggcagcagcactgtcaaataaacaaaggtttaattaaataaaaactatttaaacagagcagaaatattcttccctggctagtcacagattggacaattcaaagaacaaaccctggggggaaattgccaatggattactttttctgttttctgtctattgcaacgtttttctttctggtgtcaaatctcaagttgaattcagtcaattatctacagccaaaaaaagtgcataaatgtctcttctgttactgtttatatgtcaccactaaataaagcaaaattttcttctcagcttcttgccttaggattttataagtccaacaaaacaaataaaatattatgtatattctatcgtcactatgaaagcataaggattgatttagttatgtacaagtttattgccaaagtttttcttcgttgctaatgttacacttgctacaaaatgtattaaagaaacagacaatttgctaaggatttggaaggatttgtcattgggttaagtacattaagtatctaaggggtgtggtgttctggttatgtgtatgtcagtttcacatatttttttgctttcttattttagttgcctctataatcattttgactttaaaatgttttctgcagatcctttaataactgcaaatgtagaagtatggtgtaacaagtaattggtatgactaacactaaaatgtaatgggaaataaggatactattgtaaagaaaacaagaaaaacctggggtaggggagcagtattgattctctcttaggattcctaagattctctgtcccaacccttctaccatggaacattcttatgtggtctaagtgtcaaagaccagaggaactgggcagtaacttatcttctcaattttctctctgaacatagatattttctttaagatacgaaaaacttttaattgtgctcctgaaacccatccctgtcctgtctcagccccgttgactcttctttctgtgggtgggtgaaaagcctacccatctgcaaaggtagctctgaaactgttctggaaaatcctgtattttcctccacaaatgatcgttttagtttcaagtttatttcaggtacattaattctccccctcctcagacttcataacaaatgatcctgcacacgattagaataggaaaatgtaaaataaaatcgaagcatatctagttgcctcagcgactttatgcttatcactttcagtctgcattattctactaaaaataaaaagaaagatgaaaattacctcaggcgtttgctgccgtgcctgccctttggtttctgggacggctcgggtcccgtagcgccggcacagctgagattgccaagccgggaagagaccttgctccaggtgtagctgcgttttccccagatcacctgtccttttcccctccgacaaggaagctgtgatttttctctggcctttagaggcaaagtgattccagataagtagattaatgtgtagaatatctcatctgtgttgttccagtgcagccctttcagctttccagagccagttagacttgttatgaggagctaagtgattggctggctctggagctcagtttcatagattatagcccagcgtacgagaagcacgagtcctatagttggcgtaccctgaggcctgccagttcctgccttaatgcatatgtagtcgtaattgagttctgacacggccttggatgtttctgtcctaaatagctgacattgcatcttcaagactgtgtgagtaatcctgatattttttttttaagctcagtaaattaattacatgccctgggagggagtgattgtaagtagaaa

SEQ ID NO: 33675 - DNA, 2300 bp, Homo sapien
gaggggagggggaaggggagaggaggaagaaaggaaacaatctgccctccctcaccccttcacactaggtaaaataaaatgtttagacagaaaaacctaaagaaaaggatccaaataaaatattcttaggaactgtcaaagggagaagacattggaatctccaaatctggccaagagctcagcctaagcagcatgttttgaactcctgagtccttggaaccctgcactaaagctttgggactctgacctgcaggaaaaaaaaaaaaaaaatgcttccctcagttcattccctgtagtttaaaaacaagagcaactaaagggcaagcttcgggggcaaggggagacaaacacctcagaccattaacttactttatccccattggaaatcaacttctggagaacatttcagctttgtatgctcttcttggtcccactcaaatgggaagttctgctcgaggccagaaatagaaaacaggaagtcaacagaactgattttcctaactgcccaaatgcaaatcaccacactccgttatggatgagaattagagtaaaatgtaaacttctttttaaaaagaagttcacatgctaactgtgtacagaaaacatcctactccagggaagaaagaaagaaagaaagaaaggaaagatccatcagcttccttccttaataaaggaggattgacagagctggactgacagtgaagtaaaggttaccgacggtgtgctcatcagaaccatgctgccactaaaaataatgaagtgtcccactttgatgcgacactattctccaagttggttcctctaaaggtgcttttcttcaagggaagcagatactaaagtgacaactttctcattaccattcagactattttcttagagtcccaggtttgaaactttcaagttgaaactctaagctgcacccactgcatacagacttcttagtcagtttctgtcacgtaccatcatatctaccttatttgcatcagtcataaattctgctcattcttctatcacagctcctctgacatttgccagacctcaccatttcctcagccatttctggtctgaatcatcagccccccatgcctgctgcctgctctcttctataaacataccagatgaatctttccagcatgctgcttcccctgcccccaagtcagccacagttccctactacctattgatcacatctgagttgcctcagccagtggtcttgccatatctacctagcttaggctgagtgttataggagaaagtgcactagcccgggcaccagatggatcaggtaagactctagcttaggtaagctttatcacatcatatagtggctgtgtggattgaggaaaattatgaaacttctttgcacttcagttttctcatttgcagaatgaagataataacacctacctatacagttactaaggattaaataggataatatgcacaaagtgaccctagtgagtttcagtaagaagaattaatgcttatgaagtgcttatcacattccagcttctgttctgtgtgctgtgcatgtgtttatgcaggtattattattaacctcattttgcagaagaggaacttgaggcaagagagagcgtgtaaagtcacataacaaatccacagaagagctagcctttgaactccaacagcctgactccagtgcctgcatatgtaactccatgctctactgcctcccatttccctttccctccaactttcaccggctaacacagcccacaggtccacctcagtccttctcatccttccagtcttccctccacattccaactacctgtgacaaatgctatcctgcattttctctccaatcttacctgacatcttgaagggagcagttcagttacagcattctctccatacccaactataccatctctctactctttatcttgccctcacatacacataagtttgtcattgttcttcagttctttgggtaatctcttcctagaaactgcatctaacaaatagaccacatccccaaattccatcatgtccaaaaagaagcacggtatttccatcaacaccccagctgccatcaccaagccaactcgcctgacttccattcacttactagcaaacatttaccaagtatctgccatgttcattttgtcaatgagaatgacatgggacttgttcctctaggagatcacagtctaatgagatcaatgtttatatagaaaatgtaaataggttgtgataagtactaaatgcacgctgctaatggcatcatcacctctggctcttctcaatcctgcgtttcccatgttgtgtcatgcaac

SEQ ID NO: 33676 - DNA, 2300 bp, Homo sapien
atgctctcacattacaatgtttgtaattgccattccctccaccttgaaagtttgtctctgcagtatttccctggcttgctctcatttcctttggatctctgctcacatgttacctccttagagagggccttcctgaaaatgatagaagtgttttttttggagcacatcccctcactccccagctcctctccagtgtatttttctccatagcatctttctgcctgaccttgtatttctatatctttttgctttttatcttctggaaaacaagctccatgagatcacacagggattttgctttattcctcactgcatgtcccctcctaatacagttcctggaatacaggtgggggttcataaatatttgttgggtaaatgaaagaatatattaaaatattatcataaaccttttttctttccatgatttgatgatgtggaattgaaaacaggtctacatagatgatagtgatataatcaacagcattcctgagtacgtctaggatcagcacttggtctagaaaagatctgtcttctgccctcctttcccgtccatgcacatccactgcctttgggatcaaacccaatctccttcctctggcagtcagggccttctgagacctcatctctgttgatctttctagctttacttctaccaagtcattcccctcataactgcatgtcatactgagtggcttatagttcccctcctgtggcccttgcagatatttcttgcattgcttttcatttgtcacttatttgtttatgggtttctcctcacagtgcataagctcttcaaaggaagaggcctggtatatctttgtatttctgggatctagcgcagttcttgtatattgtagatggtcagtaaatacttattcaatgtaaaagatgttttttgccttccaaagactagtggtaacttgaaatggttggatataggacagataaactgatagaagcagttttacctcattagagggcttggatataagtatgtccagggacaaatatagtaaaaaagagagcaatattataatatcctttaaaaaaaaaaaaagagacaggtcttgctgtgttgcccaggctggtgccattatggctcactgtaacctcaaactcctgggctcaaacagttctcctccttcagcttcctgaatagctaggactactggtgtgtgccaccatggcggctaattaaattttttttttttttttttttttttttttttgtagaaatgggttctcactatgttgcccaggctggtctcaaattcctggcctcaagtgatcctcccatctcagcatctcaaagtgctgagattacaggcgtgagccactgtgcctggctagaatatcctaacttttagcaaaatcatacctgagatgaggaaggatggcatataacatgattgaatcagcacacttaactaagaaagatagcctaagtggaaagaagggttatttgaaaggcattatttagaaagaaggggagccatttggcagtggactgactatgtgggcatcagtcctttatttagtcactgagagtcatgcaaggtggtgagcctgctgataatgaggaaataatacagaggggagaattcaggggagtgatgacacgttcacgttcttgctattttggacttattaacaacgtgagtgttgagggttatgatagtgttagcctggctgctcctggttcgggaaagagtgctatgaaaattgagatatatctgtctagtgtatgggaggagaaaatggctgtatttggttctatatatttgtcatgcctggttgatggtttgtattttctatagtgatttgtgagtgacaatggatctatattcaattgacccagtatagttgaatatgtgaaaatattttatgtaattttactaatatatattttgttaaaatacaaccatatagaatctactaggctataggtgttgaaagataacatttttttttttctaaatcaggtttgttacagaaggagaaagtggcagttgaagcatttcagatttgctgccttctcctacctcctgaaaataggagaaagttacagctattgatgaggatgatggcaaggatttgcttaaacaaagagatgccacccctgtgtgatggctttggtacccgaacactggtaggttgatttttaacatcaggtatgactttttggaatgaaagtcgactgagtaaggtgtattagtttgggtgatcagagggaagtacaaagcagacttgcttaaaagagccacagtcagtgtccacccagacttgtgtcgtgcttttgt

SEQ ID NO: 33677 - DNA, 2300 bp, Homo sapien
gaatctactttgagtccaccaaagtcacaacctgtttcttgtccatcctatccttaataagtcccaattcatgtttcagtcatctaaaagggaacagaaaggataggctgattgtatggtattttgaaggcctattgcctccttttctgaaggaggtgctgctcacctctttctcttcagcccatctgtgtttattgtcacacccgtgtgcacatgggcctgtatacattcattgttggccagcctcaatgctggctacataaatgcaaaaccaagttaactgtgtttttcttctttgcgcatgtccaggattcaataaaaaatagacacaaaaaagtcaaagcatttcttttccagaatctgtcaggaataacatttataaaaaaaatttttaaatattattaaagttcaagatgactgagaaagaaaaggtcataaaaatatggcttcctctcatagggctcaccatgcactgattttttttagggaaacctttaaaatttttttgcatatttttaagaaggatgatgagatgttcacaaaggggtacaactgcttagaatgaaccgtatacttatcctgacagggagtaattctaggcaatgtgtattgcttgctgagacatatcaacctaattattttaattgattaagcttgggatatgtcagagcaggaggcaagcaaaatggcagctacctttgctgctggattcatgctgtaccacacacatagatatttcacaattttcattattttagccaatcaaattattttataagaagagaacagaatattgaaaggtaagagagtctttaaggaggccgaaaaggccatttgatcatgtcacagtgaccttgaaatgtaaagacccagaatgctttaatgtcctttttagcttgatcccctttctttagttatagagattctgtaggaagaatttcctttcaatttatcttggctgctgcttttgatcctctgggggtagaggtctatttgggtacagttgtttagtcttctgctgagccagagctaggcaatgaggatgtggtcctttcttccatgctgtaatggaaatagagaaggctggctacactgttcctcatgggacgacttgctattttcctcaaggtacaggcagctccagttcatctctcaacttggcagtgtaaatctgtggtctgtggatggattggtggagcagttgttgccaactctgtagagaacatttcttgttcctctttgggccagacacaagtggatgttttccttgcttgttgatggagtaggatatggttgggagcaggctgtttcagggtttcagtggttgcttcaactttgcagtatgactttgcttgataaactgtcttttgatggttggtcagtgatcaaataaagagtttataatcagagtgaattaagacaaaatataaaatccccttttaaggatttttttaagtttaaatatttattagtctgaaatagaggcagaaattattttgctcaactctatgactgtaggattttataatataacaagaatgaaataatgaaagtctttaaaaattgctttataacttgtctgttacatatgtgagctaattgttatctcggtcaactttattaagactaggataatgttgagtatttcaaagaaaattattgtttacatttaataaaaatgcctttcagaagaatgtttttttcttaaagaaaggtttcttttaaaatggaagtaagccagtgattttcttcattgttttataatagatttcaatttagacataaagcatatttgtgtaggcaaaatgtaaaatgcctatttaattaatatcagtgtagaatgcctatttaattaatgtcaattttccccataaaaacttttctgtatatgtcaaatatctgaatatctgtacacgccacacatattcacagagaataatacttagaggtaattactccattaatgtttctctttcactctctttttgaaaatagggcccaactgttctgatttgaagcagcctatgtacttgggatttgaaaaagatgtctttaaaaccatagctgattactatggtcacttgaaagagcctctacttacatttcatctttttgatgcttttgtcagtgtactgggtaagttggaatataatgaacatatatctacatcactgatattgaatcgtttcatttttcactattttgagacttccattagccaaaactcatgccattttaaaaataaaaactgatagagtatttggcatagctagagtcttgctctgttgctctgtgaagaa

SEQ ID NO: 33678 - DNA, 2300 bp, Homo sapien
gttttgaggatgagaagaggtggtccaatcccttacttagatctttcttatgatgttataggggagccagagatcacctccaagctcccttttacctcttaatgagctctccagttgtatctagaaaccacactgacaccaggaagattaccaggagaaaagtatacacattttattagttttatgtgcacatggggatcttcacaagagagtgaagtctgaagaagtggccaaagtaagatgcttttattcatttttttaggtaaagagagataaatttgagaagaaaagccatgacaaagaaaatctggttaaggtgttacagtaggtagctagtcaggcatgagcagggcaggagagggctccccctcatacacacacacatcaggaatgtcaggcagccatcaggtgatggtcaggtggttgttaattgtctctctaaaataatagttggtcacagccggcaccagggaaaggcagtctcctaatagaaaacacttgaactgttgatcagcagcttcccgataagatcttaggagttgggcaagtgggctcaagtatgcgcctgtggacagctcactctaagggaagaatcaggagagaagtaatgcaaagccccaaaagcaagaccccagaagtatgccaacgtataaaaccccaggtcaaaaggtcaaactacgcactagatctctcaagtcactggcttggccctcttccaagtgtacttcctttcattcaaagctttttaataaacttcacttctgttctaatacttgccttggtctctccttttgccttatgcccctcagtcgaactctttcttctgaggagtcaagaattgaggttgctgcagatctgtaggaattcactgcctgtaacatactttggggccgtgtctcggatatgggcagctgctaacatattttggtgccctgtgactcgagttaacttccacagctcacaaaggcagtaacattttctagggagtcactagaagatatatgtaaaaaatctcctatatctcctagtggaagatagggttacttcgttaagaatgtttattcaggtccactgcagccttcaattccaagcctttggtgataaaggctattttctcaccgtggtagggagaggatgcccatcccagagaaatctttgtggcctgctgcatcgaagaggcaggtcagcttgccctttctgaaactaccatttctccaatgttttccgctcgaaataatcaatataccaattaggcatattttggaatggcacaccttcactccttcaacgtcttgtcctgggtacttaccgagatgaccaaatttgagtaggtgtacagagtcctaagtatatggagttacttcatttgtccctctgaaagattgcaaatcggactagcaattcccagggggaaaattctaagcagtcaaaaaaggactcacaaccctattgccgaggactaaaagtatcagcccaatacaaaacatagaactcaaattaaaggggaaaagactatcatgagaacaaacagaagaggaatcggggctcccttcccgctctttattgcccttaacacactgtctacgctccttgtgctctctatcccgtttttaaatgtccctacactggtaaaagctgtcgcctcgcttcatttcactaccgcttctcccagcgttagcagcacctccaggctcacagtgcacttggtagggaggacaggtatttatccacgcggcccaaagctgggtttcggtcgctggataacacctattattgacccttttgtagagatagcgttgcgtgtgtttgtgttgcgcggacgcagaaatctgggaagggcgctgcacagcgttttccagcgctggggagacgcccccggccccttagtcgcacctgcctaggtgtgctcgcacggtgggaccagggtgggcaacagatttcgccccgggcaagttcgcacgcggagctcccagcgccgcgggtctcggagaagacgcctgcctccccgcgcatttccggtgacgtgctgccgcgccgcccaatcagcgcccgcagcccgcgggcttgggattcaaactgctgctcctccggctggcggggatcagcgctggcgcggctgcggccgctgctgcctacgcgccatggagcatcgcatcgtggggcccgggccgtaccgagctaccaggctggtgagtgagtgtgctggggcctgggcggagcacccggtgccgcgagcccccactcagcgcgcggacagagtgcttgtcagtcttcgcttccgcaggccagcggggctcggg

SEQ ID NO: 33679 - DNA, 2300 bp, Homo sapien
taatggttgtctggattttggcccatttgataaaaaaaatgtttgaattttggcctattcaatagacaaaaaatattgcagattatttaaatatgattagttaagcaacttttcatatgtttgagtgccacttgtatttccttttctgtgaactttgcccatttcctattgacttaaggtcttttatcaattttagaaacttgtcatatattagggagagtagccgttgtctatgatatgaattgaacatattttttactgtttgacatttatgattaaatttgttagccttctcttatgtcttctgaattttaggtcttagttagtaaggcctttcccactacaaggttataaaagtcttctactatgtcatctagtgatttcatggttctgttgttcttacttaaatatttgctttatttggagtttatcttggtttatattataacacttggattgaacctttttttctcggatggctgtccaggtgtgccacaccatttagtgattaatgtctggtaattcagtgcccaatcattggagatgccacctttatcatatagcatatgccatatataattttacctatacttacgtaagtaaaatggctttactttagaatccagaggaaagtctgaattttcttgtgggaaccctagaagatttttttttttaagaccaagtctcactctgttgcccaggctggaccaggctggaccaggctggagtgcagtggcacaatctgctcactgcagcctctgcctcctgggttcgagcaattttcctgcctcagcctcccgagtagctgggattacaggcacccgtcaccacgcctagctggtttttgtatttttagtagagatggggtttcaccatgttggtcaggctggtctccaactcctgacctcaggtgatctgcctgtcttggtctcccaaagtgctgggattacaggtgtgagccactgcacccggccaatttttaaaaatcatggtaaaatatacctattattttcaccattttatatatattttcatttaaatggttaccactttaaccattttaaagtgtgaatttccgtggcattaagtacatttacattgttgtgcagccatcaccaccatcatctctagaacttttacatgttcccaccacatggctttgaatcaaatataccagtaattttatggcataccattcatttggaaggtgagtcctgattttacagatgttaaaatacggtaaaatatacatcttaggtatattttagttactaaaatatttagttactgaaatatagttctcaattttcaagtgtatttagtttatttctgaacattctaatctattacgttcgtttctccatgtgccagtgccacagtgtcttaattattgcagatttataatatcttttaatacataataaggctagtttctcctcactggtcttctttttcagatttctttctccagttattcttgtctatctgtctagataaactaagcagcttttccttggatattatagaccttcctttccctctttctgtctctattctacttaaattataaaaatttgcatatagatgactttatgaggcctgaagatgagctctaagtctaggatcagtttatcttctctgaaagtttgtgtatctcttgactttcttctccagggtttctgctttagctttgccacttcaagtgcagtccgttcctgaattatgttgtcagcataaaagggagctgctcctatgaaagttcttagagtcatttactgcttttgagtcttgtacatagaatattagtctttttcagtgatgttagcagtgtctctagaaggatggaaaacccgaaatgtctgcaactgcatcagggtttaaagtaatttacttatgcatttgccttcagtgggagtttgttgtcttgccagttattcatattaaatttttagcattttaaataatgtattactataagcttgactttatttgcatttatagattataaactcatttctgttttattttactgaagaacccattaaaagagccagtaaatcctgtggaaaatggccttcagtgatcttacatcgaggactgtgcatctttatgataattggatcaaagatgctggtgagtaaccacatttcctaattgaggttcatccttcctttttatgtcagattctcatatttaataggatttcactggaacagaatgagagactttgcaacttaacagtcccttattactagttaacgaagaggaagtgcacaggtttcattacagatatgtacaaa

SEQ ID NO: 33680 - DNA, 2300 bp, Homo sapien
gctgaaatgcctgcttccactggggccttccctaaccactttaacatttaacacaactccccacctccaaaagtctccatccccttcccttctttatttttcttcatagcacttatcaaaccctgaacatcacattttttttcttttttttcctcttttttttttttgagacagagtctagctctgtcgcccaggctggaggagtgcagtggcgagatctctgctcactgcaacctctgtctcccaggttcaagcgactctcctgcctcagcctcccaagtcgttgggactacaggcacgcaccaccacactcggctaatttttgtatttttagtagagacggcgtttcactgtattgcacagtctggtctcgaactcctgacctcacgatctgcccgcctcggcctcccaaagtgctgggattacaagcgtgagccactgcgcctggctgaacactacattttttttacttctttattcatgtattgtctgtcatctccaactagaatgaacgtatagtccctgagaacggggaatttgttatctattgaaacttcagggcctggaacatagcagcactccagtatttgttaaataaatgaatccatttgagcttctgcatatttgaaatttcataagtatatataaatggtaaattgtgatagactcaaaggctagtatcattaggcaattgtctcccgttcccaaaagacttcctaagtctactaaatgatctgtttttaatatgaaagcaaagttatctaaaagaaaggagaaatctttagtttttttgacttcgagattctttgcaatttaagcttttttttttttttttttttttttttttgcttttctttcaatggacactttcgaagttttacataaaaacattaaaacctcttgtttaatgtagtgggattaagctgccgaaggcaatccctacatgtgaggaaaatatgcttccgacaccccaattttttttttctccctacccatcctctctggtggtcctgacgctcccagcccctttttgtgtttcttgattccatgctgagaactcgcaatacaaactcaaagcccacatttgtgaggtggttgggtcaggactgcaactaaaaatgattattgttttttaggtttctggacagttcaacaccagcctttggttttgcctcagaagcagggaacttctctaggcccctattttgcctttcagctattgatgatccaaatcataccagcgattaggaggatcattaccagacacaaggccaggtacgtttaaaaaataaataaaccaagcgcaggtgcacactccgaacgctcatccccacccccactttccaatccaacagtaggtaacgagaaatgaattttctagactttttttcctgcagcagttgctgttaccagaaacaaagttagatgatatacaatctaatcttcattgctctaaaagtcctctccccatgccccccaggctgcctcaattctctagtttcttattccttataagcaggggatggagctgaaccaagtcggccttcccctcccagggccttctcctcttggtctggcttccatttcagatgcgaattaaccctcccaataccctttcagaagcaaggagtcccctttttctccgcctccagcctcagctaggttttcctcatttcggatttttctactgctcattcccaaatgagtcacgcatgacgacaatttccactctgctatgtcagcctggagatgtcccccaagtgatggcatctgctctcggaaagaaaggtcatcggtgccacgaccagccccgctaacccagagcggccggtgggccccagtcccgagagtcagggcgcgcggcggaggcgaggccggggcggcctccgccctcccggccgctccccctcgcgccgccccggctcctccctccggccctcggcgggcacctggcggcggcgggcagggggcggcgctgcgcgcgtcacgcggctgggtgggatagcgggcaggtgacacccggcggcctcctcccctttccaacccagtcggcggccgggacagcgggggccgctgtgaggagctccgcgctcgcgctgccagtcgccgccctctctcccgcgcgcgcccggcgcttcggctccgctccctgtgcggtgagtgcggggttccaggccggcgggcaggggccaaactttcccggcgcgcggaggagaagagactggggagggaggcagagccgaggggaacggcgtcgggagtggccggatggaggaacttgggcgcggcgcgcgagaagt

SEQ ID NO: 33681 - DNA, 2300 bp, Homo sapien
tcagaagacacaaatgagggaatgttatatttttaaacatgtataggaattaatctaggaacttactgaatacctttgtgttccaggtgctttcatatggattatttcatttgctttttcacgatacataactctataagtaaatgatgttatttccgtttaacagataagaagaatgaaacgaagtggttaaatcattattcataaggggcaaaaaaaagatgagtgtttaaaacccaagtccaccaaaatgagtttaatatttaacccactatactgctactgccatgaggtagctaaatgcatgtacccatttctggcacaagttagcctaaagggaaagtaagccaagtatagtatccatagattattagcatgtatccattttgacctcagtgtttttatttatgtatatatatacatacacatacacacacacttatctaacctatagaaaaaaaagtgaatcccttttttttttttttttttttgaggtagagtctcgctttgttgcccaggctggagggcagtggcgccatcttggctcactgcagcctccacctcccaggttcaagcaattctctctctcagcctcctgagtagctgggattacaggtacccgccaccaggcctggctaatatttttgtgttttttgcagagatgggatttcaccatcttggccaggctggtgttgaactcctgatcttgtgatccgcctgcctcggcctcccaaactgctgggattacgggagtgagaccacgcccagccgacaaatcactatttaaacttcaatattagccctgacgacagtggattttgttgatatgcatgatcatgattcccaaatgattagttactggttttacactcaccccaagcttatcaaaattattatcaggaagtaaacccatcaacttatttagcccaaagcttctcaaatttgcattagtgtttacctagggattacctagggatcttgttaaaatgaagattattttcggtaggattggggtggggcctggaagtctgcatgtctgactgcttcaggtgatgctcacactgctgagcctgcacactacacctttggagtacaagcaaagaattttaatttttgtcccaaatacataattatttatataaaggtaaaactacagtgtacacactatttatggtctgtgcttttttacacttagcctttatccctgttttctgcataattttcataattatgatttatataaatcataaagttaatgtaacattattaggaatatatacctattctcagttattaccccattctaaataatactggatagaattcctctgggcatatagcttttgctatttaattatttccttaagataaattcccagccgggcgcagtggctcacgcctgtaatcccagcactttgggagatcaaggcaggcagatcacgaggtcaggagatcgagaccatcgtggctcacacagtgaaaccccgtgtctactaaaaatacaaaaaattagccgggcgtggtggcggtcgcctgtagtcccagctactcgggaggctgaggcaggagaatggcgtgaacccgggaggcggagcttgcagtgagcctagatcgcgccactgcactccagcctgggcgacagagcaagactctgtctcaaaaaaaaaaaaaaaaaagataaattcccaggagcaattaccaggtcaaggggtaagaatatctttgctgtttaatgggtaaaattttgcaagatgaagagttctagagatggatagtgatgagagttgcacaacaacatgaatgcacttaatgccattgagtaccattaaaaatggttatgatggtaaattttatattatgtgtatgaaaaaatgtttaactataaagggaagggagaagccccgccccctcgtggagactgcccagtgggcggagtcgggcgccgccaggctggcatccggaagccagaagtccggagcctagcagcacaagagcgtctgttactctctcttctcagatccccgccggaagtataggaagagagcaagcggattcgaacctatctgctttcaagctgatcatgatgatgaaacttagaaacaaaaatgaaaagccaggtaaagtttccaagggctgtaagaagcctgcaaaacaaaatgggaagaaagcaacctccaaagtgccctctgctcctcagtttgttcactccaatgatcatgccaatcgagaggctgaaataaagaagagggttgaggagatgagggagaagcagcaagctgcccaggagcaagaaagacaaa

SEQ ID NO: 33682 - DNA, 2300 bp, Homo sapien
aggaggcaaaggcaggaggatcacttcagcccaggagttcaagaccagaatgggaaacatagggagaccccatctctacgaaaaatttaaaaattagctaggtgtgtgggcacatgtctgtggtcccagctacttaggaggatgagatgggaggatcatttgagcctggaaagtcgaggctgcagtgagctgtaactgcaccactgcattccagcctgggtgacagagcaagaccctgcctcaaaaaaaaaatatttttttaatttttaaatactttatttgtcttaaacgtataagcaatcctcacttggcacagtctgatatgaatttcagttaccacagtttattaaccgtgagaaatagcataaaagtttgctactagcttttcagttcacaaatcattacataaataacatatgaatcaaaattgaccaatttgcaattttacttctttcaaagtctatgggtgattggtcactgtgcatctgttattcagttcacacacaggctgcaaagcatggaggtttgttattaatatttctgtgcccttgagataaacccacatggaattttacagattaaaagaggaaattggccaaaagaatgaaagtgcactaaagaagagtgataatactagaagtgaaacttgcattaaacataaatggagcaaatgaaaaaaaagctgcctgtgggaacatgctgattgtggcaacaatgacactgccgccatttgagacattctagatatgcagactgaggaaatcagtgaaggtgaacttatagacataaatgaggaaaagtgattgtgatgaaaggctgatgatgtgtcagaggaagtgacactggcaaaaaaaacacattaaaggaactctcagagatatttcacaacattgaaaacgtaatggataaaatgttggaaactaatatttaaatttctccagaacgcagaactcataagcaactgtgttctccaagtaaatatcttcacaggttcctcaattaatgtgggcaaaattaaaagtacaacttgcttcttccctttggaaaaccctctctcagagtatattaccaacattcaacttcttatacaaggcatagatctgggaatcattattcattcttctctttttgtcattcacgtatccactcaatttccatggcctgttgattctatttctcagacgttgttcaaatctctccactatctttattctacttggcaactctgtggcccaggcttccaacaactctctcccggacaagtgtaatcacaacagttacctaacttggctcccactcttgttctcagttgcaacccattctccaagcagaaaacaaaatgcaatagctgttaccttattctcatcttcacacctctactcaagtacacaaggctcttcctcatctagtttctgtctacttcatctcttgtcaatggtccctaccccaattctccgctctagtcattctgaactttgttcaattcctggcctgtgtcctctgcctttaataggctgcctggcacactgtaggaattcactaaatatgcagactgaatgaatgaacgagtccgtggagggcagttattctttggagtaacttaagagagaaggaatacagtacaacgaagtattcttatttaggtttatagtgtcttcacctgagcccgcgggggaaccccccccccacccccggggaaccccccccacccccgccgccccccgcctgcaagttgttaccagtaaataaaagggatcctattttagcaagccacacagcattagagggcaaataatagtttggtggcaggagagcgatgagacgggaaagtgtggggcaaagcttacagtcattggtccagattctaactggcctgttagccaaaaagtaaggttttctttacctccgtgttgactctgctctccgaaggcgaagagggtcctccaaacccgtttggcgtgcggacaaaaaccccagcatatcgtgtcctcacaccggctggagcactggacgtcgccatgacagagctcaggggcgggactggaacagcagagtctcccattggtcagtcggtgatatatccggccaatggtgagcgccgttactagaagggctccaggatggaggccgacctgacttctccgcctcggtgggctgggtcggcggctggagcattacccctactgcgggtcccgctgctggcagcgctggaaactgggtggacggcatgggttggtctcaggatttgttccgcgccttgtggagatcgctgtcaagggaagtgaaggagcacgtgggca

SEQ ID NO: 33683 - DNA, 2300 bp, Homo sapien
gatcacacaacttagtaatcccactactagatatttacccaagagatatgaaaacttacgttcacacaaatcctgtatgggaatgtttgtagagcttttgtcacaatcacagaaactggaaacatcctaatgtccttcagcttgtgaacagataaactggcaaacccatacaatggaatactactgagcaataaaaaggaacaactactgacacatggatgaatctcagctacattatgctatgtgaagcaagccagactcaaaagtctaaatcctgtataattccatttatatgatattctagaaaagacaaaactataggcccataaaacacatcagtagttgccaaagggtgtgggaatgaactactaaggagttggaggaaattctgatggtgatggaattattctattacttgaatccagtgaggttactctactcatttgtcaaaaacaataaaactgtacaccataaagggtgaatgttactgtatgtaaattatatttcaatttaaaaaaactcagtctgacagtttgcatatttttaattttactgacaacttatggaaaagaaacatctctctgcttgcaacctgtcaagaaatacttaacaccatgctatgttctttgcaggcttttttctttttttgtgagacatattccctgcctgacagaggagctcattagggaaacaagtctaaatattaaaataagttacagaaaaaggccaggcaaaaataaattaattgagtgataaatcacagaatacattttatatgtgtgggaaatgaatggcacataatcttggaaaggtcttagtgcttctcaacattgctgatcttatattatctctaactttcaagtgaggatgttgagacttggagaggacaagtactttttccgtgattcccgagctatcaggtgtcaaagctgagattctaacccacgcctcttcgcccaaaacctgacattttctgcatgcggcgatggaacaacacagaagaggttacgacggcggctacacagtgtgatttcaatggacagcaacgcctccttactccccaaacaacccgctcaactacttggcacgaatcctacacagtaacaccatgattattgccacgtttcttaaattgagctcaacggggtcttggaatgtcaactcccgagaaaggaatcagcgagccttgtggggatatggacctacttctgacaagtcttggtagtaaggaaggcgcatggggccagcgccggagccagggtgccaccgaaaagggtaaacaccaagaaagaagacagccgaggcgctgaagatactcctcttcaattacaccactcagctctgggtcacaaggcggggaacagcgtacgaaaaacccctcccctggcccttctagcccctttggtgaaagatttccgtggacttttccctgcctccgtcgccagtccagggctaaaactgaggctcctctacaggcgtggctgggaggaaagtggtggtgcgccttaacagcgcaagcagcccggggcacgccgggggaaggcgctgggtagtagggaccgcggacgcacgaggccgggccaaggcgcccagagccgggccgggtagggctccgatgccagagtgaaggggtcgacaggggagaacgaactcgggaaattctctccggtgacaccctaagtgtcgcatgatgcgttagttgactaggggctctcacttttccctcctttactgacctcgcaatcactgaccacgcaatcgctgcccacgccgccacctcacctctccagttcttgtactgcgggatgtagtagtatttgttcccgaattggtccgtgcccacgtgctccttcacttcccttgacagcgatctccacaaggcgcggaacaaatcctgagaccaacccatgccgtccacccagtttccagcgctgccagcagcgggacccgcagtaggggtaatgctccagccgccgacccagcccaccgaggcggagaagtcaggtcggcctccatcctggagcccttctagtaacggcgctcaccattggccggatatatcaccgactgaccaatgggagactctgctgttccagtcccgcccctgagctctgtcatggcgacgtccagtgctccagccggtgtgaggacacgatatgctggggtttttgtccgcacgccaaacgggtttggaggaccctcttcgccttcggagagcagagtcaacacggaggtaaagaaaaccttactttttggctaacaggccagttagaatctggaccaatgactgtaagctttgc

SEQ ID NO: 33684 - DNA, 2300 bp, Homo sapien
tgtaccacaactgtgaatctcagttcacgagctcagacttctctttatggaaagtagttcacagtatttgaatcaatcctgacaccacctttagttaaggcaatgcagactgcagtaaggagctccactgtggcaacccctatgctgttcctggtcttgcagactgtcctgtaacttgaagctagatgagcaaacttagattgtaaaggcatggtctagatcagcagtctccaaccttaatggcatccaggactggtttcgtggaaaacaatttttccatggacggggatgggggatgctttcaggatgaagctgttccacctcagatcatcaggcattagattatcataaggagcgcacaacctagatccctcgcacatgcagttcacattacggttcgcaccatgagaatctaatgatgctgctgatctgacaggaggcggaacttagacggaaatgctcactcacccatcgctcacctcctgctgtgcggccccgttcctaacaggctgcaaaccaggtaccagtccgtcgttggggacccctggtctagattacagctaaagaactacaaaggctttctctttatatgcccttccttcctgcccaagacttctgggcttttaactagggatgcagcactgcaagtatccggaggcagtaactgggaaaaccacctatcatgattaaaataaaacacgcattggcctctggaacgaaggatgttaaaataatacattctgcccacatcttggattcaagacttggggaagttttagaaaaatcagttatctcaagtaagtattcagtgcacacaatccagtgactgagtctactttttctggctactaaggtacaggctaggcctaagcagcataggctttgaaactatcatccaggttttcaaataaaaaggagtaagaaaacaactgctggtaatacaacattacaaacattaacatatgcccaacgaacagtatcgtagatcgttagattatctgccaaaagcctgttccctggtaaataacagttattgttgttttacctaaactagttaaacatgtcgcagcttgctcctgaaagagaacattctatagtctttggagaatcagtgaagaggtcttgcaacatttgtcagaggtagtcaaacagtgcaagcaatcacaaaatttggtcaccaaccaaaccagattagctaatctttcagttcctgtagattagaagacaatattaactcaccctttctgcatgttgacttttgcatccctttatttgtgtattgaaagaacaagcacctctatgggaactctatgccctgacagtttaattacttatcaagtttactctgggccggtattgatcattctttcgtgaaacgaattagatacttaaattaaaaacaaacaacaaaaccccccttttcacatagcatggcggcatgtcccttggtaacaaggttgagtggatccaccaaggcccagtagcttgcctccttttcgtaaggatgtaactattgtccaaccagaagagagaggcatggagtgggatgtgcaccaggatgaactcgccggaatcgtcaagagtcgttgtgtgaccctcaccttgacttcgggcgttttgtggggacccaactgctttcttgccgctgctctttggtctgagtttccctcagccaaacacttcacccacccatgaccctccaactgtcccgctacagcaggggatgggggttgtcttccgatcgacctcggggggcaaaggcaaaagtccctagctgcttcggaaccgctcctcgagtcctgaagccgctccacgcctcctcgcccaccacttggtccccgcaggacgtggcagtctcgggctccagcctggaaaggagcccgcccgggtgccgtcacccgccccgcgcggcctcacctgccgctccccggaaatctcagcgctgccctgcccccgcccccaccctcccgcgtcctccaactcgaggtcccaagacccacacagcaatggcgcagccggaaactgggccctagacttactcacgcccggctggcggctcgggtcgcctgtgggcgggacgcaaaggccgcgacttccgccttcctgcttccggtctggcggtgagtggggagtgggatccgatcccgtggggctatgtaggggaagttggtggctgcagctgccgtggttttctcctggtgtccagcagaaacggcggcggcgcaaggtgtggctgggccaacccaggatctcccaggaccctccgctctgcgcgacaaggggcccgcgcttgccaaggc

SEQ ID NO: 33685 - DNA, 2300 bp, Homo sapien
cactgcacctggctctatttacatttaagtactgatttattgaagctttgctagaatgtgtcagtcaccactgggtctttttttggagggggaatattagaacattttgactactaaaatttcttctactcagtatttctttttttttttttttttttttttgagacggagtctcgctctgtcgcccaggctggagtgcagtggcgcgatctcggctcactgcaagctccgcctccccggtactcagtatttcttaaatgaatcctttcttcatcatactgctgctaccactggtaccctaagtctaataatcacgtctggttcattgcagtaacttattttctctatttccacccttgtcactgtgcaaataaactatcttctacattgttaccaaatgatctttaaaaatcatctaatgatcataatcttttcttgcttaaaatcttactgatttttcaccattcttaaggccaaagtctaaaattcttactgttgtctacaaggcccttcatcatctggccccacctacttctttaatatcatatcttactcccccccactcgtcaacagagaacttttttttgatatctaagatttttagcattaaaattataggatgtagtagaaatgaaagtttaaaaatattgcttgtaaaattattcttcattttaatgtatattcataattagctcactttatgcatatgtgtcaaatgagatagtttttgttagtgtttatgaactgtaaaacattaatgtaaaatattgtttctctttactttttgtttctatcttgccttttgctttcatctacttgataaaagatactatacatgtggtaataattctgtaggaatgttggagtagaatggacatgattttctaatttggaatgtcctttgaatggaaaattagaaaacagtccataaaataaaccattatgttaggggtgatatgttcaaaagaaaagatttttccggatcatctgtagaggtctttttaaattctttatgcctgtgtctttagcttccattttaagaaaacatatggccgccatagaattgtttcttatttatatttaatttatggataaactcagggaatctgctattttaacagtacttttggcgttcatacatttttcatatagcccttctgtctgtaggagggaggttaatgccaaataccattattgcctgtgaggaagaccatcatcttgtgattggacccatactaatgaaatatgaatgctctagttgagccatgaatcacatcatttgtacttggtggagcaaaattgccagctttttattttattttatttattttattttttgagatggagtctcgctctgtcgcccaggctggagtgcagtggcccgatctcggcttactgcaagctccgcctcccgggttcacgccattctcctgcctcagcctcccgagtagctgggactacaggcgctcgccaccacgcccggctgatttttttgtattttttagtagagacggggtttcactgtgttagccaggatggtctcaatctcctgacctcatgatccgcccgcctcggcctcccaaagtgttgggattacaggcgtgagctaccgcgcccggcagggttgtttcttaaaggtaaataagctccctaaatttgtctgtaaattggaagtaactccagtgaaaatgccaacaggaatttttttttggcttgacaaactaaggctaaaattaatatagaaatgagcatacaataataggaacactatgaaaaagaagagtaatgagaggtgggaccaagtctataagatattaaagggtaagtctctccggcccggtttccctcggtgtgctactgtgcgcgcgatccagcaccatggggaagcgggacaatcgggtggcctatatgaacccaatagcaatggcgagatcaaggggtccaatccagtcttcagggccaacaatacaggattatctgaatcgaccaaggcctacctgggaagaagtaaaagagcaactagaaaaggaaaagaaaggctccaaggctttggctgaatttgaagaaaaaatgaatgagaactggaagaaagaactggaaaaacacagagagaaattgttaagtggaagtgagagctcatccaaaaaaagacagagaaagaaaaaagaaaagaagaaatctggtaggtattcatcttcttcttcatcaagctctgattcttccagcagttcttctgattctgaagatgaggataagaaacaaggaaaacagagaaagaaaaagaagaaccgttcacataa

SEQ ID NO: 33686 - DNA, 2300 bp, Homo sapien
tgaagtgtgaccaggacttctaccagtttgtacacagaattcagagatccccgtttccacctcctggtttgggggtcctttttccctgtgcttacaccagctcaataagcgttctcaagtttttgctgcatgtgtcgtttataaagttccctggatggggctaattttatttcaatgctaggagaaaaaaaagaaggggaaacataatggcaagtcacccccatcaggattgcttctccaggttttattttctctctccaatctgcttgctcttacttttcagaatcctcaggttattagtttttgtattttgtccaaagtttttgttgttatcattgggagggacgggtgtggacttactccatcttcactagccatgttgtgtttttaattggcattttaaaatatagaaatgcagattgtaaatatctgtggcttagatgggttgtggccctttttgttttctgttgataaaagctatttgatatttaaaataatagatactcttacatagcagtccccaacctttttggcaccagggactggtttcatggaagacagtttttccacggatggggggtgggagaggatgctttcgggatgaaactgtatcacttcagattatcaggcattagttagattcccataagcagcatgcaacctagatccctcacatgcgcatttcacaatagtatttgtgttcctatgagaatctaatgccaccgctgatctgacaggaggcagaacttagatggtaatacttgttcgtctgccattcacctcctgctgtgtggccaggttcctaacaggccatggctcagttcctaacagaccacagactggtaccagtctgcagcctgggggttggggacccccgccctaatggaagaagcttgtttatttttaatgaggaagaatgtacgccctatcttttggataaataaaacataaacagttttcattcctaccattattatgcatttaacaaatgattaaaacataaacagacatgcacacataccttttcaaagaagtagtgttgtgaaaagctttggaatactggtagctgtcttgctttgaaatttaagtaaaacttgaacttttaaaatttgtgaaatatttgcttgaattttctacttcttcgaagaatgtagaaaggaataatttatcagaccttaattattcaaattatgaattatgcctttattctaaatgtatgattgcctttcctttgaaaaactagggaaattttgattatggtttagtaattttactcatgaacatataaatttagtgatttcaactatatttttaaaatcagttcctgattaaatcatttagggaagtatgtttaaatggattttatttttgaaagacgtattttactggcttttttttgccccaaactattcatattttactgacggataaatatgcatactaattaataaacataataaagtttgaaattataaggagaacaggaagttatttgtgtccactatatgccttaatgattttattgtaaaaagtaattttagaaagtaaattcaatttttgtgcagaaccatttggagtgatatattgcagtatccatgtatagagtctgtaaattggacactgggattgtatatgttattggcatttttgtctaaaatgtcatacaagtaagaagttgattactattggcatttgtgaaatatgaagtatattttattatgtaagagtatttggatatttggttcaaactttggatctattgtcctcctttcaataaactctctgtgggatttgtggcttatgttaaggagaattaagttataaaaatgaccgacttggatctcttttgaaattgtttaaaatttataattaacttgataatttaaaaaatttaaatttaaaattttaaatatataaattacatttttaaattttaataaatttaaacaatttaacttgataaaattggatgtttttataatttttgaacatttattttcctttcctcctttaaattaggtgctctgtggatgtgtatagttttaaacccccactgcaagttggagcaaaaggccagttggctaaaacagctgaagaaatggaatagtgttgatgtctgtccatgggaagatggaaatcatggcagtgaattacccaacttaaccaatgctctgcctcagggtgcaaatgccaaccaaggtgagtctaccataatgttctgcttaaattgtagctacttaattatgcatatgtgcttataatagtaacttacaatgtatatgggaaaatgattttaccaa

SEQ ID NO: 33687 - DNA, 2300 bp, Homo sapien
ctgggatttgccatataaaagtgggcctagacagcacagtgaagcgaattctataatttctgcaattacaattaaaatctctgttccccctcatcaagcttctaagcagacctactcacagatgttaccctgcctcatttgaggtccatttctatttcccaccctcggtggagctgctaataaacagtgaaatggccaaaccaaagagagaaaagagagaagaaccaaaggccagaatcatctataagttgaataacttgtacttgaaaaacagtggtttaacagtaaccaaatgagagtatgtgcctgatttgtccattctctttcaggctgtcatttcaggtcctggctttatcctacctcacaggccatgttattgaaatagaaaagccacattaatttggtggaggcttcttatttgatgtccttaaaatcacatatagcagtgacttttttttacagcatctttcaccttcttgcatgagggttttccttaggtggagggctcttgaaagtactttgcatttcattctcccaggatctctgctctgactcttgatacattagtcacagttccaagagggaacagggtaaatgacttcatagtcaaaacccaaacctaaacagatggttcctttatcccaagaaaatgcaaagacttgtaggtctcctgtggtaatgggatttggcctgaacgttaagggataccagagtcagcaggctgggattcaggcctgggagccaggcatcacgggctttcttcttatttcaactccaggccaattgactatgtggtcttccagccaagtatttgcccaggatatgctaaaatgacaaatgcctgagaaaaccgtaggtaggctgaccccattctccaagtgtggccttgaactaccaaatacatcaattcaccggaggacttgttaaaaatacagattcctggagcctgcccctggaactcactggaaaattttatgctcactgaattatgaggaccacttctagactcttcctactcaaagtgtggtcctgacaccagcaacatcagcaacacctggaaggttgtaaaagatatagaatctcaggccctgccccagacctacggaatcagaacttgcactttaacaaggtccccagacaattccttgaagtgtgagaaacattttgctagcatggtttggccctgtaacctagttctcatcagctgggaagtgagatgcagctgggaagagcaatgcaacaggaagcttcttctcaaccctaatctgcatattaggattcactaaggagcttttcacaatactgacgtcaaggccctactacaggctaatttaatccaacctcctggattaagagctcatctaattccaatgtgtagccagaattaagaaccactgttctataggagcaaaactcagaatcaaagcttaaagcccttggtactaactacccagccaagtcccactcccctaaaaagcaatccggcatttgcttgaagggattcctaaaatatttgccctttcctaagaagaggcagcatcggccttttgaatggctactcattgtccatgcttcataaaaatatgctgggcctccactccccgggagctcgagggcagcgttcccgtttctgtttcctttgttaaccaagtcccagctctgggcttcctcgggatgggaaatggctccttctgaggcagcgtttctctttgccttttctgcccctgggatttgtgattctggacaaggcatatgccttcttaccatgtcattttcctcatttgcagagggaaaacacagtgtccattgattcctttggttaagctgactgctgcccctggctcacgtccagtgactatttctctgtgcagcaatcctcagctgggggcgagccaggagggagatggctgcccacttaaagcacaagccccgagtgctctccgtcctgtgagctctccaaatgccagcttgctcagctgattcactttgacgcaggcaggttcatcagaaagccttggaacaggttggagaacagaaatgccactggattcctttgaattgtgtgcatttaagtgcaggctccagtagatccaggctctaggactataagcctttcttttcacaggaaaccctcctaattggtctgataaactttctgggactcaaaatagaaccacagcacagggaagtatcacctttgtgtctctaattgttgataatgtctgtgtttcttttaatatctctatattacatgctgttgccatcattctccatttctctttacccgctactactaataa

SEQ ID NO: 33688 - DNA, 2300 bp, Homo sapien
agaatagggtgagggtaggaggtggggatacaggttaggaaggttggtttatcctttctgttcccaggggcatttcttctatcaggtcattccctcagctgcaaggcctcctgtttgcctctaatgctacttccaatctgtccatgctgcagggcccaggttatactatattgcctctatcaagtcttcccggatcactttagcatgcaccagtaactcattttcagaactcactcatttcctgaactctttactcattcattaaacatgtcatgttacagaatatttctcttctggtatttcactcattttgctcctaaattttatcttgaggaagcagatcagaaaaaaagaaacgacatagactttaagggcacattgacttcacttgaatcctgctctagggcccctgccttgcagaactccaggggccagttagatagcatgcagtcctgactggttctaccactctggagcaactgtctatgaccacctcaaatccattgtggaatgcaaatggggcatactgtattagtttctattgctgttccaacaaatgactacaaactcagtggcttaaaataacacaaatgtataactgctatagtttaatatcccctccaaaacttaggttgaaatttagttgccattgtaacaatgttgaaacatggtcttacaggaggtgattaggtcatgagggctctgccctcatgaatggatcaaggctgttaatcacaggagtgtgttagttatcaaaggagtgggctccacatagaagaatgaagttctggttcccttcctctctctctctcgcatgctctcttgtcaggtaatgccttctgcatgttatgacacagcaagaaggccctcaccagatgcagccccttgatcttgcacttcccagcctccagatccataagacaaataaacttctgttatttataagttacctagcctgtggtattctgttacagcagcagaaaatggaccaagatatcttacagttttggaggccagaagttcacagtgggttatcagggcagggcgtcttcaggaggcttggggtggagggggaggaatctgttttcttgccttttccagcttctagagggtgcatgcattccttgactcatgacccgacatcactccaatttctgtttccattgtcacatccctgtcattctcactcttatcttcctatctacccccttattaaagaccatggcaattacactgggcccactcagaaagtcgatagtaacatccccactgcaaaacctttcatcacctcttcaaagccccttttgccatttgaggtaacctattcacagccttcagaatttttgaaggaggggaggcatcattctgcctgctatatacatagtctttggatctcagtttccacatctgtaaaatggagaactactgtcttccccacagggctattgagatgattgaatgaagtaatttctgcttatgaattcccagctctgtgcctgccatggaggcaggcaattctgatccatgttctcttctgagtgggttgtcagctggaggccttctacttctttctaatccattagcttcttgctagtgctgcgtccccaggaggaaatcagtaaatgcaagaaataattaccttgacaatgccttgcacatagtaagtaccctaaaataattcattgaattgtttgttattttggtgttaatggatggggatcatctgattaaatgttattatttattagatctaaaatataaatttggattcttctgttgcacttttacctaattactctaaacaccagtgggagagaggaattagtcacaatacaacttaaagaaaaaaatatcttgctgtcactgacttctctccttggtctgaaaactttctgattttgtaggatgccactgactgctctttctgcaactgaaaaatctctcaaagggccctgtccagttaggtcacacaaagccaggctgattatttagagagaacacaatgctccctcacatggggcacagagaggaaggaattttttttttaagccaattccagtccctggagctgcaaactgccctcagggcaaagaagcctgcagaataattgggaggagtctggcaggaaggaagccaaggtaagttaagctgcatttctgtctatagccagggtctccatgccactttttaaacatccccttctgggataaacctgtatgtcaagataaacaattaaataatatgcaagggccaaatcaggaaaactgcagcttcagccctagaaaacaatgccaagaaac

SEQ ID NO: 33689 - DNA, 2300 bp, Homo sapien
agcctaacactaaatgagaaatccatacctttcctacatgcctgcctgaaccaaataaaccttgtgttactatacaagggcttgtctttttaatatattttaaaattaaagtcaacatggacatagggtgggtggctcaaattgaatggtcattgtgcaccaggctggttatctcactgttagttacacaataaaagaggatcagataaacacagacataacctctgcctccactgataatgtaaatcatcccttgtatcatttgtctttccttcaggctggatacaaaaggcatagaaatgaacaattcatgcctaaacatagaagagcttgaaagctagtgtatgtcagatgtttattctaggtcatcattaaggggttgagtggatttgcttataaacacaggctattctgtcagtggggagtgggagagatagagtgtgttttgcagttggaggcagctcttttaaagccatattgcaacttttctgccatgcacagtaagttatacagataattctttttataggttatgaaatgttgttccctgagcagtggaaagtataatatgctatagaaacaatgctttttctctccactttgtgcaaatgccatttttcattacccactgagtgagagcttgctagagattgaaatgagagcagggttgccctcccgctaatggtcaggcacttcatgacacacactcagcaacgacctccatgggaacccgaggaggtctccccaagcagcttcccccaaaatgaagtctgaagtgccaagcccttgaaggatgtcacatcttttcatgttacccatttccaccagcctcattctctgcctagggttttgtgggttgttgtttttcccacccagtccaaccaaagcagctaaagagaaagtaccaagacaaacagaatgagagccttggggaccccgtaatgggtacagagcatgagtgtggtaatcattcttttgatttgtgctcagatatgttttctatttgcttttgcacagaatgcacatttttccccctggattgcaaataatctgaaccagggtaaaaccattacaaagtggccttcaaacatcatgtctgtattggaactgaatgattgatcagacatttaaatacggaaactgggaattcaggtaaatggcactgatagggttttgtttttggttttttgctttttggtttttttttttttttttttttttttaaaaagcatgctccaaggtgtttaaataatctttgtttgcttgggttctctctcttttttgttttctttctctatcttcatctatcttttttaaaaaagaattctgcatttttcccttttaattatgctctcatttcagtgatttggttttatccacaaagccaaaaataaagaaatgatttttatatgattcctaacaattaaaacagggagaaaagatagaattctcaacacctcccatgtctggtcatctctgctctttttctggggccatacttcccgggacaatcttcatcttcttacattgtcattggtgtctcccgaccagcctcttttgaagttgatcgcaagcaaagaaaaagtacacatagaatgacttcttcagctgactgtcctccattctcacccagaagagaggggaagaggaaaagcccggttgggaaataaagatgaatgtgctcccacgatgctgggtggggctgttttgtgctggagcaggcaggcaaaggaatcccaccatggggctcttgagtcccaggttaatgtcaaatgctgggttttcttttagttactcaaggatcaaagggaaattattcaataaaaaggaacttaaaggggacttctgtgcccacataaaccttaatcaaaaacacttgttcaaatgtagcttccttgacctgccttttcatattgtcttttcagctcttatacatacacatttgtgattaaaataaagattttctccatcaccattcaacatttccttttcctctcagctgaccagaatttcaccagggtgacatgacagtttgttgctaaggaactgaagactatgtcataagtgagcattctgatgaagaggagtgaacagtttgcagcagattggatattaagtataaatcagctctctgtgtatgtccttgtgtggtggtataactgacaacaggtgagaaaaagaaggctcagggcattcctgcttgaaatgtggattcttagccacctcctctgtaaaagctactactcatcccctcaattgcctcttgcttttaagaatgtcctcatgcattcgaacttttc

SEQ ID NO: 33690 - DNA, 2300 bp, Homo sapien
aaaagtcaccagacagatcctgctcctcttgacctgagaacaccatccctgacaccatcacctccacaccatccccgacaaggagagacaccttgacctctgcacccccttctcccccacgcacactcgtggccaggcagttcacagtgggacacagctgactgctcaaaggttaccttatgttgagctgatttcaatgatctcttctattcttattcccatcctttgagttttagtagaaagacataaagaaaattccacatgatgttgtttaaaaaaaaaaatctgagcaccagctgtgttactggattgaaggtttggccctgttgtactttcaaataacgatgatgcctgcccaagtcagagggacaggtctcagcagctgtgaagctcatctcctctctctgcccctggaaactcacctgcctggtgtcctaacttgtctacactacagcatctctcatcttttaacagtaccagggggttaagagcttaacgggtttccttgacttttgttttaacaattaccttcactgccttacactaaacttgaggctatataaaaaagtcgcttttatatcattaattaagtaatgttttcattttacaaatttttttttttttttgagatggagtcttgctctgttgcccaggctggaatgcagtggcgtgatctcggctcactgcaaactctgcctcccaggttcacaccattctcctgcctcagcctcccgagtagctgggactagaggcgcccgccaccacgcccagctaactttttatatttttagtagagacggggtttcaccgtgttagccaggatggtctcgatctcctgacctcgtgatctgcccacctcggcctcccaaactgctgggattacaggcgtgagccaccgcacctggccttacaaatattgttttaaagcctattctgtttgcagaagtgctagtttacagagaagttaatggtgaagtaaaggcagacccagttccccctcatgggagcgttaactatataatcacacaaacacatgttaggccacacctgggatctggggtgtacatcagaggtgcctggtgatttgagggcacattaaccttgcctgagtgtcagggagggcttcccttgaagatctgaggctttagcggagatggggagggtgaggaggagttaactctggggagggtggggaccagagcatccagacagaggaagtcttgcaggcagaggccctggactgggagggaacacgagtaggagaaattgaaaggagagttgtgtgactgagacccagagcaagggaaagtgggctgacaaaggggcaggagccatcttaaagtgcattatgaccctaagaacaatgggaagacatcaaaaagtctttactaggcaggggaaaatgtttaaatgttagcagtaaacttcacataagataattcctcactggccaattcataccattattctgcatttaggttttaaaacatggaaagttccttttaaaagccaaaacatcctttttaaatatccaaaggcctctatcatttattcattcattctacaactattcttgagcacccactatgcactgggccctgcctctcggtcaccgccaatatcgagcttacatgcgggtgagagagacagacaaggaacaacagccgcatggccaggggtctctccagggctcttggtactccagtgcctccctgcacccagccatcctcaaagcaacattggtatgaatgaggctgagactcacagagaaagacaatagtggacaaaacaaagtcgtggctccctgcaggctgacagcctagtacagggagctaagaacacataacagatgaatagctatacacacaccaggtagttataaatgccatgaaaaataagacagataagaggagtacagaatgatgaagggcttgctattttatatacgatggtcaagaaagtctctgattaagtgtcatttgagcagagaatgtgctaggaagctctatggaggaacagcattccagggagatggaatcacaaatgcaaagattccgaggtggaagcatgcttgctttgttccgggaacacaaggaagtcagtgtgtctagaggggtgcacagggagtggcacggcaaagggaattgcccctcaggagcagagggttatgtcagaggggaggcgcgaaccaggtcgcatagcacattctaggatgtaatgagtgtggattctatgttgccatgggaagccagcatccttgcacgaggtggttaagtgctgagagaagataaatcagatta

SEQ ID NO: 33691 - DNA, 2300 bp, Homo sapien
cttactgtaggtgattacgcctgagatgccccactcacctcaacgccagccaggaggctcagctcaggacttcccagtgccacccctctccaggtctggggctaatggggaaaagggccccaatgaaacacacaagttgcccgtatcggtcactgagaagcaaacatggaggtgtggaatggaatttggaaacgggacatgcaccttccagacaggaattgcatgtaggactggcaaaatcaaaaacagcaaaactgagattatgcatgtggaagccagatccgccttctttgtttcgtggttataaaatcatgtgaatgattaaaatccatcatctcactgcctgctctagcaaatgctggcgctccttacagacccactattgatcctcagacagacggttgaaaggaggcagcattcgtcaaaggacgcaaaagagcgcatttttacttttattgtattagcttaattctctttcagatgaattaaagactaattttgctagaccaaggggagagtctgtgcatcttctgctgcccccatctgtttaacatgtagattcttagagggcaggattaatttttagaggcaagaaagtatttacaaattccttgtaaaaatacagtacattccttcatgacatgccaagccagccacgcttccttcctccccaactgcaccctgttctccgctcccctcccccagtcaccccacccactcccacaagcatgctcacccttacagactcacacatgcatgctaaacaccacacacacacacacacacacacacacacacacacacacaccgtcctttaaatggtatgtaccatgctatgaggcctaccaaacatcagacactctttatcagcagttgtgccagggtctccatggcaacagtataatagatttgcccttattcaatcccagaggccacattgaagcgcaatgcaaaatttgctggggcctgaattcctttcaagccatggctcatgtgtcaggaaacaagtcaatgcacagacagcactgcacataaagatggaaaggaaccttttctctccaccgctgtttgctcacagtgacattcagaagcccagacccttctggatctcatttctctctcgttttctagttattaattcacttctttgggtggagaggcgagtgggggaggggagcatcatgctttgcaataataaaccgccaatgaaagtgcaaagcaagctgcataaaaacgaagtgtgcatcccagcctccaaggttatataggattcaatatggctgaagcccaccacagctgcagactgcattctggggtttgatgcccctcagtgccagcagagtcgagcagctcagccaacctcctcgacccaaactggagtgctactctgtgatactcaaagaaaccatccccagggaaggagaggcagaggaatggacacatgccctcgtcctaaagccaatctcggcaggcaggaggaattcccaggagctcacacctgaagtacactgtggctaaaacaagcacagcttaaaagttaaacaatcatttgtttcaggtttattttaatcattagctttgggacttccaagatgattactttgtgggttaattattttctgtgctgtggctttccaaacctaattgctcaacttcattattgtacatagtgatccatagcccattcctaaaattacctgtccaaatattttcccttttgagtatcactgagaatttgctatttttctctctgagttggaactttgcataaataacttggttggagatgcttgtgtgattttgaagattaaaccagggttatcactgggcagctgacagaactcagttggtaatattattaggatttgaaagaagactttttcagagctttgcccacatgaagcctaattaacttcaagccagtggttctcatactttaatgtgcataaaaatcacctggaatgttgttaaaacacaatttctcaaacaccattcccagagattctgattcagtaggtcaggctccggaacttgctttgctcacaaactcaccagtgatgtcaatgtggctggtccaagaatcacactttgagaaccactgcttttggccaatctccatgagagaaagttctcaacctctgattgcaagtttattttgaccatttaccataacttcaacttcaatgctcgtcttgaagggcatgacttgtcatcctaatataattagcccctcttccagcagatcagacccacaatacgccccagcctctggaggacacagagagaatggaagtcgtgga

SEQ ID NO: 33692 - DNA, 2300 bp, Homo sapien
aaacctcgtctctattttaaaaatacaaaaaattagctgggcgtagtggcacacgcctgtagtcccaactacttgggaggctgaggcaggagaataacttgaacctgggaggtggaggtggcagtgagctgagatcatgccactgcactctagcctaggcacgacagagttagacttcgtctctaataataataataataatattttatgaaacaatgttaactttgagctgtatagcttgatttctttgcattctttataaagtataaataaaatataaatagatgttttatacctcagttgcagagacatcagaaaatgaattctagacaggagcttgaagagttcagataaaactcccaaaattatagaaaaaataaaaactaaaccctgatttggtcaaatttcacttgaaaccggggtactcaagtgtgtcatttctggaatgtaaaagaagttattttccacattgtctatccagtgtggttttttttccatagaaattatatgcactttagaatggattcaatagaattgttcttttgacaggtataccttcaatatgttcaagctacagatgaagccagtcttttaacagttttttaaggacctacatgattacttacattagatagaaaactctaggcacacatatatccacataagcattgatgtatatatccagtttccaattttaaaattttaaattgtatatttgtagttattgttacagggagattatcaatgactagggaaggccgggcgcagtggctcatgcctgtaatctcagcactctgggtggtggaggcgggtggattacctgaggtcaggagtttgagaccagcctggccaacatggtgaaaccccgtctctactaaaaatacaaaaattagccaggcgtggtggcgcgggcctgtaatcccacctactcggaaggctgaggcgtgagaatcgcttgaacacaggaggcagagattgcagtgagcggagatcgcgccactgcactccagcctgagcgacagagcaagactccccctcaaaaacaaacaaaacaaaacaacaacaacaaaaaacaatgactagggaaagtaggccatgaaaagtgttgtttccaacctatcaattgccagtactacaagcaggagttagacgtttggaggttttcacacggtgctataaatacagtttccagggccccggtacacgtggccttcctgctctgccaggatggagagtcttgctttccacattgctgatgtggtcagactaattaaattattgcaaaaagacacattccctagtcaaccttatgtgtctgccttcttcccttgagtcacagttgttggctttacaggccaaggcaagtaagtcttgaaccctcagcagaaacagggcaccagcatcggatgcctcataacctgaacagttaaggacgccccaccacagagcttctttctgagtgtgataaactataaggcaagactgtaaaggggtggatcttcatttcgatttagggtaggtgacacctcaagggtgtttcttcccttccagcgtaactggatgggaaacctacaccaagtgtgcttgggagggctgcttgggtcagctacctgtaagtggaaatagggggtgccaccttccgatgaaaacccggatcccgtactgtcaacggagggcccttgaattcacatccctcagcccgctagaaagcccctgaaaccacgtggcctttaacccattccggcaacagcgccaattcccggaagcgagagggcaagaaagctcggcgcgacgcttcccgcgtcttctaggccgcgcgctgaaatcaaacgcgacgccggctagctgtgggccgggccgagcgctcaacgctccagcggctgggtaagccgcggccgccgcccaccccgctgcagagctgggcggggccgcctggaggcagcggggagaggccagccgaaaaggaagaagagacgccggaggcgcgctctgcgcaggcgcgcggcgccccgcctccccagcgtcggctccccggcgggcggtgcgggccctcccactctaccccgcgccgtctcacggccccggccctagcttcaccccgactacccggcgtgcgcgtcctcctgccggcctgcaggcccggggcctccgcctgcttccccacagctgctccttgcggccccgcttgcgttcacgctgtcgcccgggccggcgcggccgcgggcaaccgctccccctcccacacctaccccgccccctccccgccttttccgccctccggtccccctccctcggcccgc

SEQ ID NO: 33693 - DNA, 2300 bp, Homo sapien
tgaggccaggagtttgagatcagcctggccaacatggagaaaccctgtcctctactaaaaatacaaaatttagccagggccaggcgtggtggctcatgcctgtaatcccagcactttgggaggccgaggagggcagaccacttgaggtcaggagttcgagactagcctggccaacatggtgaaaccccgtctctactaaaaatacaaaaattagcccattgtggtggcacgtgcctgtaatcccagctacttgggaggctgaggcaggagaattgcttgaaccccagacacggaggttgtggtgagctgagattgctccactgcactccagcatgggtgacagagcaagactctgtctcaaaaaaaaaaagagctgggcatggtggtgcatgcctgtaatcccagctgctacttgggaggctgaggcatgagaatcgcttgagactctgtctcaaaaaaaaaaaaagaaaagaaaaaatagaaggtaggtcgggcacagtggctcacacctgtaatcccagcatttcagcaggccaaggcaggtggattccctgagcccaggagtttgagaccagccttggcaacatagtgagactctgtctctgttgaaaataaaataaaaggcagtgatagtaatttcataaacaataatacttattaaattattatagtgcccatgttttaacagtattgaatgcctcattataataacattgttttctgtactatatatctgtttttagacatttaaggagctataaattatcttaagataaattatagatgcccccaaggatttctattaggaaatattgaagatgcagtatattgcatagtttctgtctctacttgagtaacaaccagatggatcggtaagatgaaaacagatgaaataaattttttaaaaagtattttatatatgtatatattctgttggtgtgcttctaggaatttgtcctaggcaaataatccaacaagtacataatgacaaatatacaatagtattcattgcagtgtttataataataataataaatggcacataacctaagtgaccatcaataggtattaaataatttatgataaacataatgaaatattatgtaataattaaaaataattatttagctctgtagttattatcagataaaacctacagtctactaagaagggaaaataagtttactacattatatataatatcttctctctacagattgtaagactggagtagttagggaaagtaaggaatagaatagatttggatagacaacatatagaagaggacattttaaatgagcatttcccaacctttttggaatcacatttcttaattttaaaattttatcaatttgcatcgtatatggtaaaaagtggtttttaagtaaaaagtattttatatcagtataatatttaaaactgctttctgaaccaggcacagtagctcatgccggtaatcccatcactttgggagcccgaggtgggtggatcactcgaggccaggatttcgataccagcctgcgcgatatggtgaaaccccgtccctactaaaaatactaaaattagctgggtgtggtgatgcatggctgtaatctcagctacttaggaggctgaggcacaagaatcacttgaacccaggaggcagaggttgcagtgagccaagatcgcatcactgctctatagcttaggtaacagagcgagactgtctcaggaaaaaaaattttgctttatacatttttgttctttgttctacagaatcatttttggctcatagtaaggacactttctaatgattagaactgtttaacagtttaagatttcaggcattgtatgtcactgtgtgaccatttatcatatatgctgaaaataaactttaggtcttacctgatttactgatttactggacttgacaagtagcaaattgatttatggccccgtggacaaagttcattccctgttcctgagggtctgtggaaatctcttgtaaggaaaagtagtgtcattttttttttaatttccaagttataaaattgtatttcacagtgtttaggaatgccataatttgtggcatttttaaggtgtatactttattcccacataggccgaatacatcaagcaatggtaacatctttaaatgaagataatgaaagtgtaactgttgaatggatagaaaatggagatacaaaaggcaaagaggtaagatcactgagtttaattttattcctagtcctgcaatcaagattctgaatataaaacaaaacagaaaagtacataatgttattttatttagtgcatatatt

SEQ ID NO: 33694 - DNA, 2300 bp, Homo sapien
attagttaaaacatatttagattgtaaaccaactgagcttgctaacatagtcatttgtgataccaaacattaaatcccctttctaccttttttgccttttctaacaactttacagtcatgttgccagttccaggtccaacttccagcactacatcagttggtcttaaggcagcctaaaagcaagcacaaacactttagctcttctggcaacatcagaacacagaagttaatttacacctgaacatctttactcatatgtgctccgataagagctcttaatctgactccatttttagatttcttcatgatctacgtggttaacaaaattacctcaataacatttggtgcaaatgaaaatctaagacctctcctaacttggaggaatactgttcaactttaggagtcagaaaagcagcaacagcatttctgggattggcattctgctttctatctggaaatattccaatagcctcttgttaccttctctgttcgtatcaacaagttcaaatgggaaaggactgtacgtgttgggcgaagatttttcaattttcaacccatgtatggtttcaaggatgcagaagagcagaaactgtacacaaaattgaatgtctgcacacagctctaatattctacggccatagctttcatcagatgctcaaaggaaactatgagctaaaaaggttaaaatagtacatgacccttctttctttttttctcagttttcaaatgacacgaagcctgacaagatcctttaactatgtaatgctctttctacagctccaggatgctttccttgcttttaaccataagtgtaatctgcaccgtgtgtatttcacttcctaacacccaatcatccataaccataagagaacatcaataactcagaaagcagtaatactccaagcaatttatatgtggtactagcatacaccaaataatttatatgtagtactatatgtttttctggggaacaaactttctaatgtgtagtttagacataaatagatggagtacataaaaactaagtgatcaaaaaggtgattagaaatagaagaataattatcttgaacaaatacaaaggtccagctataaagtagataatccacaaaaagacacagaattgggaaccaggagaaactcagacccacaaaatgaagcttatcatgcagaagacagcccaagaatcctagacaattatttgattcattcaacaaatatttacagagcatctaatttacggcaggcagactttctgcgcttatgtattcataggaataaaattaataaaccaacaactctctccctttcctcttccacacccaccttatcgataatgctgttaataatgagaggatttttcaaaatgtgctgcccaatccccgtgttgaacatgagtcctgtaagaaaatacgaaacagcattaattttcctactgagattagatattaggcagtaccagagaagaaagctgcatgggtatggggaagatttctgcgccaaccagggccacgaaacgtcacgccaggactgacaaactctttataagttcatcctccagctggaaaggaagtcagcggcgacgcgcagggcctgcggccgagtcggggacccacccctgccttccgcgctcacgggagcgcgtcctgaccggcctctgccgatcaggtcttggtccgcaccccaggctaggtcctgccggaagacctgacccgaccgaccccagcttcctcgcggggatccgcacctccagcgctcttcagctcccggcgctgctcctgccgcccgcggcggcggccgatggcccccgacttgaccttcggcatctcggcagaaagcgggcccacaggcccgggacgtcaaggaggaccaaagagggctagcgtgagaaagccaccacgtggggatcgccgccacgcgccgcccgcaccactctggcccaagcgccggaggggcaagggtccgccccctcccgtacgctctgagctcctcctccagaaaaagggcggaccttggagcccactgactgccgggaattggagtcacagagggaggaaggccgaaccgcgggagcctacagatcccagaagacaccgcgctaccgaggactgcagtctggagttggagcccttgtcccaaccagggctggataagaaggtgttggtgtggtgctctcggtgttgcgaaggctgtttaagttatatgatgaggttaagcctatggatgttttagtagcctaggttctgggatcgctgaggtccaaagaagtattcacgtgcctcgctcctgttttcctgaagctt

SEQ ID NO: 33695 - DNA, 2300 bp, Homo sapien
aacctagaggccaaagcaggcagatcacttgagctgagaagtttgagatcagcctggggaacaaagtgagaccccgcctctacaaaaattacaaaaattagctggacaagatgattcatgtctgtcgtctcagctactcgggaggctgaggtgagagcatcgcttgagcccggcaggcggaggttgcagtgagctgagatcatgccgctgcactccagcctgggtgacagagtgagaccgtctcaaaaaaacaaaaccaaaaaacccaacaacaacaacaataacaaatcacacacagggttttgtgtcatgttaattttttttttttaaacagggtatcatgctgtcgcccaggttggtgcaatcttggctcactacaaattctcgggctcaagtgaggctcccacctcagcttcccgagtagctgagactacaggcctgcaccaccacgcctggctaatttttgtattttttgtagagacggggtctcactttgttgcccaggttgatctcaaacttctcagctcaagtgatccgctcgccttggcctctcaaagtgctgggattacaggcatgagccacctctccaggccatgtccatcctattaacatttggaagtgcctagcacagtgtactctttagaattgtggaataacaatgattgatgaaatgaaacatatacttgaagatgctactagggtatacgagattttttttctgacttagaactacatcaaagaaagaagggcctaagaccaaggtttgggaatgtacacaatgaattgctcaaaagagagttagctttagtaatgacaggaagaagctatttcttcaaccaaacagaatacacacagaaaaatttaaaagagccattacactggctggcaaaacagatgtggatattatggccctggtacacacggagtttatagtcaggtacactgtcctgtcacaacgaccaatacgttatcgtatttacagcgttttggagtttctgtccatctctgtcaatataatacactttgaaataagtttcttacttagaatccctagcagtgtttgatacacagttggagctcaataaatgtttacggagtgaatgatgaggcacaaaaggaatttgttgaattatttgttaaatgaatcaaataattttctaggattcacgggctgtcttctgcacgataagcttcattctgtgggtctgagtttctcctggttctcaattctgtctttttgtggattatctactttgtagctggagctttgtatctgtttaagataattattcttctattcctttttttttttttttttttttgagacggagtctcgctctgccgcccaggctggagtgcagtagcgcgatctcggctcactgcaacctccgcctcctgggttcacgccactctcctgcctcagtctcccaagtagctgagactacaggcgcccaccaccacgcccggctaattttttgtatttttagtagagacggggtttccccgtgttagccaggatggtctcgatctcctgaccttgtgatccgcccgcctctgcctcccagagtgctgggattacaggcgtgagcctccgcgcccggctcttctattcttagtagaagcaaccagtagccctagcgaaaccagacgttaattccattctcgcagttcttttccccagggcaagcagcaaaaaatgcattcccacaaaagagcaagctcatccccaaatcccgggtttcccacccccacaagcttcaggaaaacaggagcgaggcacgtgaatacttctttggacctcagcgatcccagaacctaggctactaaaacatccataggcttaacctcatcatataacttaaacagccttcgcaacaccgagagcaccacaccaacaccttcttatccagccctggttgggacaagggctccaactccagactgcagtcctcggtagcgcggtgtcttctgggatctgtaggctcccgcggttcggccttcctccctctgtgactccaattcccggcagtcagtgggctccaaggtccgccctttttctggaggaggagctcagagcgtacgggagggggcggacccttgcccctccggcgcttgggccagagtggtgcgggcggcgcgtggcggcgatccccacgtggtggctttctcacgctagccctctttggtcctccttgacgtcccgggcctgtgggcccgctttctgccgagatgccgaaggtcaagtcgggggccatcggccgccgccgcgggcggcaggagcagcgccgggagctgaagag

SEQ ID NO: 33696 - DNA, 2300 bp, Homo sapien
tatttattttttcttgagatggagtctcgctctgtcgcttaggctggagtgcagtggtgcgaactcggctcactgcaacctccgcctcccggcctcaagcgattcttctgtctcagtctcctgagtagctgggattacaagcgcatgccaccacgccaggctaatttttgtagtttcagtagagacagggtttcaccatgttggccaagctggtcttgaactcctgacctcaggtgacctgtccgtcttggtctcccaaagtgctgtgattacaggtgtgagccactgtgcccgacctcaacataattttaaatggtcaatttgtattttattatgtatggatgtattgtgatttaatcatttgtgtcattggtggttgtttaggtaattttatctttttactttaaaaaacagcccttgtgtgatcgacattcttggaatgcagagcttggttcaaatcctaacatggccttttactagctgtttgacgttaggtgggctacttgacttctctgtgcttcagtttcttcatctgtgaagtggacataaagaaaatacctacctcataagggttgttctgaggattaaaatagataattcccataaagatcttaaaactgtacctggaatattctaaattagcaataaaggttttctattattaatatttttgaacactctatttccttacaacttcttttactattattattattattttgagacggagttttgctcttattgcccaggctggagtgcaatggcgcgatctcgcctcactgcaacctttgcccccagggttcaagcgattctcctacctcagcctcccgagtagctgggattacaggggtgcaccatcatgcccagctaattttttatatttttagtagagatggggtttctccttgttggtcaagctggtctcgaactcctgacctaaggtgatctgcccgcctcggcctcccaaagtgctgggattacaggcgtgagccactgtgcctggccttactattattatttttaagaaatatatagttggtgtgtatttttaattaatttatttattttgagacggagtctatttatttatttatttatttatttgtttatttattttgagacggagtctcgctctgttgcccaggctggagtgcagtggagcaatcttggctcactgcaacctctgcctccagggttcaagcgattcccctgcctcagcctcctgagtagctgggattacaggcgcccgccaccgcgccaggctaattactgtatttttagtagagacagggtttcatcatgttggccaggctggtctcgaacttcggacttcgtggtccggccgcctcagcctcccaaagtgccgggattacaggtgtgagctactgtgcccaccccttattatttttgaaatgggtgtgtgtgtgtgtgtgtgtgtgtgtgtgtgaactctctatatgtcccaggttggcttcgaattcctgggctcaagtgatcctcctgcctccatatctggagtagctgggactacaggcgcgcgccactgcgcctgagtaagttctctttttaaggataagaaaatttaggtgactatgctagcttttagcagaggcaagcagaactggatttatgtccttttacatttttccactcttgctattactcaggagtaagcgccaagcaatttgggtaacttaaaaaataaatatttgcgggagggagggtggactgatgggagtaagattctttaaataactcttctctgctgtgacggatccgctattgatatctagaatataaagcgtgaaatggttctgattgaagcttcaatcaacgcaggaaacaattgagctccctgggagtcggagaaaccagacctatggtttccatggtgacagatccggctagtccggactcctggctctttatactgcgcaagcgcactgcgcaagcgcacacaactgatttggataccccgcgccttttggttcaaagacaaagcccctccttccccttcccgccgttcgcctatcgccttctctctctgccggtcgcatgcgcgctggtctcctgtgacgtagttttcgcgcgtccgcgtcgtttggagctgcgacgccaaacatggcgtgttcctagaagccgctttcggcatcagtaggcggcggcgtggggtctggcagcgtggggagagggaccaaccgacgccacttcgtgttgggaagtgggagcgggagggccgggcaattcccgaccgaaccaaacggtgaggccccggcccgagagccaccgagcgcgcggga

SEQ ID NO: 33697 - DNA, 2300 bp, Homo sapien
tgttgcacacttataaatctagagaaagtgtcttgtccaattgctccctgagtgagcacttgatagctgcagagatcctatatgtagctaaaatgagtattttgtatcaactttctgaagttagaagcttagcttttgcctcatatacagaagtccctccttggactacgaaccaagacctacagcggatgcctgaaaccacagatagtaccaaaccctttgtgtactatgcttttttgagctagtatccaaaatggctactaagtgattaacaggcaggtagtgtatatagctggtatttgctggacaaagggaggattctcgtctggggcaggacggagtgggtcagcttgagatttatctccatactcagaatggtgcacaattgaaaacttaagaattgtttatttctggaattttatatttaatatttttggattgtgattgactgcaggcacctgatactgaggaaagcaaaactaagaggggactactgtactggtaatgagtgtagaggaatttgccttgttgccaggctggtctcaaactcctgggctaaagcgatccgcccacctttgtctcccaaagtgttggaattgcagatatgagccaccttgtctggccaaaatagatttaaaaaaaaagatttccctgaggccaggcgtggtgactcaacgcctgtaaccccagcactttgggaggccgaggcgagtgagtcgcttgagcccaggagttggagaccagcctgggcaacatgacgaaaccctgtctctacaaaaaatattaaaaagttagccaggcatgatggtgtgtgcctgtagtcccagttactcaggacggattgattgagcctgagaggttgaggctgcagtgagcagtgatctcatcactacacttcaacctgggtgacagaacaaaccccatctcaagaaaaaaaaattctattttgtgttcattcctctttctgtatttctactgcagctacccctttccaggcagatgtccacaacagtcatatgtttaacaaatattgtctatagactatatgccaaatcctgtttagacttcttgtagactcttttcgcttttagtatttgttgcatatcactgtgatataactttctgtaactggcagtttgattttgtaaatcccttgttcattaacctccactggcttatctttagcatcctttgttattcactaccccatgtgagagactatagcatttatatttgtgttgtattttactggtggtctgtttgttatcttcttcttccatgtgattgtaagcacctttatttggacatacacatgtgtgcacacacaagtgtgtgtttgtgtgtttggggatttgctctcctgagaagatatcttagtctactcacttttaaggagctactgattgttttatgttagtcagtttcaatttagtaaaacattgttgagcctgtgggcagacactgtcctgggtactatgcatggaaagatgaataagaatgttcatattgtgtagttactatgttttctaaaaatagtcatttttctctggccatccttgtgggcgtagcagaaggaagaataaaagcccttccaggagagaataagacaaattaacaaacagaatatgaagagtattattagagagcagattagctgatgagctggtggacattgttctgaatgtacaaaaaaaaatcgccagggaaattatcagaataaatttgtcagaagatataggaaaaatgataatgagtgtgttactccttgactactttattttacacatgtatgttgcttgaaaaatacttcaactgtgacatttagtttttaaatgttatccatgattcattgctaaaacgactattcttttactataaaagtgagttcagttcatatattagggttaattttatataatatggcacagagggctactgtgtctgttactcagtgtaaatcttggtattgctttttaaataatgaattcataatgcaaaatatgcaaaaataaaaccagcaatattatttttgtaaaaattttgatgttgtcttggttgtgaacttattaacttctaatatttgaaatgtatttttaacaggtagaagtataggtacagataatgtgtgtagagatagactggaaaagaccatcattctttttactaaagtggtaagttttttaaaaacttgttttctcaaatataatacacatattcagatttacaaaggaaaatgatatttttataaccatacattttcactttagtgtaaggaaacctatgttctgactccttatagg

SEQ ID NO: 33698 - DNA, 2300 bp, Homo sapien
ggaaaaaaaaattagaccagagtggtggcgcatacctgtagtcccaactcttcaggaatctgaggcaggaggattgtttgagcccaggaggttgaggctgccgtgtgccatgatgatgccactgcgttctagcctggattacaaagcaaaacccgtctcttaaaaaaaaaaaaaaaaaaattaaagattcccaacattaagtcagacagataagaaactgtttataagaaactaagaactatattcatattaaattatgacgtttaatctgagttttttttcttttttctttttctttttttttttttttgagacagaatctcactctgttgcccaggctggagtgcactggtgcatctcggctcactgcaagctccgccccctgggttcatgccattctcctgcctcagcctcccgagtagctgggaatacaggcgcccgccaccacgcccagctaattttttgtttatttagtagagacggggtttcatcttgttagccaggttggtctcgatctcctgacctcgtgagccacccgcctcggcctccctaagtgctgggattacaggcgtgagccactgtgcctggccttttcttttgtttaacttggggtcggaaaacaaattttttcttcatcttttagtacattgcttgggaaataattgtcattacacaaatagaaaatgtttgtcaaactgaaagctgccattcttaagctagaattttttccttctatatatttcattagtaaagtttcttttggtatgttatttctcttaccacttcatgtgattctcagagactagcccattgctttcagttataggatacttttacaacgcatttattaatatgacaaatgttttgccgttaccagatgtgatgtttgagctcttctttttaagatttgcacttacataatttacataattagctatttgtcttctaaaaatgttatctttaatgtttttagattcataaacatacagttgttaaccagagagattactggtgattttaaaactttaaaaaatttcattcctttaatttttaaaagtttcttttatggagaagtttaaacatattaaaaaatagaataatataatgagcccttcatgataagctagtttattagttatcaactcatggctactttagcttcctgtaaacatctcccagtgttgatggttatctgagatgacacatcctctgaccatatttcagtgtgtatatttataatgttccttttaaaacaccacacaataccttaaaaatttaattaaaaaatttaaatattgtgaacgatctagtgattaaattcctttttaaaatttaaataaaaaattattttaaaaaattttttgtgggtacatagtaggtgtacatatttatggggtacatgagatgttttgataccagcatgcaatgtgaaatgattcagtacttttaagaaccaaacaaatcatttttttaaatgtagctaatgctaatttctgttaccgcttgtgtttgttaagagaaaggctactttatttggcaaattggagttcctgtttttgcttattatatcattgctaagaaaatacataatagctactcgggaggctgaagcaggggaatcgcttgaacctgggaggtggaggttgcagtgagccgaaatcacaccactgcactccagcctggtgacagagtgagactgtgtctcaaaaaaaaaagaatcttgggtagtcagccatttatagtactgagctataaatgagtggctacagaatgctttttaaatttaaggtatgattaatttaaaatgtacactttgcttgccatagttttaagtttttgaatgcgtaatgacaaataattgaaatgaaatcaactttcttttattaattataattcgattttgttttcctttgtgttggttataaaaaaatggtaaccttactttttttttttaacaaatcaaaagttggaaacattttcaaagttttagaattttaagattaagtatttgctttattaaagaattagtcaatatagtatgcaactgttttgatgagaaatttgtatttttccctctccagccatgcactgaagtattatttatagatatattccatgaatataatcagactcttactcctgtacttctagaaatgatgcaaacacttcaaggtaaggcatattttgtgattaactttgagttaatctctttaacgtttagttaagaaatagtctgagtgcctacaatgcatactgtactgtttcctgggtcatataataaatatgaatttgagaaaaac

SEQ ID NO: 33699 - DNA, 2300 bp, Homo sapien
agaaaaagcatggtggcatgcacctgcagtcctagctactcaagaggctgagggaagaggatcacttgagactgggaggtcgatgctgtggtgagctgtactcacattgttgcactccaacccagccgacagagcaagactgtgtctcaaaagaatacatgcatccatacagatgatgtatatttaaaagagctaatggaacaattgctctgttatttatacattcttgtttttgtatggggagaatctgaatggaaaagagaatagttgtgtattaataccagaagcatgagatgatttgaagacaaaggcagtgtaaaagaaggttcagcaacaagaatgagaggaaaacagctcaatgagtcaatttcctggaaagaaatagaagactaatttaagaggttgagcgtagtgttcagtaatagttgtaatgaacattagtaatcagaaaaggataatgaggaatcattgttgatcagttgtctctaagaacagcaactcctaaatgaacagaaagactaaactttgttttgctggagataggaatttttttttaaaccattcaacctgagagttacagtgtactatttatatttgcttgttttgttgaagtcagtttagtttccttcagtttttagaatgtgagaagtgagattttattttgtcatttttccttaatacagtttcctaaaaattttacctttgcatcctaataagtgttctttactgctttggatatttttggcataaagaacaaaattaattcatactctggttatattactttgtgggttttttctctttaattttatttttatttcaaaggaccctttctctgaatttttcccaagaaattgaaaaatccatgggacaagcttcatatcaccttgtatattattggaagtactaaacaaaatggacctgagaaacatagcccctacctcaaattcatatcatttctgtcacttgttttgttttccatttttaatgcataaaatagcaataacagtaaccagccataatggataggtgtaagaatcataagtcattttgataacgatctgctatccagtatgcattgctgaatttttagtcatagaaagataatgctaggtattatttcagctttctaatatggacataattcatattatttctaaagtaattgttgatgtgaaatgaaactgctttaatatcaaaggagagttgtatacaattatataacttgatattttaggaatattatcaggctattagtaatattaataaaagtcagaattagaaagcttaagcaactagcttaaagttaatgaaagaaagttaatgactgaacaatatataatataaacaatttatatccgattctttaaattcttgaaaaatgacgttaaaaaattctccatttttgttctaaaagattcaaactgatacagatatatatagggcgaaacatcgcctcttttactctccccaatttttcttgcaaagataacctatgtcagtaagttggtatgcagcttcttaacatcttataacccaacacaaccaattagtgcgttactactaattagtagcttactaccaattagtacctcacgtattaagtagtactcagtattttttgcaaccaaaaatattttgaaaattttaaaaagagcactggaggataatataacaacatttatgttcattctaaattttttcccctatttttattaaaggaataaagcataaagtttaagtcttcaatgcgtatttaacacaacataaatattttattcattaaaaagtttacaaaaaattgtattactcgatatacatcttatttgaactagccttttccattcagtagctatgttgtttgatagctagagtctgttgattgatatttgggttctgaataactaatgttttcaagtatcctttaaaaactattatttttatattataggagatatttcaatgtgtatattaggaaaactctaactgcattctgaaaaaataagttcctgagatttccgttcagcaatacttttgaaacacagataaaattacttcctgtctcttagcttcctgtatccatggcaacctctgttttacacattgactgtaaaggaaccaatgtgaagagtggtgtttcctgagcaaacggtgacttaaaaaaaaaaaaaaaaaagtggtggggtggaggtcagcagtgccacagaacaaactggagttaagaaatgtcgttcttcagatttaaaaagaaaacctttactgaatcagctgagtgttaataatacgaatttccttttctt

SEQ ID NO: 33700 - DNA, 2300 bp, Homo sapien
tcaaaggagatcattttggagctttaagacttgactgccctgctggatttcagactgtagcccctttgttttggccaatttctcccatttggaaaggttgtatttacccagtgcccatacctcccttgtatctaggaagtaagtagcttgattttgtttctacaggctcataggaggaacaaacttgcctcgtgtcagataagacattgaactatggacttttgagttaatgctgaaacgagttaagactttggaggactgtcgggaagacatgattggttttgaaatgtgaggactgtagatttgggaggggctaggggcagaacaatatggtttggctgtgtgcccacccaaataccaccttaaattataactcccacaattcccacatgttgtgggaggaaccccgggggagatgattgaattatgggggcagatcttccctgtgctgttctcctgacagtgaatgagtctcacaagatataatggttttaaaaatggaagtttccctgcacaagcttcactcttgtctgctgccatttgagacgtgactttttcctccttgtcttctgccatgattgtgaggctttcccagccactacagtggaactgtaagtccattaaacctctttcttttttaaattgcccagtcttggatatgtctttaccaacagcatgaaaatggactaatacaatccccaacgttagacgtggggcctaatggaagatgtttgggtcatgagggcagatcccttgtgaatagacagatatcaaccattaagagtgggtgggttctcattctattcattcctacaaaagctggccattaaaaagagtctggcacattccccctacccttttcttcctctcctgccatgtgacttctgcacacactggcttcatgatagaaggtgaaaaccttctatcatgagtagaagcagcttaaagacctcaccagaatccaatagatatgagtaccatacttcttgtatttacccaacgcctttacccattttatctaggaggtaactaacttgcttttgattttacaggctcataggtagaagggacttgccttgtcttggatgagactttggactatggacttttgagttaatgctgaaatgagttaagagtttgggggactgttggcaaggcatgattggttttgaaatgtgaggacatgagatttgggaggagccaggggcagaatgatatggtttggctctgtccccacccaaatttcatcttgatttcccacgtgttgtgggagggaccaaatgggaggtaattgaatcatggggtaggtctttcccatgctgttctcgtgacagtaaataagtctcatgaaatttgatggttttaaaaagaggagctcccctgagcaagttctctctctttttgcctcccaccatccatgtaagatgagacttgctcctccttgccttccaccatgattgtgaggcctccccaaccatgtggaactgtaagtccatgaaacctctttcttttgtaaattgcccagtctcaggtatgtctttatcagcagtataagaacagactaatacacctggcaacctcttcctattatgtgacacactctattcctcttctgctcatatcccaggtgcctctgttgaaaaaatacagaaaggggatcccaagttctgctttattcttggcttccatttgacttgggaacctccacatcattgctacaccaccagacgtgcaaacctctccattgttgccctccctcttaaccatatgatctttctccaattctcaacttctctgttcaagagacttaaagagcagatgagcaagtccactgccaagcatatacccaacaggaaaacaaggtgccaacctgctctttcatgacatctgatatgctttgacactgggtccccacccaaatcttatctcggatggtaattctcacatgtcaagggagggatctggtggagagcgactggatgatgggggtggtattgcccatactgttctcatgatcatgagtgagttctcacaagagctgatggttttaaagtagggcacttcctctctctctctctctctctctctctctctcctgctgccatgtaagacgtgccttgcttccccttcaccttccaccatgattgtaagtttcctgaggcctctccagctatgcaaaactgtgagtcaattaaaccttttgtcgttataaattacccagtctcacgtagtatatttatagcagtgtgaaaatggactgatacagattttggtaccaggagtggttccagaggaacaga

SEQ ID NO: 33701 - DNA, 2300 bp, Homo sapien
actgctcatgtgaataaataaaaagaaaacatagtactctgattaagataattccaaaactttttcacatttcaaatttgcaatctttacattacactgtaagaaaaaacttatttaaaagaaatgtaattgtatactgctcttgtgaatacagataaagaaaacatagtactctgattaactccaaaacttttttacatttcaaattttcaatctttgagtacctgttcaactgagtcgataatgacatgtttttccacagagaatcatcctctgtgctaccaagaacatagaagacagcacttttaaaaaggtgttccattagactgttgtctggttgtcaaaaagcagcaaatttcagacacactctgaattaatagatattaaaatgtgaggtacagtgatattctttgaattgatgaaatattacatatactattgactgagcataaccatggacactctcataactttgtaaaatgaccagtctacgggaatgtccgatcagccatctatgaggctagaaataaatggagcaaagcatcaagaccagagtctacctaggacaagaacatttcatggcacagagtagatgctgaataaatcatttttgaatgaatgagtcccgattctacagcagaatttagcattgtctcatactaatttactggtatcagtagttacttcaataacccatgtattaactagaaaaaacattgacttgccctggatatacattgaatactctcttcattttaaataagcaatatctttgactattcacaaatactgtaaagagtttgaatacacaaaagcaatggcgatgaccaagtgagcttttgcaatgtgtgaaggtcatgcagcgatacagcatggatatgtgtatatgcttggattaaaatgttatacatagactctcatgctctaccaacttagctagcctatgaatcagcagcaaaactaactaaataactagtaatctgactaaagtgggctaaagacttgaatagacctttctccaaggagacatataaatagccataaggtgtgtaaaaagatgctcaatgtcactaatcagggaaatgcaaattcaaaccacaatgatatatcatctcacacctttaggatagctattgttttaaaaaatagaaaaaaatagtgttgctgagtatgtggagaaattggaacccttgtacactgttggcgataatgcaaaatgatgtggtatatatacacaatggaatattattcaacttttaaaaaataggacattttgccatacaatacacatggataaacttgaaggacataatgctaaatgaaatgtcaggcaaagagagacaaatactgcctgattccacttatatgaggaatctaaaatagtcaaacttatagaaacagagagtcaaatggtggttgccaggggcagctgggagaaggaggaggaaaggtgagttggtaatcagtaggtaacaatgtacagttatgcaagatgaatcagtcctggaaatctgccgtataccattttatctataattaataatactgtacttctacatctgctaagaggatagatctcatgttaagtgtccttgccataacaaaaaaaagttggttaaataaaaagggaaataagagcctgctttaagcttataacacaaatacttgacatatatccgtatatgaataatttacttgattatatattttttgagaatggcttacctgtttcatcaaatagtataattataacaattcttttgtaattaagaacagaaacatctttgtgattctttgtcttcctttgagctttattgattgttatagcctctgagattttatactggcgtgcaacaataatccttaggctatctgctaacatttgtcatagcaatgtgatttgatttcaagtacaatcaaagcccatatgttgatttgctaatgtaataaaagtcaccctggtactgctgtattagtccatttacatgctgctgataaagacatacccaagactgggtaatttataaagaaaaagaggtttaatggactcacagttccatgtggttggggaggtctcatgatcatggtggaaggtgaaggtcacatcttacatggcagcaggcaagagagaatgagaaccaagtgaaaggagattcctcttataaaaccatcggatctcatgagacttactcagtaccatgagaacagtatggggaaaccaccgccacgattcaattatctctcaccaggtccatcccacaacatgtgggaattatgattgctacaattcaagatgagat

SEQ ID NO: 33702 - DNA, 2300 bp, Homo sapien
ctttaccaatgctcaaatgtgattaaatttgtttttcttgttaaaggaaacagcttagaacaaacccttgtaagtatctttattttcagtgatttaacatttccaaatgttaaatcatttggaaaatgcaatactattcgtttctccaacaaaaggtaaatttatgtcagttccaaagttcaggttatgacagcacaaaaccaacacaggtgaaagtgttagcctagctttattaaaatggcattcccagttagaacttgtgaatgacagatacttcaggctttcgaaggaagctaaaacatataataggcctgatatataaggttcagagcaaaagagggcactaaaataaatttttaaagaaaataggaaggagacaaaactcaatactaccttgtcttttaataactgtcttcctctttctaaaagttgttgtatttcctcaatacttgcttcatttctgcataagggtttccagatggcactctaaaacatttgccagaaggtggcgacataaaacctcattgcttagaactgtcccaggtgctgaacccagtttctgagattaagagaggctagccggctagcgaaccgggattccaccaagtttcccccagaggtttgcaggctctggtaagaagtgcaaaaggccatgtgaaatgccaggcttcacttagaacacatatgcaaaatatttccatccctgaatttactagccacaaagctatgggaagtggcagtgtcactgaaattacaagtgtagtagtgatggaaaagtgtgtgtgtgtttagaatatatatcacactgagttttgttcttcatttcgagatgcagttgtttacctctccttgtcctttgacacgtcctttataatttcgttctctcccggttccccaacgttaaaaaaaaagtcacaggcaatattctccctgagggagtaaggctggactgttagatgataacggaggtaccgttttgttgttgttgtcgtcgttgttcgtttgtttttggagacggagtctcgctctgtcgcccaggctggagtgcaatggcgcgagaacggaggtagctttttaaaaaggaagacacactcggtcttcttccatcaattagcaataattgggagactgacccaggactgttcaccttcccattcaggctccctatgcttccttttctcatctcctattgccactctgggatgctgacacgatttaagaatttggcagataatatgaggcaaggagtagttggaattccctcccccaagtttttccaaccccagttttgctgggttggaggcggagtttatttgttacaaccttggtctgaccggcagggatctggtgtgtgtaagtgagttctgagtctctgttgacaaaaagagactcgaatgcaaagacgctgagctagagggagaggagggcggggacccagaggaaagaggcactcctcggggttggggaagtattaggaggggagggttagagtgggagggaaggagcctggctttcgaagcgactcacagagggataaataaagggaagtgaggaggaagagggagactgaaagggaaggcaggtggggagaagggggacgaaagaggcagaagagagagaagagaggaggagagagggggagagagggaaggaaggaaatagggagaggagggtcacagagtgaccgtggaggatggggcttctcggttctagatatttctgggattggagactgtttgctagtggggagactccagctccggcagccagttcgggagcggcaaagtaaaatggacagcgacagacagacgttccagccacctctccgccgccgggagatcctggagctgctttcaggccaactccagtttcccagctggagcttctgaacgcgctggactgcgagagcccagggagcgcctgaaagctgctcctcggagatacccttcgccgaagcagtaagaacttcctgcttgggtctctgcattcccttcctccgaaacttcccaggagaagggcggaagaccccaggggaaggggcgaggcgaatcttcgcgctgctttttcttccctcccccttcccgcgccgggcgcgcaggcatggatgtgctcagccctggtcagggcaacaacaccacatcaccaccggctccctttgagaccggcggcaacactactggtatctccgacgtgaccgtcagctaccaagtgatcacctctctgctgctgggcacgctcatcttctgcgcggtgctgggcaatgcgtgcgtggtggctgccatcgccttggagcgctccct

SEQ ID NO: 33703 - DNA, 2300 bp, Homo sapien
tttccagggtggttccctcccggaaaggaaggtcaagtctctctcaggcttcaaagctctctgacatttcttgccatctcatctttctgattctaggtggagaaagttttctgcttttaaagattcatgtgattaggctgggcctacgtaggtaatccgaaatagtctccctatttgggtcagtcacttttatgacatcagtaaagtcccttttctatatactgtaacatctttgcaggatccagagattagaatgtggacattttgggggagccattctgcctaccacagttgttgcgggtgtcaccttcacttctcttttctatcagattctctgtctaaccactttgttatagaatacatcctccaattgcttcctgagaaagaatgcatgaaaatactatttaaacctttgtatatttgaaaatgtctttttaaacctcatacttcatcaatttcaaaattggaaatcatttttttctcagaatttatcttttatttatgtttctgttgagaatccaatgccattctgatttctaaatcttcataaatcacctcctattttttcctccatgaaagttaagatctctctgactcatgtggtttgaaatttcacaacttggttatagaaaatttttatccattaaactgagagctcatgtgcttctgtcctttagctctgagaactgttgtcctcgttttctttggtaattatctttcttctctttgttctactagctgttagatattccacctttccttgcctaactgccctggctagtgcctccactataatgttgaatagaagtagcaacaattgacatccttgtcttattcctgattttaggtgaaaatgttcattctttcaagattaagtatgatgttaattatggatttttcagaggctctttattaggttgaagaagtttccttttattcctagttgaagtgtttatatcaagaaagggtgttagattttgtcaattgcttttccttcatcttttgagatgatcatgtggtttttacatttagtctatttaaagtagtgtgttacattaattttgtatgtcacaccaaacttgcattcctgagataaatcctacttggtcatgttgtataattttttaaaatgttgctgggtttggcttgctagtattttgttgaggatttttatgttactatgcataaggtatattggtctgtagttttctcgtgatgtctttcattttgttctttatttccttgtatttccagatgggaagtcactgcatacagccctaatcttaggacaagtttccaagtaagccacttcaggcaaataaaaatttctgtatctagcagagaaacaaagctgtatattttttttgaggttccctcctagctcccttccctctcctcaagccaactaataaaacttgctttttatattccgaatcttatttatagtcgtttgatcatctatgaggcacctgcaagtcaacatttactgcacgcggccccctcactccctaaataagcacttttgatttaccgccagtcatcaactcacctcccaactgcaatttgtcaagagtagtgtcaggtgcactttagtggttaatctccttgcacatcggtggaactttaggcacaagaaggtaagcaacgaagatagtgatatacgaagggaaaactaaacccaggtagcgttgccagcttaaaagtcctaggcatggggatgggtggatgggacgccggcctaagattttagcagggaacagacccagtagttggcttggatctcttaactccagaaaaggccgagtgaggacaagggagaccacagggataatttctgtggctctggtaaggggatgacaagggagaaaaactttcccacggttccgtctggcccgcggcgcttgtctgcctgcgcggggtcaaagcccggcgccgcccacgcgcggctcgggtgggaacccgcagacgtggggcgagcagggccgctggctgtggcgggcgagcgccggggcgccacgtccgaggccgcggggtcggggctgcaggcacagctcgagcgctttccgcggggtttggctcctgtcgcttcccgtctcgccgaaccggcatcgccgccgccggagccgcagcgagtcctcagagcctggctgctggcggccgggagcgccgggacggggcgcgaagccggaggctccgggacgtggatacaggtaaaggccggcgggtcggagtcgggcggggcgcggcggcggcgcctctcggagggacctggcctcggccgggccctacccagccgcggt

SEQ ID NO: 33704 - DNA, 2300 bp, Homo sapien
aactggaagagaaacatagggcaaggtatgggaaaaggacatggaacttccatgctctttcctggtgtaccacccttccagcacctagatgtcttccacaacccagaagctccccacactctattgttgtttaggagttttacagaggtttctttatgtaggcatgattgattaaataattggccattggtgaggaacgcagtcactagctcctctcctatcccctgagattgggggatgaggctgaaagttgcaagcaactaatcaaggcttggtctttctggtgacaagatggcttatcataataactcaggcaatttctaagggttttaggagttctgccctagggactggggacaaagaccaaataactctcttattatagtaccccattatatttacttgtcttgtagaaaaggttgtaaagccaccctccttaggatattaaccttcctggctatttcaggctttctctttctatgtactctccatatccctttaacagactgaccaggaacctctaatctgttcttattaggattactaatacataactagttttcctatgggagacccctttatctccctctccaaacaaatcattcaggagaacaagcatccttagagccttagagttgaatgccacaacactctctcttcctcccagaagaaccttaggaagatgtcagtgggaagggtgaacttaaatggctgagggcctcacccccactcctttcacacaagaatcatccccgattttctgggccacctctgttggcctctgggttactgatatcccataagtgagaagaaggtcattttgagtgtccagggagatctcttggctcttatttgttcaagtctccggaagggaactctaggagctgagtcctgagaccctgcaatgcaagaccaagagctttactacttgaaatgggatggggatgaggcccaatctgagtgaatgcctctgtgcattctgcctcactggctctcctctttccccctccatgaacaaggacaaaataaaaacaaaacaactcagggaaacaaagctctccttttaggttatcaagaggtcttccatttggagcaaaacctcactccctcctgtggcccctgtctcagtctcagttggtgagggcctcaagcccacactggcttatttgaaatccatgtttaggtcccagcatgtggcatgtgctccactctgatgacacttttcgtttctaataatagagcagatgaagtaatattgcaattgatgttcccggggatttgattggataagtgcataaactgtggagggggaagggggttgcatggacagatcacattagtattcccgtcctatcaatgtgcgggcccgcgaacaacgtcagccggaccgattctctgcgtctgccagtcccgccacagattcatctgggatcttcaaacagacaagcccttagagacgagggatcaaggcagccgattagagccaattgcttgctttggggacggccagtccttccaggcctggcgacagtggagggaggggaaagacgaaccgagtgccgctgcgggaagacactgaagcaagagcgacacccctttccgccccccaccttgcagcgcaggctttgaaagctgctcccccacctgaatggaaactcggaaccgccgggcggcgcgttccttctcgcccagccttgcaatccatgccgagaggaaggcagtgcgagcccgcgccagcgcccagctcccgggacagggtcggcaatgctgctgagcagaacttgatcgcgctccttcctcgctgctagtggaagcgatgctgcacggcacagctagcgcttccccggctctccttcaagctgaaggttaccgacccgcgcagccagccccagcactgtgagctgcgcgcctcaggtccgggctccggctgcttggcggcggcgcccagggcaacaaccgggccgcccgcgccggggcgcactgcaccagcggcttcggcttggtggatgtgtatgcatgagttctgcaccgaatgggcgcaaaaagcgccccagccggtccacccgctcctcgatcttccagatcagcaagcccccgctgcagagcggagattgggagcgcaggggcagcggctccgagagcgcccacaaaacccaacgagccctggacgactgcaagatggtgggtgaaaactgcgcctctttttttttttttttaattgagagggggtggggggagtcatgtatgttaatcatttgcctgagtgccagccactcccccaccctcagctcctcaatgcc

SEQ ID NO: 33705 - DNA, 2300 bp, Homo sapien
ttaatactcatttcacagtgcagttgtgaatattaaatgagatagaatacaatgtttgatatagtatctgacatatttgacttataaatattagtcaatattagctacagttactatctacttaatttctcacttacctcccatttgtatttgagttctatccacagaaaacatctttcattctgacatatttgacacataaatattagtcaatattagctacagctactacctctgtacttaatttctcacttatctcccatctgtatttgagttccatccatagaaaacatctttcatttcctcttttcacatatttcctcttcctttacgtatccagttcctccgactgcagtctcctctcccttcaagccacccctcctacaattcagatctcctcctaagtgctacctcctttggaaagtccttctgcccatcctgtatgtgtttggtgcccttactttgtgctaaggtcttgtattttccttgccatggcacttgtcccactttctgtaaatttctctctcttcactgctaaattctaagttctgtgtgaagcgtaaccatgtctaccttgctcaccactgtatttccaatgcccagtaccagtgcctggcacacagtaggcttaataaagagtgtacatttcctctctcacagctccagatgtactcctccgcaaacttcagttagtacaaaagcacagtgttccaataacagctatctgtagaaggaggttcaaaaaggctgccacagaataaagaacctggtcaaataatactgggaagtgcaggtttaaacaaagttagggttctgaaccatagtaattctatagttcatagtaattctatagcaattcatagtattctattctaatagaatagaatcttttctattactaaagtgcgctgggaatttccaagttgggaggtggggtggagaagtgtgtatttctgaaaatgtctcctgcaatcagtgttctgcagtggcaaagctggtttgaggagatgctttccgctactagaacttccaagtaagctggtagttgaggacgagaaaatcttttaagtaattattctgcagagttcaccgtttttaggtcagtaacttctggacatagaatttgagagttagaagaaatcttatatataattcaacaaagctccttctttttataaggaaactgaggcccagaagcacaaagcgaccaatctatggccacggagcagctacatacaacaggaagagctaggagtagaacccgcacacccggtgggtcctagcgacttctaagacaaacgatgcctccggttacctgggtcggccaagtgttcccacttcaagttttagttttaagccataccacagttaaggtagtttttctcggccgcttgcccccttaggcctacagttacagtctctccctcctccctcccttccacaatacactttccctgtaatcccaagcagctggggcttggctcctggggggaagatagttattttctttccttcagagtttatgtttggagtgtaaactttttcatgtaaacaaaacaaacctgtgaattttaaggcctccgcctaaatccccatgggcgctgctccgtacacgccgcaccctaccctaccctcccttgcgctcccttcggagctcggacgcagaggccctgtaattgctccttacctgggactgccatgacggtggtaagaggggtaactcgagcctctggctttcgaaaaggcgcttgcttcccgccagctgtgagaacaaggcacagtcaaagcggcgttttccttcccccagcgcagcagcaccctcgctacggtcgggaagggcctgtacgcctctagcgacggcagaaccagtagatgcggatgcagtttccggacgagtcatattgcagaagacacatggtccgaaccattactgatagttttggagggggagttagtttgatctgcacacgagagtagtgtaaacaccgccaacacttatgaagtgtcccttctaatattgtaatacaaataacataaataacattaagctatggtaactttacggacttttctcgttccctggagtacattggaataacccttctcagggttagcggtgctcgggtccggtaacaacatggcggcgtccgtgaggggctcctttgggcaggggtagtgtttggtgtccctgtcttgcgtgatattgacaaactgaagctttcctgcaccactggacttaaggaagagtgtactcgtaggcggacagctttagtggccggccggccgctctcatcccccgt

SEQ ID NO: 33706 - DNA, 2300 bp, Homo sapien
aaactaagaaaaatatagtattaattcatccatccattcatttattcaatacctatctgaactccttctatcatgtatcaagtactgttccagatgcttgtctctgcccttatgttccttacattctatagggggaaggtaggaggaaggatacagtaatactaaataattaataaataccatgaaaaaaactaaaaaggttaagggggccagagactgctgggatgcaaggcatgattgaagtttgctatttcatagaaagtagataagaaagggctctttgctaaggtcaacacttgattagacagaggaacagcaagtgtgaaggccctgtctggcaggatggtaaatctattcaatctctaccagtgtttattaactgggggtgatattgccctcaagaaacatttggaaataggaggaggtaggtattttgggttttcacattgatattaaataagataggtgaggggtgggatggacatactaatctacaatgcccaggagaagttcaaacaaagaattgaaagaattggtctgcccataaaatatccattacatttttgctgggaattacagcatttttggtttcacttttaaattgctctcattacattatcaaatgtcaatgaataaaagactgtataaattatttatgatgcaatcatgtaacaaacaggatggtatgttgtgtaaatttagcttatcttaattcaactatatacttccaatctcattttctccaatatgctgattcatcaaatttcatatgtgatataagctaggtctcaatttaagaattcaggtgacacttattccacaacagactcttctgccttgtacagcatacaaacatcttggatgggaattggcatacattagccatcaaatcaatcagagaaacctttccccattctaatgtggtaatagtccccatttcccactttctctgactgacagtcatctcaggttttaaaaccagctcaaaagatatcttttccatgaggcttttcctaacttccccagttgttcactactcagtaccgccatagcaacctggtctcttctccacaagcacgcttatcagacatacaggcttttgtttacctgtctgtctcacaaactaaactataagcttttccgggaaaacaactaccttacccatccatctttgtatctccggcgcctagtacagtgcccagtgcctcgcaggcgttcaattaatgattgtagaagaaatggagaatgaatgaccttagttaagcaaagaatatatcaaactcaaaaatgtctgtttaaaaacctaagaccccagaaatcggctgcatgagttgggttaaagcattaaataggaccggaatgctggtaggtagagaaatctccacttgacttcttcaagtacatcctgaaaagtaccaacatcagtgtttcgatgcaacattgtccacatgcaggagtaaagacaacacttctcgtggtctcttcctaccacgagatcctgaaacccactccccaccccaaatccgggaaatctcactttggggatcccaggaccccaagttccctagatgaggctctcaccttcccattcgtgggaggctcctggatgtagatgttgctcatcttggtcagtacaaaggactctgctccttacgggggatgagagcggccggccggccactaaagctgtccgcctacgagtacactcttccttaagtccagtggtgcaggaaagcttcagtttgtcaatatcacgcaagacagggacaccaaacactacccctgcccaaaggagcccctcacggacgccgccatgttgttaccggacccgagcaccgctaaccctgagaagggttattccaatgtactccagggaacgagaaaagtccgtaaagttaccatagcttaatgttatttatgttatttgtattacaatattagaagggacacttcataagtgttggcggtgtttacactactctcgtgtgcagatcaaactaactccccctccaaaactatcagtaatggttcggaccatgtgtcttctgcaatatgactcgtccggaaactgcatccgcatctactggttctgccgtcgctagaggcgtacaggcccttcccgaccgtagcgagggtgctgctgcgctgggggaaggaaaacgccgctttgactgtgccttgttctcacagctggcgggaagcaagcgccttttcgaaagccagaggctcgagttacccctcttaccaccgtcatggcagtcccaggtaaggagcaattacagggcctctgcgtccgagct

SEQ ID NO: 33707 - DNA, 2300 bp, Homo sapien
ccaattattcacagtattcttgacccaatcaacttggagacagaatctgttggaaaaatttcattactctgtttagacacaggatggcactctttgaataagtaattagccaaagtccactcccactaagtaagctcctctacaagctgctactttgtagggcagtttatcttagttgagggtaaaatcttttcagagcttatatagatgtttactgctcatacctttattttttgtgtgtgtgctggctgtccctatttactgccagtacttgaaaaattaaggaaggttaaggttcaacactatttaaatagtcatttgatgcctacttttcttatttttggtgtttacaattattgctatattttgctacctcatgtatttcacatatatgtacacacatatatatacacatacaaatacgcacacatacatacatacatatgaatcatctttatttaaaactcaatgcccactattgaacagatttctacattttaaatggcttttagccagatactactgattaaggtcaggatgaggactatttactctgtggacagatgctttccactttcaacccttgaagaagaattgaaataactgtattcttggacgttctcagtctgattcatgcctccttttagccaactattcatagattcaccagaagaattacacctactacctccggcgtaggaagaaaaaaaaaaatcaaatgggcaataatgttagcagaagcttgatatttaagagctggtattcagaaagatcatccttcctacccccttccctccggtccagttctcctttctggttctcaccatcggaaattgacttggcattaactaagggctggaatttcaaggcgtcaattttcccctgcccccaacctcggaaactcttaaacagctccctattctacactcaatggtagagacagataaatgatgcagcagattacaccgttgaaaggcaacatttgtcctgagctattttcacattttttcctgtttccgatgtatgtgccagactttgtttgcttgcttaggacatggaaaacactgggcattttctccccagcggctttcattctcagcaaatgaaagtgaaagtgctacattgtagcggtattttatccttaaagtctggactggcagcttgtgtgtaggggggagggagggtgggattgggaaggttgaagaaccagttttgaggttttgtttgtttatcttgagatcgcagcagggttcctgtttttttcccttcctttttttttttggtggtggggtcctacttcggatttattttcatttgggcagtcattgaagtttcattcaatggactgacttaaaaaaatacactccacttgtggcttttcccggttgcactttaaaacaccatccagtctcaccctcatctggaaataatgcaagcttctctcttccttcccccgctccctcctcccctactttttttttttcttcttcttcttcttttaaagctccacataacctgaagtcgataatcaaatggaaaatgtgctggtattagtttactttagtttactttcccttttggtgctaaccttacttgctgaagtatgtataaaacacaggcattttgtacacttgtagctactgagtcttgtgcctgctgcacgaatctaagctttaagtttcctcagaggcactgtttgcgtgcaagttttaacattttgattgtgtggattttaaaaataaaattacacggagaatgacaccagagatcttaacagtgacattagtccatctaaagtcattcatccttctccctcccccttcatttttccaagaaacaactaatagcaaaccaggctagaatttctaagagagtttagaggaggaggaggaaaagaggcggaatgagataggacagagaggttagagaggccagaatttctctcattcacagtgtggaaaagttgacattgtctaagcccttctgaatggctggtagttggttaccccgattgtacctctacctcccctccccctccacgtgacgacccaggacacatgcgcacccgacgcagcccaggcacatctgcagactgacgtcagtgtgctctgcctccgaggaaaagctgccaaaattttctcctgctgcaattcaagttggctgggggccggtagtgagatctagggctacttcaacaaaactttgctgcccttcctgctcctcttgtcttcttttctcctgataccttttgatgctctgcacatgttatttgcatagcaaaggcactaagctttccagga

SEQ ID NO: 33708 - DNA, 2300 bp, Homo sapien
tcacctgctatacccataagatacagtttaagttcacaaagccaaaatcagtcatcatgaattttagaatatttttaagcgaaaaagtcaaacataaatatttctttactgaccaccaaaatacattatcaatatgcaaaagtaatgcaaaactctgcacatgtggtgggggcggagggtgagggataaatattcaacaaattatctggcttggcgatttaatgtggcagtagaataaaaacatatagaaacatttaagagtttgctctctaccgcttgaggatgcaagatgtaagctgtatgtaacctggaagagggtcatcaacagaaccagaaaatgatggcacccagatcttgaatctccagcctctagacctgtgagaaataaatttcagttgtttaattaaaacacacacacacacacacacacttaagagttgaacttttcccgttcccacattttgtatccttaaacctatcttcctggaaagggaacaagtcaactttttgaggtccccagttaggactacaatacttaatcatttattgaagaaaaacagtatctctttatttagggataatactatacttaaagaaactcgtactattaattgggaaaagattaatatacatgaaataagcaaaaaatacccacataattctaaaatacattcatttattcaacaaatatgttaatgtgtgccattggtcagacactggctttagctgtgtagatgaaaaagtctttgtacttgtagagcttccattctcatgcagacaatataaatgaatggataactaaatacatgatatgatttcaggtagtcagaagtgctatgaaatggtaaagtatacaacactgcctgcaagtactatcggaattcaggatagggaagcttagaaaaaccaacccggaaggaattagtccataataatgcttaataaatgttaactagctacattattattatcattatcattatcatcttcatcctcattattgcattggtctctgaaagatgagaagctgtaaacatgaaggctaaatcgctgtggagatgctttcaagcataaaaacataagagtaggaggcaagaacgaacaagggaaatttgtgagacacaaaagaaagtagtctgatgagagcagagggcagagaagaaatgagacttgctaggtagaatggtcaaataatgggaacctttgaaataaaataaagtgcctactatgggggggcagttccttccctgtacgtggtgcctatctcaaggcaaaagtagagaagagatttacgacgaggattttattaggttggtgcaaaagtaattgcagagaaaaaagaagtgttttacggaggtcattttgacaagctgtatttgattttttaaaaaagagattaagataatacattttatgttatgtgctttttacctaattttttaaaaatgaagaagacagatgaggaggaggagaaagagttcagatgactgctaggagatgaaatcctataccagagagaagaaagaagagtgacccgttctgccctaggtcttttggttatttgaagtagctgcttctccaccccacccccagaaacagtaacaagcactcaccaccttcttcagagagtgtgtgagagaataaaggtcaggagagaaaacatgtttagtgcatctgaaaggaaacccgcgagttaaccacttccttctgtccccacccttccatctttctctaaatattggtgaggttatggagcttgcgttggcgcgcgggaagccgagaagaacgggactcaaagcccggctgggaagtcaggtatctagttggccggcgataagggtttcaccttcaggactggagctccacaagattcaaccgttatatcaacctccccggcccaggtcttaccatcacagcgtcacaaactccaggtcgcctaggcgctgcgcaggaagcgcttgccagccccggacttctgcgcgcgctgcatgcccattggatgtgctcattcccaccccagccaatcccgaaactcgctcggacgctgacagaagactgcgccgctgctttgggattggtagctgagttttgtgtcgcgccttttctgacgatgcgaacaacatggcggcggaaagtggtagcgattttcagcagagacgtagaaggcgccgggacccggaggaaccggaaaaaacagaactcagcgaaagagagctggcagtagcagtggcggtgtcccaggagaacgatgaggagaacgaagagcgctgggttggacctttacctgtggaggcaacact

SEQ ID NO: 33709 - DNA, 2300 bp, Homo sapien
cttaggcaaagcactgtacaccaagcaatgaaacaaaaaaggcgtgattctggttcttacttgtttacagtcttagcagtggagagaaacattcatcaatcacatgaataaatatataattagaaactgcggcaagtgccataaataaaatggttactatggaaacatttaataagaggaccaggaagtaaaaatgataatgcactgtaagggtgtcaatatacaacgttcaaaaaaacagcttcttcaaaatttggatacataaaatttgaaggctacctgtaaattcagtattgatatataactacctcagagttatgatcaaagtgcttcagaaatccagtccagactggagaagtcacaggcttcccagagaagatgatagctaagtgctaaaggttgaccaaaagtcagttcagtggaagagttgagggaaattattcccggtagaaacaccatatctgggtaggaatccagaggaaaaaaaagtacaagaccgattctcgagtgattttagaatgggtggagtacaaagtaaggggttgggagaggaaggtaatggaagatgcactaagaaggtaaggagagatcacatcataaagggctttatatgccatgtgagggagtttgggctttaatgaaaataatgagctgggcgccgtggctcatgcctgtaatcccagcacttttgagaggccgaggcaggcagattacgaggtcaagaaatcaagaccatcctggccaacatggtgaaaccccgtccctactaaaaatacaaaaattagctgggcgtgcgcctgtagccccagctactcgggaggctgaggcaggagaatcgcttgaaccccggagacggaggttgcggtgagccgagatagcgccactgcatgcgctccagcctgggcgacagagcgagactccgtctcaaaaaaaaaaaaaaaaaaaaaaaagagagagaaaataatgacaaatcattgaagttttttaagggaaggtgctaaagtacgatttgagcttagaccacatttaaaatgtcttaaatacttaaggaaaacatttcacagaaaaacaagataacaaaacaacaaagacaagaaaacttaatctaccccttttcccaccccttttatttgataataatttgtgattattcctcgttagtgacaaaaagactcagcccatcgtatcaagagcgtgatttcaaaaccacagacttcgggttttggatgaaaacaaatctgtgatctaggaagcttacgtcattttccctagatgcgaaaatttattagtggaagtgtcagagttgaaattatctttacctaccatgattcgaaataagcaccgccttcctctcgcgccccaacacattaatacattaacaccactcctgaactaaagccttaaagagaactggtacccttttgcatacctaaataagagttcgaaattccaacttcatgtggctgctgtggggagtaaatgagaggagccaaacacataagaataggaaaatgttagttttagcatctgtcataacaaatcaatgatcaaaagtgttagatattatcaaaaagacgttgtactacgcttaaatcactatttcgttaagacatgcaagtatggagtagccagaagtgagaggacggccctctgttctgagggcacaaaactccacacatcatccctcttcggatctggcttgaaccctcctactcagcggacgcagcactccaattcgtcccggtactatgtctgcagctacctttcctcttcttggccagtgttgcctccacaggtaaaggtccaacccagcgctcttcgttctcctcatcgttctcctgggacaccgccactgctactgccagctctctttcgctgagttctgttttttccggttcctccgggtcccggcgccttctacgtctctgctgaaaatcgctaccactttccgccgccatgttgttcgcatcgtcagaaaaggcgcgacacaaaactcagctaccaatcccaaagcagcggcgcagtcttctgtcagcgtccgagcgagtttcgggattggctggggtgggaatgagcacatccaatgggcatgcagcgcgcgcagaagtccggggctggcaagcgcttcctgcgcagcgcctaggcgacctggagtttgtgacgctgtgatggtaagacctgggccggggaggttgatataacggttgaatcttgtggagctccagtcctgaaggtgaaacccttatcgccggccaactagatacctgacttcccagccgggctttgagtcccgttcttct

SEQ ID NO: 33710 - DNA, 2300 bp, Homo sapien
aacttaaacttcaagttaattcacaaactgctcttcaagtattctctacttagcaaaagcacaattcaataaataaaatctcagtcacacaacatgcctaataatgagggctcctttgcatatcagatatgccgtgtacctgtagaataacttcattagtacctaaaggtcatctgaatcaacaaccaccaatattcactgatactaaattgtgggaagaaatgtctcatttgctgtcatataaaaccaacattacctgaataatcataggtgtctacttttcaagatgtgaaaaaaacttcatatattaccttgatcagtaattcataaccctggttgcacattaaaataacttctggtaattcctaaaatatactgatgtcaacctcatcagaactggaggaggagtgcatcagtagtgtactaaaactcctcagtgatcctaatatgtagccaggaatgagaattatcaatctcttagattagagatgctcctgaaggttactctataaaccaatgggatcagttctcccctccatatctttccgtgcacaacagtggaagggaaaaatgagtgccacatatttcaaatgattttttagcaaattgattctggagcatgtatacatggtagaatctcaaacttcaagcataagaaaattcataaactctatcgttaatgcccagctatgacgatgctgcagacttgtgcaaagagttaatagactgtactactaacaggggagggggcagctcacccaataacagatgtctgattacagacgcagtacaagagcgaaaagtacagactttaaagccggtcaacccggggctctgccacacactgtttacctaaacctgggtttcctccctgtaaaatgggaattcacatctacttcataagtagatattaacgagctaaaacacctaacttagtacgtagttacgatgatgatgactcaatttataatactaagctaattaatgtctgttgagtttaactaaaagcagaggacctggagaaaagaccggtctaggtcactgccactggcccgcaagctccttttcacaaatgtcccgatgatgacatgtcatgagcagaagaccaggcaatttcaggccataggagagaaaggatgcagaggacaggacgagacttgtaatgccaaaaggggcccagaggccgcgcatcccacctatcgaagcctgggccgcggcgatgccgccaggtctccaggatgaaccgaagggaggccgatggtggagaatagagcacgcaaggtccctcaccttcactacagctgtcccccggctgccctgccggccactgtctactcccgctccgagcttgtttacaaccagggtagccatcctcgcaggggaagcgccacagaaacagccttcagagtcctcaactgagaggcggggttgagccacctacccagaggcctctgcgcacgccaccggcgcacaggcgcagtaggacactgggcgccgcttagccgactcttactcctcctccccgcaatcgtcgggtggttagttgcacagcctcgcgcatgggcacttttgttatttttcattatgtagtctgcagctgctggaggaaagacaagaaaaaaaaagaagggacaaaacgattaaagttttggggtgaaaactccagatcctttaatgatttttcctctcgaatccaaaccagccagggcgtgaactgagggcggtgagggggtacgggcatctccctgcatgcaacgcggtttttgtataaactacaaatcccagcatgccactctctctctctctcttttttttttttttttttttttttaaaaaaaaaactccggcaacgttggcctttgggaggccgcgtattgttacctaggggtggtttcttttcctgcagtcgcgatgtgtgattgcagatggaaaacaaagtattttatgcctacgtttctaagatagaagaaatggacttgttgaaaagaagccagtttgtaaaggacacagtaggagaatttaaggtaccaccaccagagagaggttgagagtgcgtttgacttttggttttgccaaacgcgaggttttccgtttccttccggggcaagttgaacctgtccagcccccgtaggctgtgggtcaaaagtgccggtcaaaatggaagtgaatccccctaaacaggagcacctgctggcgctaaaaggtaaacttttgcgaacctgattcccccttttctgtttccttgcattccctacttatcgaagcctttgccatgtaggcctcatccttcttaaacactc

SEQ ID NO: 33711 - DNA, 2300 bp, Homo sapien
ggctgcaatttaactgtttttaatagcttctaatttgtataaatcacacgtagcagttaatagaactgttccaaattcccatcggagtagctggtagaggaattatctctgagaatgctgcttcattctttaggaggcaacacggactcttggaaagagaggcaggccttgcgttgaaacactgcctcaatcactagctatgtgatcttggaaaagttacttaaactctgagaattaatatttactccacatacttgaagtgagattgtgagataaagaacacgacaattagttgcttttcttcttttccctcttctccacgagtaacaatccattttaatctccattttagtctagatcatttgctcaggttaagcttacaggtcccatcactgtatcactaaacattacaaagttccacagtaagagacaatctcgctaacacaggcatcattatatgagactgatgagcttctagaaagtctgatgactacatcataatgggaaggataaggcgttcctcaaaatggatgccataagtaaagtaagcgcaattcaattgaacccgaatgtttattgagcatttcctcagctcattcaagaagtcattgttaaccatatattaaggcatccaagaaacaaaaagcgcatttgttgtagtaaaaaacaaataaaataaagctgaaaagatttcaaataaaaggtttccagaaaataggcattaaaaaaattgtcctaaaaaaaaaagtgctgctgttttttcctaaataatgatctaattaaatcaccaaacttactcaaaatggctgtgtacaaaaaatgagagttgacattagatctcggacatatttcccacatacacagtgatttgaagtaaactgcagtttgttttgaataaatctaagttatatgttgtattactatgtattgctaaattctctgcactactgtcatgcaatactaattttacaggggaagctgaagcctgattaacttcgtcagtgccacaggaagaaacaagagacagaaggaaaaagcactttggatgcccgctgtaattcacagagatctccacggtaggagcgggacgtcagcttctgcggctaaaatctcgtgactgaagcagcacagatcagaaagaacgatttaccaggtatctatttcgttctagaaaggggcccataaacctaaaaagcatccaggagaaatcgcttcctcccgcttggcggcaaaggacagagcaggagggcgagcactgagtgtttaagaaggatgaggcctacatggcaaaggcttcgataagtagggaatgcaaggaaacagaaaagggggaatcaggttcgcaaaagtttaccttttagcgccagcaggtgctcctgtttagggggattcacttccattttgaccggcacttttgacccacagcctacgggggctggacaggttcaacttgccccggaaggaaacggaaaacctcgcgtttggcaaaaccaaaagtcaaacgcactctcaacctctctctggtggtggtaccttaaattctcctactgtgtcctttacaaactggcttcttttcaacaagtccatttcttctatcttagaaacgtaggcataaaatactttgttttccatctgcaatcacacatcgcgactgcaggaaaagaaaccacccctaggtaacaatacgcggcctcccaaaggccaacgttgccggagttttttttttaaaaaaaaaaaaaaaaaaaaaaaagagagagagagagagtggcatgctgggatttgtagtttatacaaaaaccgcgttgcatgcagggagatgcccgtaccccctcaccgccctcagttcacgccctggctggtttggattcgagaggaaaaatcattaaaggatctggagttttcaccccaaaactttaatcgttttgtcccttctttttttttcttgtctttcctccagcagctgcagactacataatgaaaaataacaaaagtgcccatgcgcgaggctgtgcaactaaccacccgacgattgcggggaggaggagtaagagtcggctaagcggcgcccagtgtcctactgcgcctgtgcgccggtggcgtgcgcagaggcctctgggtaggtggctcaaccccgcctctcagttgaggactctgaaggctgtttctgtggcgcttcccctgcgaggatggctaccctggttgtaaacaagctcggagcgggagtagacagtggccggcagggcagccgggggacagctgtagtgaaggtgagggaccttgcgtgctctattctccaccat

SEQ ID NO: 33712 - DNA, 2300 bp, Homo sapien
ccctacccaatggctagagaaactgaggtacaggttagtgacttactaaggaacccatagcacattcagtcttttcatttgcagcctaattttacttgattgtgttgtcagcatgaaattagggtccttggtttttaagtgggggtatcaatactgtatctctgcttacagagggtcccaaggattggtgacctggtactttgagggtatggagacaaacagtaaaaatcatatgtccaaataaattgtgatctcatatatatataaagctattaatcccccattttttcccaatgaagatccaggaagtttttcagcagacttcaaactactcagggacacagatgaaggtcaaatatcctcttaaaatatatatcaatttaggtacacatacatagtttaaaatcacttgttacatactttaatgttcaggcaattcaggaaatttttattcaaactttttcagtgcctgtcaacacttagaggaactacttgcatcttctcattacttgagcacattgccttcacttatatcaaattggcgaagacaactttgctttttgaatctgtgtctgatgctctcgctggacattttatatgaagccacagtaccacttgttgtttgtcagcacaactgtgtatccacttagaatattgcatttttagaatgacctttaaatggcatataatgacatctaacactggcaatagagggtcacatactacaatttgtgttaaacttcttagtgtttttaaaattacttgttaggtgacctccaaaagcatcccaaactgggtgttatatgagactattaagacttgggtataaaagcattgtatttgagcacatacaataaaaacatatacgtcttaccctttgcttctttgtcattagcactagagaagtagatttcacccagttgaggtacttattttttttagcatgggtgttttgtttcttataaagaacactgcattgtaataatgctatatggaggcattggtaaacttgtagattctaaagtcatggctctgaaacttgtttttatagaaaaaagccccctttaggtagctcctacattttctgcatttctttttgcgtgggtaaatgtgactggcaattccctattcaaaccacattgcctctttactacaggggacagcagtttgctcagcagatacagcaacaaaatcctgaacttatagagcaactgagaaatcacatccggagcagatcattcagcagcagcgctgaagagcattcctgatttaaccaggggctcaagcccaagatacaaatggtttatggctatgaatgaagtatttgttgtagatagtaccccctccctccttcaaaaaaccaaacaccatatctgatgtgtgaaaataatggaggaaaacctcttgtgtatattcttaaagaataaatctgtttagacaataggtttatcacaaacaaactcaaaacataacatgactccttttgaaatgatcactagccatgttacgtgccaatatagcactgggataaggttccattttcaaacttctatcatatttgtatattagacttaatagcaaagcatatttattgaactctagtagggctatttgttggtaagctctttagctccaatttcccttaagcaaagttttttgagaagggaaatgacccaaaggaaaggtttcctatgctggttgagaagaagtgtacttgccactgagcagtatgtcaggaaagaaggaatattatctaggtttagctttgataagtgctattagtaatgaatatataacatgggaaccaatgttatctttaatgttgcttgttctggtgaacagagaatcttaagagctgttagaaagtagcacttgatgcaagggatgttttgaaaagaaaaaattggtaatgcgaatgtatagaaagtaaaggtaggatgctcaggttttctgcatagttcttaactaatcttgtctgcagtttggtattgataatattagcatggccacttatgctaaatacacaataagatacatttagaaatccttaatgtactggttaggtcagtggtacaactgtttgacttaattatcacaatttccccaatggtaaccttaccttggaaactatcaaatataaatatactttaactaagccagtgacctggtcctaagttaaggattttctaaatggtatttaattgtgtgcccataaacactgattttttttaaaaagaaaacttagtaattatttgatggataacaaaaagcatctatcactaacattgcttgttcatgta

SEQ ID NO: 33713 - DNA, 2300 bp, Homo sapien
agctcactgcaacctccacctcctgggtttaagccaccctcctatctcagcctcctgagtagctgggactacaggcaagtgccaccacacctggctactttttgtatttttagtagagacagggttttgccatgttgcccagcctggtcttgaactcctgacctcaaatgacctacctgcctcggcctcccaaagtgctgggattacaggcatgagccaccaagcctggccctggttttattttctcacttgttaaatggggataatactaacataacagttgctgtgaagaaaaaattgcctataatatgaacagcatacttctgacatatagtatttgttcaataaatgaacaatagtcctcttaatttgttgttaaaacaaacaaaacaagcttcagaaaatggaaatacgataaccttatagtcaggcctctcctcttgaaagatcaaaaaaaattctgattatgttacaatagatcatcaagttgggcttacagctattttagtcttcgtttataattataatataaatgaacacaaagagcagatgcataccttccaaactttcttgttcatccgaggtgtaagtgtccatctgactttgttcccgtaagaaacgaataactgcataaaccaggtgcttgatagatgacattttagaagcttaaacacttttccttgataagaaaaatgaaaacactgaactaagttattttaaagaatcagtcaggaaagtcataaattacaaagatgatatgggttataaagtgtattaaaggtaaaaacaaaacacaaaactgtatgacctttcatcttttctctttgtaaagagtcaggagagcacaaagtattgtgaaggtaatttattacatattttcattaatacccagtggtatacgagtatgttaaatcttggaataagtaaaaatgtcttcaaaacatgtacagcataagcttagactgtcactgcatatctcaccatacagaaatcccctaaaggcctcagtactaagttaagaggcatttcatactgctgactaaaagctgatgtataccaagcatcttcctctttttcatgggatctaaaaaaagtattaataatgtacactctacccacttttgtaggttgagagttatttgatgaggaaacacattcgcgaaaggttattcaagtggtgagtgtcgttcttaataaaaatggcatttctatttaatcagcagacatgtcaggaaatcgctgcccaagtcgatggatactacaagccgaccggcgctccctgcagaggctgtgctctcgtggacaagctggaagctcccggtcatgttcattcacatggaatactatcgcatccaaacagtggcgcagggccaggcggcattcatggctgatttccaccaaatcgcatcatccatctgctccccaggttccctaattcaaagccagggtgtggtacccgccgctataatgtttattatttgtgtagttattttaaaggcgatgtcagcctctaggccacggggtcataagcactaaataaggccccagggcagaaggtaaaaacagaatggggggaaaaggggtgagaagagggaaataggcttctcccccttcctctccccagagcgcatcgagctccccctcccttccgtcctccctcaggtacccggcctcgcctcggccctgcccggtgtgcagcgggtgccggtgcgggccccggtccggagcggcgggaggcgcacccttgccagacagaagccccttaccaagcaggaggacgcgagacgactgctgctggcccgcggggttccgtaggcaggcccgcccgacccctggtcctcggggctggagcccggctcgggatcgcagcactggtcgcggcggcgcaaacttccccggcccctaggccgtagaccccagaacccaccaggctgtgctctctctcaggcggcagggtctggccagcaccgcccctggggcggggccggacgcgagggctggggcggggccagacacgcgagctggggcggggcacggcgcggggcggggctggtaggcgccggcgtggagctgccgcacgtgggagggcgctggccaggcagccactgtggcctctgcggctaggccggctcgagactcccgggcgcccaggcgctgccgcccgcctcgccgccccacgccgaaggaccacgcgcccgccgccgccagcctctcagcgctcccatgatcgcccggtgccttttggctgtgcgaagcctccgcaggtacctccagcgcgcgggttaaccttggccgtgggc

SEQ ID NO: 33714 - DNA, 2300 bp, Homo sapien
agttctggagatggacagtggtgttggctgtacctctcaattgtacacttaaaaattatcaaaatggtaaattttgttatatcttaccacaattttaaaaaaaagggaaaaaaccccacaatgttaatcttctcactgattggggggcgggggggttggtttggaaaatagttatttttcattaaaatcactatttatgcacctagcctatttattagttttgtaaattaacaactactttaatttttttccagctttaatgtctaatatggtaaatatagacagatataccacacaaacagaagctcttaggtccacggtaatttttgaaaggtaaaggggtcctgagaataaaaagtttgagaattgttcttttttttttttttttttttttgagacggagtcttgctctgtcgcccaggctagagtacagtggtgcgatctcggctcactgcaagcttcgcctcccgggttcatgccattctcctgcctcagcctcccgagtagctgggactacaggcgcccgccaccacgcccggctaattttttgtattttttagtagagacggggtttcaccgtgttagccaggatggtctcgatctcctgacctcgtgatccacccgcctcggcctcccaaagtgctgggattacaggcatgagccacagcgcccggccgagaattgctcttatatgaagatttattccctcctctcacccctgcattatgtgaagtcttcatttcttggtataacttcatttgacagctatatcgattgcagcctggagactagcaaaaaacgacaggctgaaatatggtcaccaatcaccacattaactctttgtaattaaccactgtcgcctgcctgctccctaactctacggactgagcaacacaaagctccatccacacagacgagtggcaatgtgcaaaagggaactgtagaaagcttaaatgctgacatgttacaaagtagttttgttgatagctagcaagaagcacacattttctttattctgttgaatcttcatttggatttacagttctgggcagatttggaaacggggatggtggcggcattgtttccgaaaaccagcgcatccgtgcaaagaatttaattccctcaccatcttgctactggtctgttgcagtggggtgtggttagagggctaggaagcaatccaaaacagcagctcaggctgcccaaagccgtgtccaagcgatcattttctccattttgggccaagtcaatttgcaccggcaagaggcagaatgtttgttttatggggaggaggaaaataaaaaaggaagtcagagagcatggacggaaacaagcaacaccaccaaagaggtttcatctcgggtggatgttaaacgattggaatgctaataatgggcgcgaggagcaaacacaattgttctgagtccacagctgcggcacttttaatgacaggtctgtagttctgcattgggattgaacgtgaaatgattttcttatccaaactatttgcattcattttgggccgcgtctgtgaccagcctcgctgactgcggctgaggcagtcccaaacaaagaggaatggacgtcctcccgagggagcggaggcgggaaaggtggccccaggtggccgcgccaggtgtcccccaggggtccaccttgcaagccgcggggagggtgcgtcccgggagcgtcggagaggcgcggtcgggaaggggtgggtccgggctccaggcaccacacggcgaaagaccccgccctgcccacggccaaggttaacccgcgcgctggaggtacctgcggaggcttcgcacagccaaaaggcaccgggcgatcatgggagcgctgagaggctggcggcggcgggcgcgtggtccttcggcgtggggcggcgaggcgggcggcagcgcctgggcgcccgggagtctcgagccggcctagccgcagaggccacagtggctgcctggccagcgccctcccacgtgcggcagctccacgccggcgcctaccagccccgccccgcgccgtgccccgccccagctcgcgtgtctggccccgccccagccctcgcgtccggccccgccccaggggcggtgctggccagaccctgccgcctgagagagagcacagcctggtgggttctggggtctacggcctaggggccggggaagtttgcgccgccgcgaccagtgctgcgatcccgagccgggctccagccccgaggaccaggggtcgggcgggcctgcctacggaaccccgcgggccagcagcagtcgtctcgcgtcctcctgcttggtaagggg

SEQ ID NO: 33715 - DNA, 2300 bp, Homo sapien
aatatggcaagacctcacctctatgaaaattaaaaaaaaaaaaaaaattcagagttatattactaaaagaaaaaatgagagaacagatattgggagaaaattggcagtctagagagaagatctggagaaactgcaaaaaatgaaagaaaaatctaattaaactatttaattttagaacttggagaattacattatgtatgtttctcttctatgttttccattttagttttaaaataataataattataacagataattatatagtgtttggttatgtgccaggcatttgtctaagcactttacatatattttcatttgaatcttcatgattactctccagtgtatgtatttttattttccacatcttgcaaatgagaaaactgagggtcagaaagctccagaatttgcccaagatcaggtaactagtaaatggtggaaccaaattttgaatgcaggtagtgtgacctcagtgtgtgattttccttagaaaccagtctataaataatttgctgatttgattattggaatcagttttttcttttactttaacatttacttacttcctctaggagaattacttttatttcattgctaagaaaataataaaataatatcaatttttgtatttttaatacaaataaaatataaaagatatttgtaatgttaatttgggaaaaatccctgaaacatttttaaaagcagaattttatggtgccttagttcatttgtgctgctataacaaaataccacagacgaagtaatttatgaacaatagaaatttttcacagttctgaaggctgagaaattcaagatcaaggggcatcggcattcagtgtctagaaagggccttttttctatatcctcacatggcagaagggggaagggcagaaaaggcccaagttctttagctgtagcccttttataaggcactaattcattggtcaattcccaaaaggccctgccatttaacactacctcaaaagggattatgtttcaacacatgaattttggggaacattcagaccatagcatgtggcattaagtatattcacattgagaatatgtttatatttttctgcagccatcacctgtatccacctgcagagttttttcatcttccttaactgaaactctacccattaagcattaactccccattatcccctatccccaggccctggcaattactattctattctgtgtctctgtgaatttcactactctaggaacttcatataagtggaataataaaatatttgtctttttgtatctggcttatttcacttagcataccttaaagggtcatccatgttgtagcatgtgtcagaatttccttccttgtaaaggcagagttatattccattgtatatatataccacattttgtttacctgtatatctgtccatggacacttgggttgcttccatcttttggctgttataaataatgctgctgtggacatgggtgtatagatctctcttcgagtctctgctttcaattatctttgttatttactgagatgtagaattgctggatcatatggtataatttttttaggaatcaccataccgttttctacagcagctaaactactttacattctcatcagcaatgtgcaagggttccaatttctccatttcctcaccagcacattttctatgtttttaaaaatagtagccatacaactgggtatgaaattaaaaagataaattttacgttatgtgtattttaccacaataaaaatgtccaaaggaactgaaagtaccaatatttggtgcagttctgtcagtagaagtaaatatggattcgctatattccttaaaaatatattttcactctaagtttgtagcacctacaattttattaagacctcatagttctgaagtttaaaaagtcataaattgtttcagaaataaaacgaaatcatgaatccaaaaaaaaaaaaaaaagcctataacaccaaaatggaaccagaaatttaaatggtctaaaaatatttgataattttacaaacctaaaaatacatacagtaattcttccttttagtgctttggatcaaattattgattagcctttattttgttgctgttgtttattactaggaaaacaccataattttgcagcagctactcccactgcgaaccaaggtggccaaactactcggttatagcacacatgctgacttcgtccttgaaatgaacactgcaaagagcacaagccgcgtaacagcctttctaggttagttcttttttttttttctatgactgttttgctataccatgtcaaccagacagaaggcc

SEQ ID NO: 33716 - DNA, 2300 bp, Homo sapien
cagttcttcaagtagttaaaaatgctcccaacctgaataaaatgacttgaatatcttcggcgttatttcaagtgtttgcaactaatgtacaactcattttggtaaatgattacttggtggaatttatgaactctttccattggcaagccaaaaaaaaaaaaaaaaaaaaggtctgtaggggatatagctctttattcaaacttggtaataaataattatctctagaatacagacggaagaactgaaccagggacttcagggacccagaggctaattatcatcactgtacacagttaagtgcagcagagaatgggggtgacgaatggttcgctccgcattacgctccttctctgggtaaaacaaggccgtcttttctgtgaacatatttaaagcaagaactgcaaaaactgtgcaatgttatggttgaggctttctatttgccatatgtgttgacagaatgcttaagagtctctctccgcaataaacgcgaaccctgccaggctgaattattagggccagcgcaattcaacgactgcaccaccaccgaaccgctggggttggaagcctgcgtcgcatcggagcgtacccatgtttcttctaacaaaggcacgatcttgaggccatttcgcgggcccttttcccactcccagcgccagctttgtctccccgccggtatgaggctgagacttggaggaggctgagctgcgccgctggggaacaagctcgaagggcgggcgtgggaagctgcaccgcgctgccgctgtggtttcctgcgacctgaccgtgccattagaggaagttggagtgctgcagctgcaagagatacctgctgccttcaaatcagggctggactccaacaacccctgtgcaccgattactgtcgtacaaagaaactccatcggccggcgcggcggaggcctgtgggctctctatctctctggctgggcgctgggccgcgagcagacagcagggtcggcgttgccagcgttccccaccctggggggctcgggagtccgggagtgcggggtcggggagcgggcagggagcagcgggcaggcctcgaggggcctgggccagagtgggcctcacggcgcgccttgcacgcgaacccacggccgccggctgcccctcccccggcccccggcccgctgcccccagccgccgacgtcggcccgcaccgcccccgcgcgctgactggcccgcgcaggcctcctgcccggctgttggcggttggggcgaagccggcgggaggccgccccgcccccgcccccgccgcagagtcgcggcgcgcagcctcttcacccgtcgcggccggggcggtggcgctgttgccgccgcggcctgtgaggcagtaactcccctccgcccctgccccattcctcctcctttctctccgctccctccgtcctccctcccctcgccgtctctcgctcgagtgaatgtggcgcggcggcgcgggacgcagtctcggcccctgccgcggccccgcaagctcgtgaggagacggagctgcctcctgctcccgccccctgcgcgtctcggggagccaccgccgctggcgaaggagaacaagcagggcagcggagggacggtggcgggaaaacgggagagggaggagaagagggttcgagggcgagtagggaaagcggggagggacggacggaaggacggacggcccgacggacggcccggggagggggccgctattgagcctgcccgactcctcggctccggctccgggtggcggcggcagcggcgtcgcggacgaagggcgcggcaagcgctatcgagacaataaccctgccgcccggctctgggggcaacggagaggaagcggtggcggcctagcgcggccgaggctcgccgagcgcccgggcagcgtcctcgcccccgccggccgggtgctgctgccgtccggtgtgccgggcgcgccggttgcccggaacccgaggctcccggcggccgtcccctcccctccccctctccggtgcgcgcggagctggttttccgggttcccctggacggagctggatcctgcttctcgccaaggcaggaagtgagtttcgcactgcaattccgggcggtgtcacgagtgaaaagttttgtttttttttttttcggcggagatcctcgttggggctgggaaactcctgcaaaactcgagaccaggaagccagcccgcaccccaacccccaccaaagccacctactcttcttctgtgggaggccagtccacatccgctctcacccgagagagatattcagctggatccaaagtgactgatgaagggaaggaaatca

SEQ ID NO: 33717 - DNA, 2300 bp, Homo sapien
gacaggaccttcaggaagtattccagaagaaggcattgttatcataggagatgacagttccggttgtgttgttgcccctgaagaccttccagtcagacaagatatggaggtggaagacggatagtaatgatcctgaccctgtataggcctaggctaatgtgtgtgtttgtgttttcatttttaaccaaaaagtttaaaaagttaaaaaaaaatttcttttaaataggaagaaaaaagcatataaaataaggatataggagctgggcctggtagtgtatgcctggtagtcccaactacttaggaggctgaggtgggaggatcccttgagcccaggagtttgagtccagcctgggtaacatagagagatcccatctctaagaaaaagaaaaaatattctggttagctgtacagtgtgtttgtgttttacaccatgttattacaaaagttaagatttttttaaaaagaaaaagtttataacgttataataagctaaggtttattattaaagaaaaaaaattttaaataaatttacatagcctaagtgtttataaagtctgcagtagtgtacagtagtgtcctagaccttcacattcactcactactcactcactgacccacagcaatttccagccctgcaagctctatttataataggtgtactagttttttttttatctttcataccatatttttgctgcactgtttctatgtttagatatgtttaaatacacaaatacttatcattgtgtcacagatgcctgctgtattcagtacatcagcatgcggtacgtgttcttagtctagtggcagtaggctacaccatatagcctagaggtgtagtaggttataccatctaggtttctgtaagtagactctgtgatgtttgtacaatgatgaaattgccaaacagtgcatttcttagaacacatcctgtcaagcaatgcacgattgtttcttccaacaaagatgcctttggttaatcagaccttataccaattatttattgtgaaataaaccatctgaaacttagtgatattataaaccaagaagagtcatcagtattacctatcatgggtctggggctcatcttggcttagctagttggttcttgctcaaattcttacgtggttgcagttagatggttgccagggccatgagccagagcacctgcgtgtgacttctcggtaagacttgagtttccttacagcaagtggctggtttcagagggcaagtggatgaaaggaaaagggcaaaagcctaagtggcaactgtattagcctttttatcctagccttggacgtcatgtagcatcacttctgttatattttgtttttaagaagcgtgtcaccaagaccagctcttattccaatgacggggaagaggatttcacctcttgaggggagaagtgtaaaagaatttgtggaaaatgttatacctaccacaacctcattctacaaaatagtggcatcttgttggttagggattaagttctaaagtcagtgtaagtagaaggtatcatgatggggagaccattatacattctctgtccggcacggtgaggattttctataggttcaagaaaaagtcactgtttcttcaactgaatatcaaataagatatatttggcttgtgttcagtgcctttcttgtgtggaaaatatatttaagtactagagtagcattcagcaaggtgcaattaccagactttgagaggctctgtggaaaagaaaattgacatcactatcaaactagttacaagacctacatttattgagtaaagaaggaaggtaggcagaattacttgcattattacttttatttaattttgatttaattaattaatttatttgagacgatgtcttgctccgttgcccaggctggagtgcagtggcccgatcttggctcactgcaacctccacctcctgggttcaagcaattctcctatctcagtctcccgagtagctgggactacaagcgcctgccactatgccctgctaatttttctatttttagtagagacagggttccctgtgttggtcaggctggtctcaaaactccagacctcaggtgatccacctgcctcggcctcccaaagtgctgggattacaggcgtgagccactgcgcctggcctattgcttttatttttaaatttggagaaattatgtagctcaattcataaataagtagatgaacgaagcaactactttgttttcccaaatctttgtttcaaataagaagggaaatatcgtgattgagaggtctcttcccttcttttagtaaaaataatgcaataccgcgtt

SEQ ID NO: 33718 - DNA, 2300 bp, Homo sapien
tttcaatttaatattttattgttgctaaataaagacctgatactgattgtagaaaatatgttaatgcattcatcattgagaaatttcatatctgcaaaaatatcactcacttgtcactttaaacttacaaattattatgccctttgtattcagatgtttatgcgaattagattatagatagtctaggctactgtaaaatacataattgcttttatttctgtaacttaaaaatgaaaagactactataggcatacccaattatttaacttatttatgcatttatccttgaaagtgaaagattttttggttgaatgtctgagacagtttttagatgtggagtttcttctagtggataaataaaagctggaactttttttaaaaaacagctttattgagatataactcacatatcatacaaatcacttatttaaagtattcaattcagtggcctttagtatatttaccaaattgtgcagccattactacagtgacttttagaacatgtttctcaccccagaaagaaattccatactctttacctgttactcctcactctttatcccctttggccctaggcaaccaaaaatctactttatatgcctctgtaaatttgcctattcttgacatttcatttaagtggaatcatacaatatgtggtcttttgtgcctggtctgtttcacctagcataatgtgttcaagtttttgtatgttatagcatatatcaacacagcatccatttttatgaccgaataatactacattgtgtatatccaccctttgttcatccattcttcaattaatggacattttaattatttccactttttggctgtaatgaataagtctgcagtgaatttttgtgtacaggtttttgtgtggatatatattttcatgaatgaaaaatgattgcaccattttatattcccttcatacactgctagtggtaatgtaaaatggtgaagctgtaactttttaatatgaatatctgaagtgtttctgatttatagctgcattgttcactgcagtacatactagctacaagtggctatttaagttaatacatcttcatccctaaaatttcaaaatgcattcaagcacaccatctcttttcctggttatcctgtgagctgtcatttacaacaggaataattttttaaaaaaaggatggttaatatcactcaatacgctatggtatgcactgaagctaatgtcacaggctgtgaaaaaattattaggtttgttacagtgaacttatgactcatttagtgtaatttctatgtgtaaggcactgtgtttagagctaaggtggcagaatggataagtggatatagggatttaaatgaatgcaaatatatataattaaggatagactgtgctaagtgtgttagaaatgtactaagtgttaaagaaatttaggaggaagatttatggctgccttgagaagggggcatttcacctgtgttttggaaaattttaattcgcagatacaggagaatggaatgaaatggggaaggaatgatgagagtgaaagaatggcatttggaacatatggaaaataacattttatgttactgaataacataaaatgttatgttattaacattttatgttactgaataagtcagagacaatattatgaaataagatcagtagagtagacagggccctgattacgaggctctgaaaagccaagctaagaagtttgaacttaatgttctgtagtgttgaggagccactaaaggcttttaatagagtgttactctaattcatagagctatatatggttgaaagttactatagttgtaagaatattataggagatgcagcacgtgaacatctcagtataaaaaagggaatagaggagcagtatcctaatgtttgattaggataatggtgccatgaaaaggatagaggtacaaattgtacaaacagtcttggaaggactggttgttattttattgccgtatcttgaaaaggtttaatatgtgtttataatatttgttttccctttaaagtcttatgacttaatatttatttatttaaagaaacaaaaatttaatttttatccccctcacccccttttcactaggaatctgaagaactttcttctgatgaagagatgaaaatggcggagatgcgaccaccattaattgaaacctctattaaccagccaaaagtcgtagcacttagtaataacaaaaaaggttagatgttaaaggaaagtgctaagaatagaaattgcctcaataaatttataaatttttttgaaataaatttcattgaatattatgttatttga

SEQ ID NO: 33719 - DNA, 2300 bp, Homo sapien
cagagtagctacctggtcatctaatatataagttcataagtcatctaatacttaagttcatctaatatataagttcttaagtttctattattttaccctcttttaattgagctttgtcatccagttttttctcattacatatattttgtggcttagggttactgagtttaatactttctaatttcctgagccatctgctaattgtagcttaatatattccatgtgtatgtttaacactgatgtaggcaagaccaaatatttggtgtcagggagtcttaaggtcagtagtaattgtcacctggattttacccaggagaaagatactgaatttgcatgtaggaataaatggtataaacgtagagaaaatcatgggctatctgcagaattgtatgtaagtaataaagcaacagcagaaccagttaattactcatgggcaaatcagttgcattaaatctacagtgatcaagtaataaacaggtttttttcctccagaaatgtagggctaatatagcccttcattttccttctctccaaccaatataagatttgtcagtaacatccttgtgtcctatcacagaatacccatgtgtgttcctagacttcagaatttaactaagttctcaagtataacacagtttaacagtgaaatagaatgccttttttaaaaatacaaatctataccaaagctaaactactttatatctttcagcaaggttcaccaagaaaagcatgcagttctgaaagtgttgccatatctttctgcaaacttttctatttgggttaatttagggaactggacctcaactatttccctcatagttttcccataatttccttgtctatgagattttctgtctgttaataaccaacaaggaaattataagttaatagctgaaccatatttttctacacaaaaatctttttatatgcaaatatttgtaatatgactgtaacctcttttttgttgttgtttagagatggagtctcgctctgtcacccaggctagggtgcagtggcatgctcatagctcactgcagcctcaaactactgggctcaaatgatcctcctacttgagcctcccaaggagctgggactacaggtgtgcaccaccatgcccagctaatttttttttttttttttttttttttttagagatggggtcttgctgttttgcccaggctgatcttgaactcctggcctgaagcaatcctcctgtataggcctcccaaaatgctgggattataggcatgagctactgcaccctgcctcttgtttttaagatagattcctcatgctaacagaataagctattagccacatttctacaaaggtgattttaagtcaggtttattctctaaaaatgagaggcattaaaacaaagatagttctctaacaacaacaaactaataatttaaatttttttgctgtttactttatgaatagggtagaatgtcaacatttaatttttatggctaatagtctatggaattaataataagagattataaacgttgctaacatacacacaaggaataaatcagttttctacatagatagctgaattgacttgttaattttggaaaagaaggaataaaagcagaaaaataaatttggaaagaattttaccacaaaattagtttttttctgaagaaaaacgtcagcaaatgtaccttttgtgtatgtgtgtttgatttagtatgggaaaagatatgcatctcatagactggcttaaattttaaaattttggtatactatgtgccattttaacatttggttattataagatagatacatctaagaaaatacaagtgtagctcacaaaaaagcaagtaatttaaaatgtagatatgatgtacttccatttgaaagcttaaaaaagtgagtgtaacaacaagcactcaggaaactttagaattaagacattaatagcttatttcttttaagttttaaaattatagaaaaatagtaagtggcatggtattgtttgacttaattagaatgtgaaaactctagtgcttttgtaatgctccaagaagaaatccaaatatttgaaataagacattattattggtcattttaagatacttcatgtttttcttagatgcctttgagtaatggacagatgggccagcctctcaggcctcaggcaaattatagtcaaatacatcacccccctcaggcatctgtggcaaggcatccctctagagaacaactaattgattacttgatgctgaaagtggcccaccagcctccatatacacagccccattgttctcctagacaaggccatgaactggcaa

SEQ ID NO: 33720 - DNA, 2300 bp, Homo sapien
gcactcaggaaactttagaattaagacattaatagcttatttcttttaagttttaaaattatagaaaaatagtaagtggcatggtattgtttgacttaattagaatgtgaaaactctagtgcttttgtaatgctccaagaagaaatccaaatatttgaaataagacattattattggtcattttaagatacttcatgtttttcttagatgcctttgagtaatggacagatgggccagcctctcaggcctcaggcaaattatagtcaaatacatcacccccctcaggcatctgtggcaaggcatccctctagagaacaactaattgattacttgatgctgaaagtggcccaccagcctccatatacacagccccattgttctcctagacaaggccatgaactggcaaaacaagaggtaagaataatcaagactatttgaaatatgggactaagctttttatgtatttttataggttacttaattattagtaaatccatacagaatattaacgtagttattaccatttaaagttttatttttatgttacgtttataaggcgttaaacttggtaatttttatttgactttgtgatcatgtaacataggatttagtattttgggcatgatttatttattctgatacagtttctttaccaaaactggttgatactacagtagtcagacattccttaagaatataaataggagaccattaagctgaaattgttctgtgacacttaaaatcttaattccttagattttgaaatttgactacagacttcaaactactttgagtatttaatcttaaaaagtactttaaaagtcagcgagctacacattcttatatcttgatagttattaataaaatgataatattagaaaggtagagatcaaatgctttattcattttggttgtgtctctggtgaaagggagtgttttataacacagttttaattcttgcatctttttttttagcttggttataaaaactctcaattggtcatgttttaaaatcccaactcctttgaagcctttaaacagatttgataaataaagagttagtatcataaaaccaccagtggatcttttagatatcttatgtaacaagccactaaacagagatactgtgtaatttagatgtcccacaagtggaaactgataataatatacatgttttgtgtttatgtactatgtcatataaaatctgtgacgtctaaaaagtaaaacagggtcaatattaattgattccttatcctcataagacaagcaataaaattaggagctatgctttatataatcccagctctgcctttaactcactaactcattaacataatattctatgttgtatttcacttcatctgaccaaatatttatttttgatgaattcttatgtttatgtttgcttggacttaaccaatcagtatttaaatatggatgttgttgcattataactttttctgaaatagtaagtttcctttattttcatattaactcagattcgagtgagggttgaaaaggatccagaacttggatttagcatatcaggtggtgtcgggggtagaggaaacccattcagacctgatgatgatgtaagttttctttgtatattcttgaaacacctataaagttttatttaccgattgaatacttaaatgtaagtgaaaatctaatagatgtttatgtaaatctaggtagacatcacctggattccccactctattgcttacctttttgttttgtaatttgatcagttcaagttaaaacaatttaaccaaaaactatgaatgtttatgatataatgaaatgatttttaactttcttattgctttttcacacacctataaaagtaattttattactctcaagagaaatcactaaagtcagaattactagaggtaaaaataactagtttgttacagtattactcagagaagtcagggagaaaacttgtaccatgattcaaatatttgcatggtgtggaggaaaaattgctccttggtactctgttatttatacatactgtttttagttaaataattttttttgttgttaaagggtatatttgtaacaagggtacaacctgaaggaccagcatcaaaattactgcagccaggtgataaaattattcaggtaattaaaataaatctttttttttttcattttataacactctaatgttttcacagtttaaaatgttttcactttaactttgaaaattgtgggtgggaggctgaggcaggagaatggcgtgaacccgggaggcggcacttgcagcgagccgagatcgcgccactgta

SEQ ID NO: 33721 - DNA, 2300 bp, Homo sapien
tttcttttgcagctgggaggcggaaagcctcaggcaagttttcaagcctgactcaccctctatgtggaaacagacttggggctgttgctgggggcaaggtgggagtgagattcgcccttcagtttgtgtgggagctgggtgaggcctatgattgccagctttcctccacttccctgacaacctgcatgactctgcagaggcagccatcatactcctggttacacaactccagtgacctgagaatctcatcctcatccccccacagcagctgcagcaagacccacccaaggagagcctgagctcagacatgcctagccccacccccacctgatggtccttccctacccaccctggtagtggaagacaaaggacatataatctttggtgttctagggccccacccacgactggtccctctccacactactatggctgatgctttctggaaagcaccacctcctggcaggaggccaaccagcacaaaaatagagcattaaaccatagagctaaggaccctcatggagtccattgcatcctctgccacctccactggaacaggcgctggtatccatggctgagagacccacagatggttcacatcacaggactctgtgcagacaacccccagtaccagcctggagccaggtagactcgctgggtggctagacccagagacagacaacaatcactgcagtttggctcacaggaagccacatccacaggaaaagggggagagtactacatcaagggaacaccctgtgggacaaagtaacctgaaaaacagccttcagccctagactttccctctgacaaagcctacccaaatgaggaggaaccagaagaccaaccctgctaatatgacaaaacaaggctcaacaccccccaaaaattacactagtttaagcagcaatggatccaaaccaagaagaaatccctgatttacctgaaaaagaactcaggaggttaattattaaactattcagggaggggccagagaatggcaaagcccaatgcaaggaaatccaaaaaatgatgcaagaagtgaagggagaggctgggtgcagtggctcacgcctgtaatcccagcactttgggaggccaaggcgggcaggtcatgaggtgaggagactgagaccattttggccaacatggtgaaaccctgcctctactaaaataaaaaaaaattagctgggcgtggtggtgtgtgccagctactcgggaggctgaggcaggggaatcatttgaacccgcaaggtggagattgcagtgagccgagatcatgccactgcactccagcctggtgacagagcgagattccgtcaaaaaaaaaaaaaaaaaaaaaagtgaaaggaaaaatatttaacaaaatagataggttaaaggaaaaacaataaaaaattcaggaaactttggacagacttttagaaatgcgaaatgctctggaaagtctcagcaatagaattgaacaagtccagatagaagaaagaaattcagagctcgaagacaaggtctttgaatcaacccaatccaacaaagacaaagaaaggagaataagaaaatatgaacaaagcctccaacaagtctgggattatgttaatccaagaagtctgggataatattaagaataatcggtgttactgaggaagaagacaattctaaaagcttggaaaacatctttggtggaataatcgaggaaaacttccctggccttgttagagacctagacatacaaatacaagaagcacaaagaatacctgggaaattcatcgcaaaaagatcttcacctaaacacattgtcatcaggttatccaaagttaagacaaaggaaaaaagtcttaagagctgtgaaacagaagcaccaggtaatctataaaggaaaacctgtcagattgacagcagatttaacaccagaaaccctacaagctagaagggatttgggtcctatctttagcctcctcaaacaaaataattatcagccaagaatgttgtatttagcaaaactaagcatcatatatgaaggaaagatacactcgtttacagacaaatgctgagagaattcgccattaccaagccaccactacaagaactgctaaaaggagctctaaatcttgaaacaaatcctggaaatacatcaaaacagaatctccttaaagcataaatcacacaggacctataaaacaaaaatacaagttaaaaaacaaaaacaaaaaacaaaaccaaagtaaacggcatgatgaatgcaatggcatttcatgcaaatggacaccaaaaacaagcagggttagctattcttgtatcag

SEQ ID NO: 33722 - DNA, 2300 bp, Homo sapien
aaagtgctgggattacaggcgtgagccaccccgcccggccacaaaagaaactcttgttacacacaataatataggtgaatcttgaaagcattataccagatttaaaaagccagtctcaaatgctacctactggataatttcatttatatgatattctggagaaggtgaaactctagagatggaaaacagattaatgcatgccaagaactggggagtggggaggtcttgattacaaaggggcagtatgagaggatttttttgggtcacagaactggtttggtttgtgtgttggttggggtggggttacatgactccgttttcttcatttgtcaaaactcatagatctgtacacaaaaagtgattttcatcttatgtaaaataaaaataaattacaattttagaaaagtcacaagttgagtgctggataggaaaatgaatggagagatagctgaaacaagaatagcaatatgtagataatagttgaagctgggtaacgagtacatggaggataattatactattctgtttactttgtataggtgtgaaattttccactataaaatttttttaaaagaacatctataaaagacctacacctaacatcatacttaatcatgagaaatttgatgcctttctgctaagatcaagagcaaggtaaaaggccaggagcagtggctcaagcctgtaatcccagcacattgggaggccgaagcgggcggatcacttgaggtcaggagttccagaccagcctggccaacatggtgaaaccttttctctactaaaaatacaaaaactagcagggcgtggtggtacacacctgtaatcccagctactcgggtggctgagataggagaatcgcttgaacccaggaggcggagattgcagtgagctgagattgcaccacagcactcctgcctgggtgacagagtgagacattgtctcaaaaaaaaaaaaaaaaaaacaaggcaaagatgttcctccctctcaccattgttattcagtgtcattctagaagtcatacgaatgcaataatacaagaaaaagaacaggtacacagattggaaaggaagaaagcaagaatctatgtctttgttcatagattacatgattgtctatatggaaaatcccaaagaatcaacagaaaagctcctgatactaataagtgattatataatgcaaggttgcagatacaaagttaacacaaaaaagtcactagaaaatcttgacttatgacaaatgaagattgaatcagtaatcaaaaaatgtgcaagaaaaatagcctaggaccagatagcttcactgatgaatcctatcaaatgattaaagaagagttaacactaatccttctcaaactctttcaaaaatagagaacagaacagttagataagaaaactatagacccatatcattataaatgtagatgcaaaaatcctaaacaaaatattagcaaattgagtccagcagcataataaaaagatttgacaccatgaacccagtgacatttaccccaggaacacaagggtgaatctcaaaagcattatatcagatttaaaatgccagtctcaaaatgctacatactggatgatttcatttatacaatattccggagaaggcaaagctatagagatggaaaacagattaatgcatgccaacatacacaaattaatcaatggaatacactgaattaatagaataaagggaaagatccacatgattaccttgattgattcagaaaaaaagcatttgacaaaatccaatgctctttcatgatacaaacaaaggaagctgctgtcttccctcctccctgagcttgccttaggacaccgccattactgttttatagttgtactgccccagtcaaacttcccatctggcactgtctatgtaactggtcatgtccagctgctgcagccaggcacttagtatcaggaatgagagtcctttgggactcaactccctgcctcatctggtcagtgaaaatactattgtttcacctaggcaggattttgacctggaggcgctcagttataatctcacagatggcagcttcactccattggttccttagccatgcacacacaccaaacgtttgagcctggagtactgagcaggattaccatggcaacaacacattatcggaccatctcatcatggtccaaattaactgaatgtctctacttgaataattgatctcaccccccttcccttcttgggccacaagtcccagtagccccgtatttattctaggcataaaggtttttttcattctggcattcagcctgatggttggctcacggctt

SEQ ID NO: 33723 - DNA, 2300 bp, Homo sapien
attattaaggactgtaaaatgcttttattactatccacattataaattaaacctgagaaatttggtattttgagattcatttaaaaataattataagcccattatgttaatagaaatgacgcatttttttcttagaaaccgagattgaaggcaaaatgatgcatttttatgataaaatatttttccaaaaaattggtgagaagagtggcattgttttacatttttcaaacctttttaatgtctgctttaatagaagacagctgaattctcctatctatgtattctttatttttttccaacttttattgtaggtccaggggtacatgtgaaggtttgttacatagataaattcatgtcatgggggtttgttgtacagattatttcatcatccaggtattaagcccagtgctcaataattttttctgctcctctccctccttccaccctccaccctcaagtagaccacagtgactgacgtttccttctttgtgatcatgagttttctgtgtattcgatctgttgtgatatgttttggttgaaatatatgagggaaatctgatctcataaagataaggtgttggaaaagggaaaactactttatagcctttccagatagttctagatattattctttgatacggtaccaaacttacatgtggtagtttcttagccttcattgcagtgtggactgaatctgaaaccacatcaattaagcactgaaatccatcaatctatcttgcacataccagaggctttttgcctttgtaatggcacccactggccatttgaaaaataggtgtccactaagttgtaaagatcacaaaaatgttgacatatttcattatatagtcaaaaataaattgttaatataatgcttcttttactagaaaagtctttaagtactggcaagctgtcaagctcaagctggtggatacaagtgtaataaaatttgtatttttaggtgaaaattcaaagaattacactagtgctttttccggagacaaccatttcacttgggcatgtagcggcagtagtttccattttttcacacatattctttaaaagacgtgtaagcaaggatggatttgaaaaaaaaatacaatttttagttatttgtgaaggacatttttaaagtgaaactagcatactttaaaaccttaaatgttgtatgatgtgaagaatacaaaatgcaactaccagtacaagactggcgccactgccttgattgctgctaaggtgtcagcagtttaatcttttacgttaccagtgcaaatggcaacaaagtgaaaaaggtcaagaaactcttaatattattacgaaaatcgttttgaccttgccaacttactgaaaaggtctcggtacccttagggatctgcggagggcattttgggagcagctgccatggactcactactgttgtctctcattaggttgcaagttctatgtgaactgtctttaactgtctgttacgtgcccttgcctaatagtgcctgggacatagcactcaataaacatcaacacctgtggaacgagggaattaaaaacaggttataaacaacccctgcacagccttcatcttactgcctctttccttaattcaacctgaacctacgcattttgtaaaattttgtttttttcacaattaggacgcctgccaacttttaaaaatagttggagttggggtgctgcctgtatgtgataaggctgccctatagtttggtcaagtgttcttccgtgttgtccaagagtcattccttctttacagtcccgcaccagtaggccaggccgcttggtttcccaatccgagaccggaaggaaccgggtagacatgagcacaagactctcatcgacttttggggaaaacaaaaacaccgataaaaatccaggcggtgaaacgagcagcaacagccccagggacccgggagctggaggccgcagccgcgcgagaaccgccgggttgccggggcgacgcttccggctggcgcgcgcagccccgggagcaggggagttgtgaaatgggcggctagatctgcccggcgctgtgaattcgccagcgggagcgcgctcgcggccgcgcgttctccgctttcccggctccgtcgctgacgcgtcgtagacgttggggagcgggaaggcaacggcagcgggatcgggatgaacagcggcggcggcttcggtttgggcttaggcttcggcctcacccccacgtcggtgattcaggtgacgaatctgtcgtcggcggtgaccagcgagcagatgcggacgcttttttccttcctaggagaaatcgaggagctgcg

SEQ ID NO: 33724 - DNA, 2300 bp, Homo sapien
cgatctgttgtgatatgttttggttgaaatatatgagggaaatctgatctcataaagataaggtgttggaaaagggaaaactactttatagcctttccagatagttctagatattattctttgatacggtaccaaacttacatgtggtagtttcttagccttcattgcagtgtggactgaatctgaaaccacatcaattaagcactgaaatccatcaatctatcttgcacataccagaggctttttgcctttgtaatggcacccactggccatttgaaaaataggtgtccactaagttgtaaagatcacaaaaatgttgacatatttcattatatagtcaaaaataaattgttaatataatgcttcttttactagaaaagtctttaagtactggcaagctgtcaagctcaagctggtggatacaagtgtaataaaatttgtatttttaggtgaaaattcaaagaattacactagtgctttttccggagacaaccatttcacttgggcatgtagcggcagtagtttccattttttcacacatattctttaaaagacgtgtaagcaaggatggatttgaaaaaaaaatacaatttttagttatttgtgaaggacatttttaaagtgaaactagcatactttaaaaccttaaatgttgtatgatgtgaagaatacaaaatgcaactaccagtacaagactggcgccactgccttgattgctgctaaggtgtcagcagtttaatcttttacgttaccagtgcaaatggcaacaaagtgaaaaaggtcaagaaactcttaatattattacgaaaatcgttttgaccttgccaacttactgaaaaggtctcggtacccttagggatctgcggagggcattttgggagcagctgccatggactcactactgttgtctctcattaggttgcaagttctatgtgaactgtctttaactgtctgttacgtgcccttgcctaatagtgcctgggacatagcactcaataaacatcaacacctgtggaacgagggaattaaaaacaggttataaacaacccctgcacagccttcatcttactgcctctttccttaattcaacctgaacctacgcattttgtaaaattttgtttttttcacaattaggacgcctgccaacttttaaaaatagttggagttggggtgctgcctgtatgtgataaggctgccctatagtttggtcaagtgttcttccgtgttgtccaagagtcattccttctttacagtcccgcaccagtaggccaggccgcttggtttcccaatccgagaccggaaggaaccgggtagacatgagcacaagactctcatcgacttttggggaaaacaaaaacaccgataaaaatccaggcggtgaaacgagcagcaacagccccagggacccgggagctggaggccgcagccgcgcgagaaccgccgggttgccggggcgacgcttccggctggcgcgcgcagccccgggagcaggggagttgtgaaatgggcggctagatctgcccggcgctgtgaattcgccagcgggagcgcgctcgcggccgcgcgttctccgctttcccggctccgtcgctgacgcgtcgtagacgttggggagcgggaaggcaacggcagcgggatcgggatgaacagcggcggcggcttcggtttgggcttaggcttcggcctcacccccacgtcggtgattcaggtgacgaatctgtcgtcggcggtgaccagcgagcagatgcggacgcttttttccttcctaggagaaatcgaggagctgcggctctaccccccggagtaagtgctggagctcggctgggggaggggcgcgggcgccatagagacctcgggagccgaggcgtggaggagagcgcggacgcgggcgcgcggtgcatgtcacgtgatcgcgccggcttaccttggtgcccatatttgattagggcacccgggttccgccgtcctgctctccttagtcggatttggggggttaactactgcacggagcccttaccaaggatttagaatggttgccctttctgtgcctccgggacttgtgttcgctgctgggtcttcgaattccgtgcccccaccctcttatttccccccgaacttaagatggccgcaggtgggcccggaacagccctcatggcaaacgtctcagagcgtttttccactctgaaaatcgcggagaccgcgcctgagccacagtccagtttttaaggccttggtgtcaggccgttttgctgacgagaaagcctgctgctggtgacaagatggaactggggctgtgtttg

SEQ ID NO: 33725 - DNA, 2300 bp, Homo sapien
ttgtatgttttctctatgtgatatttgtgcattattagatgactagactggccaaggcagacctgttacacttgcctgagttaggcattgtttgccatgccactaaacctgccgtcaagtgaaaccttcattggggaaatgagatcggagtctgaaccgcagaagatggacgccctgtctctgttttttattgttttactttaatttcatttctttttctttattttgtccctttttttgtttttgtttttgtttttgttttgttaaatctctttcactttaacttgtgagctggttttcccagttctttgtaaatggtatttcattaagggttcataacgtgttgcaaattatattgggagatgattagtagagctcaaccttaagataaagcaaattttcatgtggtaaattaggatacagtgttgtgaagctcattgtgagtcttaatttgtgtgtatggactcataaggtacattttattcttgaaacattaaaacactgataagtatctcaggaacactttctgatctcagcgcaacatttttctagtttttttcccccctagtctacatctctcataaaaactgatagcttctaatttttgtccttccccctggaattttaggcatacaaaatcatcaaggaaaataagtaaatataacaatctgggagtaaagaagagcctttcatttttatgatggttatttatcatataacttatttccttgacttatgaagactttttgttgcctatgtggggaatggatatttgagaaacttaagtatttgcatgtaggtttttgttagcttgaattttttgttgaatatttttcagaggttactagcttctaaatggattctgagattaggactataatactgtgagagatgttttcctcagttgactttgaggagtatagtttgggaaaaatgctaaatgcttatttgttttatacttttataagctctgttatttggagggtaaatttggtagaattctatcttggaaattaagcaatggagctttttcttaaagtacttttgccattacctttaggtaattagaataagtatatagagtaattagaatggtaattgaaagttaatttattaaaaaatgtgcttatagtggatttatacatttatagtagtatactatatttatagtagtatactcttttgaaaggcagtgggagagtttgacaacctactgatacttaagctgaaagtgaaagacttcataatactaagtagtcaacttttggccagtgttgaataccctttttgtttgtatagtctttctacaatgtcttcaataggtagttttacttattaaaggacaagtaatattaaatttgggacattactagattagaactctgagtttccttaggtgcatacattaaggtagtgacgatggagtttctgcctcaaaacctcaatttatcaagaatgttcaggttttacaaaccttttgagataataccaatttataacagataaaacaggtgaaatcaatataaatagtatagtgtatatgtgggtatatataaatacatgtgttaataccaataactaatacatataaagcagattattgttatttgatgttttcagtaaggcctacctgccttttgttgatgcatgttaagaaatctgttctccagaattttcactgaaataataaagataactttgtttttgaaagtaataaagtaatataaacttagatgctgcaaaggtagaaaatagtaggttttatttgcttcctataaataaggcatagccattatttaaatcaagttttaaattccaacttgagttccatccatgtttaaagatatattcagataatattgtttagggatttatctctgcacatgtggttgttttaaatatttttacaactgaaaccaggcatggtgcttgtggaaatttactgcatatgctatatttcagtttagcatgattttgtgcattgtcttttaaaacacttttggagaattaataatagaaatgctttaccagctaccacatgagtgttcttctaaatatatccacatgtagtcaactatttaagaattttttttttttttttttgcctaaggggataaggaaaaataatgtgaaagttgcagtccttatcagaagtaattgattagaattcagcaatgaatatgccaaatcgtacttatttcagagtaagtttttcatttttttaggttgtagggagtttttttcctactgagtgttattagattattttaatgttactattgttattaggcaattaaaat

SEQ ID NO: 33726 - DNA, 2300 bp, Homo sapien
actttttcaccattttcaaatgcttctagagccatgcttcctacctcccaaccctcccccacagcctttccctgttccttccgcttcttatggttagagagaggaaggggtttcttgtcactgtgaccttggctaggactagggaggtatgtttccattttatccaagttttgatgcctgttttatttattgagacatagaaaagatggatagtactataattgttataattttaagtaacctttatagattagaacaggaactgtaagacattttataatattttaatggaaaacaactgatttacaaatgaactttgatgcagcataatggtaagttgctggttttttacagtttaatttaaaaataagattttgcattattcagaataatacaatttcgcattaaaaatgagagttaatgataaatctttagttagattagatctgctcttgactacttctagcattcttaatcagaaaactactagtgggtaagattgacgtgaaaatatttaacgtcacagttaaaatgtaataattactcttagtcactgtcttttgacatctcaattgcagggtaaggttggaagccaagtgatcagtgctttttattattaacttatttatgagagttatacttaatttttaaaaataagttttgcttaaggttggtggaaagcattgctttgaggaaaacaaaagaattatatttttagcaaggacaacttaaaacagaaatcttatagtaagactttttattaagtatgtagaagcaaaggcactttaaaagattaccctatgtggatatctgtaaacggactaataatgttctcagttttgcagttttgccttaacatctactccttaactttcatggctcttaagtactagtgataaagatttcagcaagctatgaattatcttcttgtattaaaaacatggtatgtgatttcttatctagggtctttggaaaaaaataaaataaaaaataatgtggtatgttgaaccaagtgaggctaaaaaaaaaaaatatggaatgaagacaattgtatattatttttacagccaaatagtagatgagtagtttaaatggaaattagctattgaaattttgatttgtaatgttgattagtattttaatcagaattttgactaactgaaaaatgtgtttaaaaacaaaagattttgttattaatgaggattatttggaggtttttctggtttcaaagcataccacaaaacatggtctttttcttttttcttttatttttttgcgatagaatcttgctgtgttgcccaggctggagtgcagtggagcgacctcagctcattgcaacctctgccccccgggttcagttgattctcccacctcagcttcctcagtaactgggaatacaggtgcatgccaccatacccagctaatttttgtatttttagtagagacgggtttcactatgtttggcaaggctgatcttgaaatcctgacctcaaggcaggtggacctcaagtaccacctgcctcggcctcccagagtgctgggattacaggtgtgagccactgtgcccagcccaactatatttcttttactgataattgttctaaatttattaaaacatgactatcaagatgagttttagctgtataaaggatacttatagaagttcattcagcttccttggaatacgtacataaggatataaagtttacatttatgttaacttttaatgatgatgacattgagagttaagatttttaaacatttattttgtgctagagaatactacgcagttttacatacatcatcagttgtaatcctcatgacagccctaagagatgcaggtatgattgctactccactttatagaggaagaaactcaggcttggagaggttaagtgactagccagagttctcacaggtagcgtgtggcagagctgactttcagagccagattgtcagactccaaagctgttgagtctaatcactttgctatttaagttgtgtacatctgttttgttacaatttaataagcagttaggatacctcgttatgaaaaaaatcacattctcaaaaaactttttcagtgagaaagggggcctagtccaaattggaataacagttacttttcctgcaattaaacgtttcctgcagttaacagtttcttttcatacaggttgagactcacaaatttgaaaatctgaaattcaaaaggcttcaaaactttttgagcgctttcgtgatgctcaaaggaaatgctcactggagcattttggatttttcagttgtgtgtttgggatgct

SEQ ID NO: 33727 - DNA, 2300 bp, Homo sapien
ctttattttttggaatagtttgagtaggattggtgttagttctttaaatgtttggcaaaattcagcagcaaaaccactgggtcccaggctattctttgctgggagactttttattatggcttcaatcacattatttgttattggtctgtttggggtttggatttcttcatggttcaatcttggtagattatatgtgtctaggaatttatcaatttcttctaggtttttcagtttattggcatattgttgcttatagtagcctctaatgatcctttgaatttctgtggtatcagttataatgtctcctttttcatctttgattttatttacttggctattctctctttttttcttagcctggctaaagatttgttcattttatttatcttttcaaaaaaccaactttttgtttcattgatattttgtattattttgtttcaatctcatatctgctctgatctttattatttcttttcttctaccaactttgggtttgatttgttcttggttttctagtactttaagattgttagatcatttatttgaagtttttctactttcttgatataggcacttataggtataaacttccttcttagtactgcttttgctgtatcccataggttttggtatgttgtgtttcatttgtttcaataaatttttcaatttccttcttaatatcttcattgactcactggtcattcaggagcatattgtttaatttccatgtatttgtatagtttccagaattattcttgttattgatttctagttttgttccactgtggtcagagaaggtacttgatattatttcaattttttgaatgttttaagatttgttttgtggcctaacatatgttctatccttgagaatgatccatgtgctaaggagaagaatgtgtattctgcagctattggatgaaatgttaagtaaataactattaggttcatttggtctatagaacagataaattccaatgtttctttattgattttctgactgaatgatgtgtccaatgctgaaagtggggtattgaagtatccagctattattgttttgggtctatctctctttagctctaataatatttgctgaactgggtgctcccaaattgggtgcatatatatttacaatcgttgtatccccttcctgaattgacccctttatcactatataatgaccttctctgtctcttattatagcttttgtcttgaaatctattttgtctgatataggtatagctattcctgttcttttttggtttccatttgtgtggaatatctttttccatccctttttattcagtatatgtctttattggtgaagtgtgtttcttgtaggcaacagattattaaggtcatgttttttatccattcagccactttatatcttttgattttgctttctggttgttttgcggtcttctccttcctgtcttcattttagtgaaggtgattttctctggtgctttttatttgtgtattcgttgtatgtttttagatttgatgttaccatgaaacttgcaaatactatcttataactcattgttttaaactgatgacaacttgatgctggttgcataaacaaacaagcaaaaagaaaactaataaaaactacactttaacttcatctccccctttttaagctttttgttgtttctgtttatatcttatactgcctatgtcttgaaaagttgttgtagttattgtttttgattggctcatcttttcatttttctccttaaaatatgaactgtttacacaccacaattataatgttataatattctgtttttctgtgtacttactgagttttgtaccttcagatgatttcttattgctcattaacattcttttctttcagattgaactccctttagcatttcttataaggcaggtctgatgttgattaaatccctcagcttttgtttgtcttggaaagtctttgtttctcattcacgtttgaagggtatttccactgaacatactattctagaataacaatttttttttccttcagcactttaaatatgttatgttgctctctcctggcctgtaagttttccactgaaaagtctgggacagatgtattggagctccattgtatgttactttttttcttttctctggatgattttaggatcctttctttatccttgacttttggaagtttgattattaaataccttgaggtaggtcttttttttttttttcccgagacggagtctcgctctgtcacccaggctggagtgcagtggcacaatctcagctcactgcaagctccacctcctgggttcacg

SEQ ID NO: 33728 - DNA, 2300 bp, Homo sapien
gttcaaatgattctcctccctcagcctcctgagtagctgggactataggcacgcaccaccacgcccagctaatttttgtatttttagtatagacggggtttcaccttgttggccaggatggtgtcaatctcttgacctcgtgatctgcccacctcagcctcccaaagtgctgggattagccaccgcacccagccctagaagcccaactttatccatccttcctttcttccaaatccacaaatccttcatgaagcctttctctccttcttccatggcacccccttagtatttggtttataactctctgaaggttcttaaaataaacagtaactggtaatattaataataatagcagcaatcatatactatcttttttctaccagatactatgctttacaagtattatttctaatttcttacaaaaaccctgcaaggtagacaatattattccttccttgacaaaagaggaaacagactcagtgcgtgacagtggtttttatgttggtcttattgacaataattagacttactaagttctgcaaacttctacgtaccctgaagcatcttcttggttcacagaatccaagctggaataaccttagcaatgtgctcccactttaatccttgaattctacaagggacaatattgggttgggttggattatctcaaaattgagttcaatccataagctcaaaagaagtacaggcttggccgggcacagtggctcatgcctgtaatcccagcactttgggaggctgagactggcagatcacttgaggccagaagtttgagaccagcctggccaacatggcaaaaacctgtctctaatataagtacaaaaaaattagccaggcatggtggcacatgcctgtaatcccagctcctcaggaggctgaggcaggaaaatcacttgaacctgggaggtggaggctgcagtgagccgagatcacaccattgtactccagccggggtgacagagcaagactctgtctcaaaaaaaaaaaaaaaaaaaatacaggctagtaaaatttttgtgaactatggctcttaagcctcctcttagacgccaaataacatgcaagaaaaggctcaaatgttggaaggacttctgtgcaaaaactgcagagccactcttgagtctcactgagatcagaatgaaacaatttatgtttctgggcatcagtaccttcgactgacctcgctgctgaatacttattgtgatttttgtgctgcagcacattccaagttcaaagtaagatgtatctgccttagtaatacatgttggagaaaaatcaatttctatgataaatggcgtggatcctgtcttgtcttggggcactgttggcagtgcagtctgagcacagtgtgttcattcctgagagaccacagctctctgtgcaccatgaagcacttgctatgtctgaatgttttaggctaaagctgcagtgtgcagggaaggaaaccacggctaaccatttgatcatatctgagggaactcttcgtgggccttgaaggaaaggtggaatttgcacttgtatgaatgggattggaggcagtggggcacagagaacattccaagctgagaaggcaaggtcaggaaaggaagccgcgtgggaggagcagagtgtggagcacagagtctgccatcaacagaagagacaggaacacaggttgaagcaactgatggggcctgaattaggactctttcaacgtaagtaactgacgcccaattcaaattaggtgaattccaaaataaaaagggaattcattgtctcttataaccaggccatctagggatgctgcaggcctcaggcattttggatcctagtgcaaaaaatgtcctcaatttctctctctctcctttcctcagctgtgctcaccaacaggtgtcagcctcactctccccagctgcaggccaacttcctccaggtagcccagtaggtctggggtggctggaaggccttagtcatcgcccctggcatgtcacaccccagctgggattttgccctgagggcactgggaagccactgaaaaattttcttcaggggagtggcatgagaagcctgcagttttgaaagaccattgtgtacaatggttagacatagggagggagaaaggaggctccaggaagaatcggaatgagaactgatgaggacctgaactgcagcaggaggagagagagtggcgaggacgtctcacgtgtgaggacgtctcacgtgtgagtaacattcacaaacagcaggacttggtggcagtgggggcatgacttggggctactggctgcagttttctggcctga

SEQ ID NO: 33729 - DNA, 2300 bp, Homo sapien
actgcttacttgctgtgtgacctttgcagatcctcagtttcttaatcaataaagtgggactaatagaatctgtttcacaaggttgttgccaggattaaatgagaccatccagagaagatgcagaggactcaggcgataataactattgtcattcttgctgtcggttattcagaccatgaccttgcttcttatttccctatgtactgaaaagcaactcctcctcttcttttatgtgcatggctgaaattgtcatttcagttcagctctggtgaatcaaccacgtaggggctcagataaagaccagaactcctaaataggaaagtaattgtgaggcccgggttaaattcggactgccccactgtgctctctctttagccttgctctcacaacttagctgccactagacttgaccttttgcctcagcaggtcttcatatccctgtgaataattcagaagcgtcacaatgaaagcctgacaaccggagtccattttgcagtatggctgtctgaagcaagatagacaaaacgtatttccttccccttcatcttgaggggaggaaactgatcaggacaaaggttgctgtccaatatgatgaagccctctgtgtgatgtatcacttgtaaataccatgatagcatgaaaggctcattagctgaaggggctttcaattagggtcctccagtttttaaggacctttggcaaggctgctctgacaaagagaaatctaagatgctcaaggacctgctactgtttttctgtaactctttcctcttctccctcacacatttttcctgtatcacttatcacagcttctaaaatggataagggagctatattatgcagtatcaatctctcgcttgaccataagctgctcaagggcaggggacctgacttattaatctttgtatcccctgcacctggcacacatctccatcaacgtacatggaactgaggcggttgaatttacatcccaggtcactgtgccagagctcagaatgggactagagctgaaggcaagagaggaatcatttatttcccactgctgagctgagtgctggcttccaaggaaattccagtcaccggacaggcagcatcctccagccccagggaaggacttaagggtactctattggtacctttagtgaaagttctttctcctagttcttagaggtaaggaaaatgaagcaacctgtcctgtatcctgttggtttacaacccagggctaggagaatgtacattggaaagtgaatccttttcatcctctgcttagctgatcataccgagacagacaatttgagtaggactacagagcttggtcctaattaaatacaaggacatacttttttatcttcctccctatcaaaaggttcaagtctcagacttaactttttagtttacaaacagaaataaagacaggaaatagtcttttaaaaacgctccgtgtatccaagccaggcactttgctgatgcattatatatatttgctctaagcctgccaagaccagtagtaatgtagccatttacagttgaggaaactgaggcccaaagagcttaaacggaaaagcagagattagaggtcactcccctttgggtccgctcactataccacgaagtttctgtccttttcctccaacacgctggtgagtccgtgtgcgtgggtgactgtgtgtgtgtggttccttttttccctatagagccctccttcttgtccgttttcttgattccactttttggagacaaagtccagttcttctccaaggtctcaccatccgctcgccgtctccctctgacgtcccaaggacggtcagccactcccccgctaagttcggagtctcagcccttggctccgattctgggctccgcccccaccctccggggacccccgcctggtccctgtcccctgcgcccaggcgctccagcgggaccacggcccgcgcccgggccccgcctcccctacctgaggccctcatggccggaggcgtcgcagcctccgcccaccagcgcgcctgccctgccattggctctgcgggctgcccgtctccttgctccgtcccggaggcaggttttgcaaggagaagccgcagtacccgcggctcgggtgcagcgcgggagcacagtggagcgcagatcgcggacccgagcgggcatgtccccgcgcgcgggagcctccgtttgcggccgggcccgggcggctgtgaacttagcagcgggctcctgcggccccgtcactgccatgtagtcgctggcggggctccctgcagcccgggagcggcagtgccagtgagcctgagcccaggagc

SEQ ID NO: 33730 - DNA, 2300 bp, Homo sapien
gaaggaccagcacaatgaagattgtagtcctcagagtagaagtgtatatgagtacaccatgcttggcttttgcttttaaaaattgagcttcttgggtcaagattttttccaaaatctgtcaggacttccttttgcctctgtgggcagatagcaatgacactgtaagctggtaaatatattcggagctgctgccaaggctttgtctaaaacaactcttgacattcagggaactttctgtgctcctctctcaggagggtgacttgagatagaaagcaggcaacaattgtcgttcccttcgttttcactgaagagccagattttctctttgcaggaacagattaaagtgcaggtgagcctgtgaaggttgggggtctgttctccaccagcattacagattgccaaaagatagaacaaggctggccctttctcctctcttaagtggcttttgtttcttttatttttgtcctttgatttaaacaaaaaacgtagttttaaaaatcttttttaaaaattcatttgtgctagaattcgttgatacactttgacttgaagaatgaccagtttttgtgctgtattttgctttagagatgatattactcctccacatataagcgagagctaaaaactctctggggttttcttccttaagtggtatcaaatcaacatgcctaagtggaaaaacaccctgacacccttctctgctggggtggcatttcttgacaggctcctctttgtatgtctggagatatatgcaaagaccgtttgggaacataaaatgcaatcaattttcctcagtggttagattcataaatccctgagctatttttaatgacataatctaatcaattgagagcaagcgtattagtgtgttgacagacagaaagagatggaaaaccagtggaatagcaggtgaatgggtagggaaccactagacacttccttcccctctcccacatttaaacatcactagataactgggttaagtaaaatccaggagttagtgatttaaaaaaatgtttatacctgtcttcctaactttcaagaaaaataattattctaatggatagagtgaaagaggtcgttcttagacaaagtacagttggtccttgtatctctctcaggatcaaactattctctcaatttaaatatctttagaatagacaccaaggaggaataatttattatgaattggtagtgtcgtatgttgttactcctgtgccatgccagtaatgaaaacttaatattcatctcttggttgctttcaattgagataagatgaggatgaacggagtaaacaagctgagacagactgtgaaattgcacgatgggaattttttctttagctgcttatacactatacataggttaaatattccaactaatgatggctcttagaatcccctccacccaacctttttacattttggtcaggtatcagcagaactaagttattatcatgagggaaattaaactgtttctgtctttgagctagtaggaactgaagggcaggtatttatgtaaatgaatgggctttcatgctgggaggtgtaaagggtttggtggctggagagcagctgccctgagccctccgttttcaggtttgcaggcagcatgtgtgttctgctacatttttgttttctttgatgcctttggaagagatgagcgccaggcatagtggtgctgcttggctgaccagctgtgccctagtttttcaccatcccagtcagcggctgccttttacagaggtgtctgtcaccgctgatttacttagccactgtgaccttatagttgcttcagatggggcttgacccaaagctactgccgaaagccatttagtggtctcctgaaatgccacagccagcattctgaagaagagaaaacaaggatctcacgatttcctgtctaatagcaagagcctcctccacctggataaatgcattaggtgtctgagcccacttgctgctctctcccaccgaactgcaagcatccgtgatctccgaagttgctggagtgaataactaagctggaccagctgactccgggctccaatcagctagagcgtgatgtaagtgtttagcagctgccgggctctgaattagcgtgctgaagtagaggtagtacagcatggctagactgttgtgagaggctcagagaaagcagagggtgagatggatgagtccagcattctaagacgaagagggctccaggtaggagactgctccattcttgacatgtagcattgtcagtggccagccattgaggatttcaaagttcccttgtcattcctttactgggcacga

SEQ ID NO: 33731 - DNA, 2300 bp, Homo sapien
gtctagaaatatttcattttatatttttatcttaacatttttcatgatgagatagtgattgttttatcttttttaattacctgttttctcaattttagcatcgttgtgaatgaaggtaaagattgaattatattgattcaagattgatttgactctattttttctttaaaactatattccaaatatagattgttaagctcacagattcattttccatttctgtttagcaatcaagctaagagacaatatggttactatgaatcaaacttgggtagtgtgatagattcaatccttaaattttttacttcctgtaatagacatgtacattcattccttgcttggcctcatgataggcagagcctgccctccacctcttgactctgggctcagccatgtgactgttcattggccaatgagctattagtggatgtatcatgagcagaggcttaaaatatgcttctgcaggttcaaagtcttgtgctttggtcatctatcttgagaagaatatacccagggtagctactgcctgtttactctgggtcccagaacaaacctctgtggagctgacctacgtgaacctgtagcctggagtcaagaccaacagacccacattctccctctagacctacaaatgtgagaataagccactaagtttcgtaatgagttgttacccagctttatgatgacaaagatgactaatatgggggacaagcatatgttgtggttaagagcactgaagcacactactggaagcactgaagtctattaaatttctgtttgaatgttggcccaccacttattggctttattttcttgggcatgctgttttcttctaagctttattttgccatcaataagatatattacttacctcccaggaatgtggtaaaactaaataagatgtgtgcatgtaaattacttaaagcagtgtgaagcagaaagtaaaaacaccacaagttcctaataagttgtggctgctgttactgttgtatttgtagacagctgagcctcctcttctccttcccttgcatcatatggctttcccaaattctacatttgtgactctggagcaggttaaaacttttctgaggcttagattcattttctgtaatatgaagatactaaaaattacctgacaggattattacaatgactctaccaatggtaggcaaatatctaactgtcttagtcagttctggctgctctaacaaaatggcatagactgtgtggtgtgaacagcagacatttgttgcccacagttctggagactcagaagtctaaaatcaaggtgccagcagatttggtttctggggagggctctcttcctggtttgcagacagttgccttcttgctatatggtgagaagaaatctcatgtcttttctgtttttaataagggcattaatcccatcatgagggccccaccttcataaccgaatttaatcctaattacctcccaaaggccccatctctaaatgttaataccatcactttgtggattagggcatcaacatatgaactttggggagggggatacacacattcataccacagggctagctctggcgaggcaaatgggtacttaataaaaatagctttattatgttcacaattcatatattcctgcattctcttatttactcatttctttaagctgagttttccatgcctagtttttgagtttgtattatgagccatacgtaaggccttgtacttttgacttaattcttggtttctagcaatccctgtttacattacaatgaaataagaaagactgtggaaggcaggaattgaaggaacaaaagtgctgcaattaggaaggcatgatatattaataaggtcattcaaatagtacttgtgtgtttattgtacaatccttttgcttctgtgggctttaaaacagtaactctttggaataaggggatttataaatggcaaggagttgctaatgtggaaccagtaaaggcttttgattgcagaattacaaaatgcaaattagtagagattcagcattagagggcatggtgaatagggtagggtgtggaatcacaggggacctcatgtatagcatgtctctattaatcaatgtagcagagaaggcatctaaaatgcttttgttttaaatggacaaaatttgccaaacacctttttacctttctgcctggaaaaatgttttgatgtgttggctttccacctcctgatttttgtgtgtggctccttcccctaccccctcccgccccgccaaatgttgttgtacactgccttgtctgtttcatttccacgtgtgggttcactgaccac

SEQ ID NO: 33732 - DNA, 2300 bp, Homo sapien
gctgttggaggattttgaacagaagagtgacacattctgaaagagatcactctggagtttatgtggtcaccaaggtgtagagggtaccagggaggaagtagaccatttaggaataatctagccaagatacaatgtattttgggtcaatgtattttgacattaggtggaaagaatggtggcattctggatattttacattgaaaggaggcttattttggagttttggagggcaggatggtgagttttcttttgggtatgttaaattaggggtagtaaaaggaaactgaagtgaaaatgtattgtagtccattggctatatggaactgaagtttacttcagaagatctgtgtgtagaaggctattgaataatattctaatgtgtttcctgagatgaaggtctactttaaaagttaaagaatttgtggatttcgctttattttttgttatagggtggtaactgatttttttcttttctttgtttatcataatctggctgtgacacccatgctttcgaactttccccgaccaactttcctaaggaaagttgaggcctcttttttgtgttccattatatcttgtttgtttgtttgagatggagtcttgctgtgttgcccaggctggtctcaaaactgctggactcaaaccgtcttcccgcctcaaccttctgagtagctgggatccattatatctttttagtatttccttttgtgatgcttttttctactaaattacaattactttttacatctctagctgcctctctgtggagtcagtgactatatttcaagtatggatttgttacctccaaaggataagaggattggttggttctgtgagctcacactgagagataagctggtacctagttaacaatgggcattaacaaatgccccagagcaagttgatagttaaggatgtagaaaagagttctgagagtatcctataaacctccactggcccatatgcacctttgtggagttagaaacaggtagccctccagaagggcacagagctgagggagacttcgtgaaaatgagaaaaatggagtggaagcagcccagagccaggtgcaggcataaaaccatggaaagcagaccagatgttggttcctacttccctccttgcccagggcacaacctgaacagctacctgtggcatccctgcttaggcagacctctgggataagagtaaatttacagaccaggatctaatcctattatagccgccaactgtgtgccctcagtttcttcatctgtaaaaagacagagtttgacttcatagcctttgaaatataactgcttgaatatacttgctattttaccgcagtttggctctgtctctctctctctctttgtgtgtgtgtgtatgtgtgaaagagaaagagagagagagaaagagagagaaagagaaagagatgccttgtagtacttgaaaattagaattcttgataaaataaagctctaatttgttctagtgtttcttttcaacaaaccaggggttgccaagttttaaaacattttaaaatgcattagaggaagtgagtcagttacgttcttcatacactacaatggaagtacacttagttccaagttatgaatgctgtgaaaaattaggttcttttaataaatacaagatgaaactttcaggctttcaaaattcatgttctttctttccctccttattcatattagattgcttttgtaaagtatacagcactgcgatcttaaaaatgagcttttcgaaaataaaaatccaagtgcctatctcttgcatttccagttggtagtttcctatcatcgggtttgcctgttcacacaagtctttgcggcacaacggagtctgacttcccccaaattaatgcagttagtttattcctcgttctgatgattgccatatatagagaaagatctaattatttttatgtggcactattcctcatttatttcttggggactatgagtgatttagttaactccaccaagggaagtgtaagatgagcctcctcagggtggctgaattctattcgagagcatcacagggaggtggggaatagttgacgtgtgctgagataaactcttttacaagtatgacactgttgctttatttttttgccccagtctgcagggtgaaaaggacttttcatttcactgaggtgaaaagtgggtctgtgagtagagcgactttctttaaaaaaaaaaaaaaaaatcagaaaccaattacttgatatgcagagctgcaagcctcgttcctttaacaaaatcagtgcagtgtgcactgccgttaacctgaggaaagcagct

SEQ ID NO: 33733 - DNA, 2300 bp, Homo sapien
ctctgctccagtcttatgtctgtcagcatagtattctcttagcttctgtatactgcctacatttatgcgcagtgtgtgtgtagacattgcgtgaaagggcttatgtatgccatctcctcttcatttatgtatatcagcctcttacaggttggtcctattatggaccccatattgcagctggggaaaatgagaagagatttaaggtcatagtaagtgttgtatccagaattcagacccaaaatttttgctctaaaccagtgctctgtatcacccctctcagagaagcctttatctggagcagtggttcccaaccaggggtgattttacctcccaagggacatttggcaatgtcctcagacatttttaattgtcagcactggcatctagtaggtcgaggtcagcaatgttgctaaacatcctccaatgctcaagaaagctcctcagacaaagaattatccagcctatgtcaacagtgctgaggtctagaaactgctccggagcacagggacactcttttgtgtcagccttcaaaacatcttttgcaatacttagaaacattttttaaaagaagagcatggggcaaaaatgctggaccaagctcattaatatctattgaagtgtgttttgtcatttagtgtccctgaatgtttgggataaagtcccaaatgtaaaattgagaaaataatgccttctttgtctacctctgtgggttgcaaggatctgtggaggctctgtaagaatgtgaggagataacgcatacgaaagccttggacatgaaacatcatccaaaactcttggagtccttggtgtgaaaatattaatgtgggccacaagaattagataaagaagatcccacagcaggcttctttttgtttaccccgcctaccttgtcagcttacaccccctcttccttctctttatcctcccatttttgtaagcgagtttgttcctggtatttactgcatggactaagccatttttagatgtattttttgctgaatatatacttttttgatttagtatttcttgccatattacaccagacttaaggcagctaatttaaattatattttttctttatgtactttatacaaacattcatggatagggggagatatttaaataccatgcctttcttcaaaatgaataacaagaacattcagcccccttcattctgccctttcaaggtctaacgtacttgaaggggcaatacttgtagcatttgccacataaatgccaggtagtgtctttccacatcggggctcaccattacctagatctgtagttgccggccatgaagccaaacaggtgtgcaccgtggtcattgatggaacagatgtaaactcataaatttagtttactgaggttttcggtgagtgtggcttcccgtccgcgtgcttttcctatacaaccagcggcgtcctggcggaggagtcactgtggacttccccggagcgttgtcactgccatccctcccgcggtgaatcacaggtcggcctcaggtgcgcgcagcacacacccggagcagccgcgggtttatttatttatttccgggacggatccattccgggctccggggagggggagcggcggcccaggctgcggggctgtcccggcaccggctggggtcgcgccgcggccgcctgctccctttcccgtgagcccccgctcctcaggcgcggccggggctggtggggggtgggggatgcaggaaagctgggggcgcggccaccaagctgtccagggacaaggccctgccgcctcctcccagccggaccctggaagggtccacaaaggtgtcaggttcaagtcctccaataggcccattttttaaaagtgcttttaagtttccgcttttttcaggaggggagggcaagagcagctttttctattcaaattcttttccttgtatgtagataccaaaaggaaactcggcactgggcatgttcggatgtgaatggttttgctgataagcaacagcctccggaaccaaagcctcaaaatagtcgtctcccccgcccctcgcagaagcggcgagtggtatctgccaaacagatgacaaagtacctccgactgaatcccacagacagcgctttgagcagaacgcacggctcaactcatgtaattactgtttatagctggccgagcctgactaggagagggcagacccgagaggaaatcagtttcccggacctttgagaggaggctgtgtgttaattaaaggctaggacgggacgggtacttctcagacatgctccaagttgttcttgagatcacagttcccatcacattttctctgg

SEQ ID NO: 33734 - DNA, 2300 bp, Homo sapien
cgtgcagtccgaggagaagctgtcgccctcttacggcagtgacaagaagcacctgtgctcccgcaagcacagcctggaggtgacccaagaggaggtgcagcgggagcagtcccagcgggaggcgccgctgcagagcctggatgagaacgtgtgcgacgtgccgccgctcagccgcgcccggccagtggagcaaggctgcctgaaacgcccagtctcccggaaggtgggccgccaggagtctgtggacgacctggaccgcgacaagctgaaggccaaggtggtggtgaagaaagcagacggcttcccagagaaacaggaatcccaccagaaatcccatggacccgggagtgatttggaaaactttgctctgtttaagctggaagagagagagaagaaagtctatccgaaggctgtggaaaggtcaagtacttttgaaaacaaagcgtctatgcaggaggcgccaccgctgggcagcctgctgaaggatgctcttcacaagcaggccagcgtgcgcgccagcgagggtgcgatgtcggatggccgggtgcctgcggagcaccgccagggtggcggggacttcagacgggcccccgctcctggcaccctccaggatggtctctgccactccctcgacaggggcatctctgggaagggggaaggcacggagaagtcctcccaggccaaggagcttctccgatgtgaaaagttagacagcaagctggccaacatcgattacctccgaaagaaaatgtcacttgaggacaaagaggacaacctctgccctgtgctgaagcccaagatgacagctggctcccacgaatgcctgccagggaacccagtccgacccacgggtgggcagcaggagcccccgccggcttctgagagccgagcttttgtcagcagcacccatgcagctcagatgagtgccgtctcttttgttcccctcaaggccttaacaggccgggtggacagtggaacggagaagcctggcttggttgctcctgagtcccctgttaggaagagcccctccgagtataagctggaaggtaggtctgtctcatgcctgaagccgatcgagggcactctggacattgctctcctgtccggacctcaggcctccaagacagaactgccttccccagagtctgcacagagccccagcccaagtggtgacgtgagggcctctgtgccaccagttctccccagcagcagtgggaaaaagaacgataccaccagtgcaagagagctttctccttccagcttaaagatgaataaatcctacctgctggagccttggttcctgccccccagccgaggtctccagaattcaccagcagtttccctgcctgacccagagttcaagagggacaggaaaggtccccatcctactgccaggagccctggaacagtcatggaaagcaatccccaacagagagagggcagctcccctaaacaccaagaccacaccactgaccccaagcttctgacctgcctggggcagaacctccacagccctgacctggccaggccacgctgcccgctcccacctgaagcttccccctcaagggagaagccaggcctgagggaatcgtctgaaagaggccctcccacagccagaagcgagcgctctgctgcgagggctgacacatgcagagagccctccatggaactgtgctttccagaaactgcgaaaaccagtgacaactccaaaaatctcctctctgtgggaaggacccacccagatttctatacacagacccaggccatggagaaagcatgggcgccgggtgggaaaacgaaccacaaagatggcccaggtgaggcgaggcccccgcccagagacaactcctctctgcactcagctggaattccctgtgagaaggagctgggcaaggtgaggcgtggcgtggaacccaagcccgaagcgcttcttgccaggcggtctctgcagccacctggaattgagagtgagaagagtgaaaagctctccagtttcccatctttgcagaaagatggtgccaaggaacctgaaaggaaggagcagcctctacaaaggcatcccagcagcatccctccgccccctctgacggccaaagacctgtccagcccggctgccaggcagcattgcagttccccaagccacgcttctggcagagagccgggggccaagcccagcactgcagagcccagctcgagcccccaggaccctcccaagcctgttgctgcgcacagtgaaagcagcagccacaagccccggcctggccctgacccgggccctccaaagactaagcaccccgacc

SEQ ID NO: 33735 - DNA, 2300 bp, Homo sapien
atagtttacattttaatctatttcatatttcagggtattatgccctgaatatgtgatttgaataccgtggcagaaggtcactcatattcattcattttattttactcttatatacttgcagtgagtcttttgaattcattatgcaaacacatgtaaatcatatgcaaatgatatagcttaagaaaatgacaaaatctgatggccttaactgagccatcagacctttctttaagaaggaaagtaatatgcctttcaacatctctggggcaggagacaatttcctgagagtgatatttacacgacattggaattcgttactcagtctttgcctcacattctgcatatttatgtgggactttaagataagaaaagcattttcacatacatgatcctatttgatcctcataattactctgtgatgtaggcagaagaggaattataattcttgtttttcagatgggaaaacggacttagagaagtgaaatgacttgcccaaggtcactcagttggtaagcaaggatctgcggtctaccactagactcttcccagttctcagctcttcctaatatacactgatggatgtcttatttgaagcaaggtggtccgtcattggtctgggtttgcttagactgtgtcttgctgatagcatcttcagagatgattttgttgatgaagatggcattttaagggtgaccaggaaaagcccaaatatgtgtagcaggcctagcagactgccaagtacatatttcctccaatcccctctgctttttagcatcttttctgaaatctccagatgaacaacattcttcgccccatctactcttcagctccttcaggaggcaaagtcctttcttaaactgtgaagagtagcagcatagtctctgcagtgagattttctggatctgaagccctaatctaccactctctaattgtgtggcttggagagatcatttaatttctcttaagcatcagtttctacatctataaaatgagggaaataataatatctctcttatagaatatatggaaatattcgaggataggaaaatgcagcaaaaaactgcattaaacctgacccagtgtctgacacatagtaaggactcaataaatggcagatactatagtcatttgattcatcatagtaatactgtagaggtggtggtggtggtggtggtggtagtagtagtagtagcagtagttaagtcattgtgaactctgatactaagaactgggctcttggaaatggagtgggagaacagtaacaccaaatatatcctgtatgccagagggttgaagaacagacagaacaggtagctaaatgcagcctattgaggaatgtttgaactttggctttctttaatcattgccacatcttgctccataataagggtaattgtaatcctgcttcaaagctatttctaagaagaaatagagccaaggctggcatccctaactctactctcctttagccaggctgctctatctatggcagtgtcccctacttccccaggccaggttaggagggaacaagagagtccaccccaactgctttaacaagcctgaaccgccaggtcaagagatgaagtaatcttccccctatacgaagaccagaggtggggatggacaaggtggccaaggcagcagctgaggctcaaggagcagatacactctcaagcctgctccctcctgctccagttcccagctcagcaggtgccactgaagggctcagttcttcagtctgcccctgcagagtgctctgcccttccatgttctctgacacctcttctattcactcacctaggacaactaagaaagtggcctccttggtgagtagagcttccacagcctctctcggggaaaaggaccagaagctgttggagttggccaaatgcttgaagttggcataaagtcaattggaaccatcacaatgagagtctgtgtgatcagcccaaaaggactgcacaactgattcatgttcagtgccaggaaatgcaacgggccattctggggttgggtcctcagttatttttggcaaagatgggtggtatgcaaaagggacttccttttttttttttttttttttttccagcacagagccacagaatgctgagcagtcaacagcatttcttgttccaagatcacccttctgagtacctctctggctgccaaattgccagggccttcacagtttgattccatttctcagctccaagcattaggtaaacccaccaagcaatcctagcctgtgatggcgtttgacgtcagctgcttcttttgggtggtgctgttttctgccggct

SEQ ID NO: 33736 - DNA, 2300 bp, Homo sapien
ctttggtacttgcaaatgtttttaatgcttataatatacttacaaattttctatttctaagttcttcctgttacaaattatacaaaacaagtaggtaaaatggcagacaatgtccctaatctcatggaacttacaatcttatgaaaatgggaataattttttaaaaaatttaagaaaaattctaaatagtgctaagtgcttatagataattagaaggtggtaatgagacagtaactgggtgactacctgagattagtgaatcaggtaaatctctatgaagaggtaacacctaaactgagacccaaatgacaagagggatccatttgagaattaagggaagtgtattctagaaaaagagaccagatatcagaaaagccctaaggtaggaatgtttatgttgaagaaacagacagttgggtaaagggcaagatcttatgacaggaggttgaaaaacagactgggactgattttatagggctttgcatataccactagggatatactacttggtgagaagctatgtgacatttataagcagaggctgatgtggtatgatttatgttttcaaaagctcattcctcactcaaaagtgcatggagacctggggagacaatcatgggaagagcaggtagatcagttatgaagctaccacaatagtccaggtgcaaaatgatggtgccttaggtgaaggtggctgcagtgtgggaagagaaacatttgggatctaggatatgctttgtagggagaatccttaagacttgttgctgaattgactgttgggagatgaattgtaaattttctgaaaggatcaagggaaaatacacactgaagtctaatttttcctggacgctttaaaccaaagaatgtcactttcttttttattgaatcactacatcccattgagaaacaggtgtaaacacactgaacccattgttaagcagtattctcctagacttggctttctgaagcaacaaggaaagattagaatatgtacaatgcattttagattagaaagcactttatcttatatgccaggtgtctgaatgtatctatcccatgtgccttatatctcattgagtgtaaaatggtagacgtgagagtggtaagggcagagagttggttcctgtaagtctaggagaaatttaggggcatttccataggtaagataatgtgagttcttctatcagcctctatttcaccattttgtactttactgggttgtctgtgctctctcgtcctgtgtcctatgagaactgcctgaagacaaagcttgagtgcattttattcaccatgagtatatgtatgcggtgttgctaaatgagtgagtgtttgagtgaatgagtgagtgagtgaatgaatcctgagtagctagtccttggtcaattctttcctttgaacaatacaagttctctaacctcaactcttcttctttgttctgagattggccttttgccccaaataacttttcagctattggctctaaatctcagtttctgcatgttcattcttagtctgagcctccccttaattactgcactttttcctgcttccatcatggtggatgtccatataggatggacatgcacatagaacgtttgtgaaaaatccaacattaagataggaaacatttgttctcagaaagttttcaggttagacactctaaattctaccattattagcacattgggatgagggtcgcaccacactacttgtgatgctgtgcaagactctaccaagtctcttttcagcttcagagttgatcagaagccattagttctgtctatctggggaaccagatatcatatttaaacatgcatcctgcagagcaattcagagaagagtacaatgtatcagttgagtactaaacattggctatttgtataatgaaaaagtacagagagttccatttatgtttgtccttttattgaaaattgctacaacctggtcaaaaaattctctctgtgtggcaggatatctgccagtgaatgagtctgttgaaatcaccacaccaaattcaacattaagggccaaccctgaccacagctgagccgtgtgaagaggctgacagcggcgtggccaccacccaggatggagagaaaggcactgtgaggtgttaatggaaaaatccaacttccttttcttccaaagatgatgactgaaaccaaagtggagctttccctgtgagttttaaaagataactttctttttttttcagaatagaaatatttaccaggctttagtatatttgtctttttatattcctctctgtataataagtgcctttttaaaacctcatgttt

SEQ ID NO: 33737 - DNA, 2300 bp, Homo sapien
atactttacacttctgaatgccaacataacaattaatctatgattagattttgcttcttaagatgcctccactgacgagtgcctgtaatattaaacttctaaagtgttccactctttaaaacttataaaagctctctttgatatagcccactgaaattgtgtggctattgtttttattgctttattgtgcagccagcttaactgaaacctttgggtggcttttactctttataataaagataacattgagaaatgcctggagtacaaagtgtatatgtgtacatgccgttctcagccatctactctgacttagtaactctctaattcccttgcctccactatgtttaagaacaaaaaagaaaaacacttacatttcacatttcctccatcaagctgtctttatagagtggtctgtagcaaccattgctacttcctctctaatattttttaactccttaagatgttgttgctgtcctcactgctggactggaatctgcgtgatgattccatcatgggcgaagccccaaattatttagccttgactcagtctctcctgtctggatgcctttgcaggatttagtcttagggatcacattttcctacttgaactcttcttccttgtttttgggatgttgtctctaaaccttgactttccttcctcagttacatacattgaacttcactatttggcccttggatcatttttttttttttttaacttttgatttgtccttgtgagctcttccattccattgaattcagccttgcctaattgtggccgattgccaaatccctagcatgtttcctcttctgaatcacagaccagggtttcatcagccactagcacacttgcacaggggtgcccagaatcaccgtcagcccatcaggtcacctggcttctctttgcctgatagtgctccaaactctcattaatgcaggatcaggcaccctttgctcctctcgttctcgccgcacatttaagcatttgccacatcccacatgttctttctctgcagtgtttatttcactcctcccctttccacacctgctgctgccaccctggtttgtgtcctcactacctcttggccagacctctgcaacacacctttctcgcacactgtggttagattgatattcctggagtgcagctctgatcccgttgctcacttttcaccaagccctttccgtgttccacactgtgggctgaattactcacaaactcagcatgggcatgcgtgatgtcctacagcccctacctaaatctctaaccccaatcccactgctccctctttggctccagacggattggactgcctgttctagctcttctcagaatatgacattttcttggtcacttctgtaactagcgtccgaccacacatgccattctgtcttcagattcctgcagttagtgtgctttctccctcgtttgaaccctgcagtgtttagtttctgcctctcttatgacatgtactagtgttgtggctctgtgtactctgagccacattatcagcgataatgtcacattatcgctaagacattgcctcatgccgacactcctcccctctgcccccgcccggtgttcttagaaggcagggactgccttactaatctctgttgtgtcaagcaatagcacactggcctgtgtctgtctgccaaatcgattaagtacttgttgaatggaagtagaaattccaattaacacagatggcaaagtgtgctgttcattcttaagtctcgtttttttcattcctaggtgaagctcgtgtgtggagtgccacggtacaatcagacgacagatggacagtgtgacaaaagtgtcagaaaggattgggcctcgctgtgagagtcagcctggattcaaagtgttgacaagttgctgaaaaggaagccagtgagaggactgtggcacgcagaggaagtggagccctgtcttcggtcacaccattgatggaggacagatggacagccgtatggccagtcacctctcctcttaaacctttggagagtggtcctttgtcctctgctggacacataataggaattctaacacattctctgaattcacttttcataaaaacgtaaaatcagactgctctgtacaaccaggctcaactgttgcatggtagcagatttgcaaacatgagtgctgaggggtaccagtacagagcgctgtatgattataaaaaggaaagagaagaagatattgacttgcacttgggtgacatattgactgtgaataaagggtccttagtagctcttggattcagtgatggacaggaagccaggcctgaagaaat

SEQ ID NO: 33738 - DNA, 2300 bp, Homo sapien
tacaacactagcagcttcgtgaaaactgtacttttgatttactaattagtgagtcatatagatcaagtgacagtaatacaattatgtacattagttggtgtcaaatttggacatacgaaatatacagaaagttgatggttttctcccaaagcaggaattactgattcagttctaccagcagagggctcccttttttaagctaataaagaacatgtgtcttgcagatcactttttaaacactaaaattcaacgggaaaaagattcagctcacactttcctaatataataggacctctttggtagatgattgtacatattgtgagaaatttgtttaaggcaaagtttttccaatctatttcaagactttctatacgttgagagagtactgctttccagtggcttattttcttctgaaacagaaaatatactggtggacttaacagagcattttaatcttagaaggttttgacatgaaacatcatgtgaatccagacaggtatgcttaggagactgatgtttccaatgtttctagctttagaaaggctatttttaaaagtagggcaagattatgcagctcaggatgcaagggtattctctgaactaaccatatgtccctatgatcagatggcagattcacttatagactgttatttccattgggaaagtttttcaatattatatcagttgcactaaaggaaagtttgtaaaatcactttcattgtgggtttaacagcactttccagatatttcaagtaaccctgaagctagttgctgctgttggcctgtgtggactttatgtgaccactggatcactttcccatgcagagtatgagggtattattgaaagaacctatgtcttcaaagggaatgaaatgttttgttttaatttaagcaagctaaaaatagaaaacagaaaaaaccagagttttgttaggggtgtgaaattttttgcatgtggcttaaaagattaacttcagttttgtccatttttttttacgttctctagcaaagggaagtgaggagcagggacaatgggtagagaagggcatttgaaaccatcagaagattgggttctagtcttagggctataatcttctgtaaaccacttcacctccctgggtcagatttcgttttcccctctatggcatgcaggaattgattgaagtgaactctaaattactttctggtgtaaagtttggtgatttccctggataaccttaaagctatctatgctcatgcaactgaaaattttcttagatcaaattttaattaaatagtagtcagtaatcccaagtctggtccattgccactttctcaaataaagggcaaacatccgcttagaaaggtatgcccttctctgcccttctatcctttaccccattagctggcacataaacctaatgcagagacaccttttaattagcaggtcatatggccatttaaatgcgagttgcaatcgacctcataaaaatagccgcagtgttgttttattctgaatcgtcacatgatcatggagtatagtatgcatatggtgtggggtttaatattcgtccgaggatgccctcctactacttactattgaacatttttgtaatctcctccctgcccgagttgctcacaagggctttcctgttacacctgcagggctgtctgtgctggtgtgtgggaggaggtgcaagaggtggacacgagcgaggcgctgtgttctgggttgttccaagaggttcaggcctttacaagtgaggctttgattctattttttgctgaactagctcagccacttcctgtgtttggctgtgcatagtgcctcgcttcactgtcggctacttgagccccgcgagccagccagcgcgctcagcagccagtgagactattttaggtcccctcacaatggccttctcatttcccaggcgaaaatgagcaagttggtcttgcattggccacttgtcagccgatgacaactttgacttgggctcccctccccctcccgaaatccctagctcagcaaatatttgaacctgcccaagttaatcatgaagctgcgatctttatctaagggagacgtgcgagcgcctgggctcctttcctccccgatacagtagcgaaatccagttggcttctcaatgaggagccggcagtgagcggcggtggcccggacgcactgccgggcggggcgtggggcggagggacgagccgagccgagccaagcggagctgggccactgtgcacgcccggagggtcctggcggcgcccccgctcctgcgcgcactctcggcgccggacacgagcactgcctgccg

SEQ ID NO: 33739 - DNA, 2300 bp, Homo sapien
agggtcctggcggcgcccccgctcctgcgcgcactctcggcgccggacacgagcactgcctgccgggaacaggctggggggaggtgcgggggcttggcccacttggtggaagaacagctttggggattttttttttttcattgtcggatacaggcatttcaaagggaaaccgttgaaatgcataacctgcaaagtaagttgccttgaatttgtgcacttctctgttccttatctgagcggtgcctttctgtagtttgtcttggagtacgtgtgtgtgcgtgcgcccctgtaagcgctgcctggggaggacagatgggagattaggggagacactccccctgtcctcgagggggacagtggctgggaaagatagggtttaggttggaatttcagtaagaaggtactaattacaacgtgcttggttggaagttggtgccaggccagggcttggagagaccatgggaaaatcacctgtctccctgccttctccctgagttagtttgccacagaagatccaacagccagactggtttgcaccgacggttcccaaatgcatggactggcactctgggctgttacacccgccacagctgctcggagaacttgtctccttgcttcgggggagggtcgacattttaattaaactaaaaaagaatgtttttctgaatcttagggcatacagccacttttaccatttttatttgaatttgagttcaggtaaacttaggcaaatagaaaagtgggagagggtgggaagagacaaggtgagcctgcttttcccaatactgggaaaatgaattaaactagacgggggacgtcagagaacagaatgccttgcctttggtctgctttttaatatattttatgatcccaaattttacagaaagtctcaagggtttctgtgttttttaaatggtcaaatatgtgacatacatgtgtacatagatcacagagccccactgtagttttttaaatgagccacatttaccttggggaagagcccctccccccccgccatcataatattgtgaatgtaaagagagattggttcacaatgagaatgtacagtaggctcctataagggtgacaggattatatgcagaatgactttgaagagccaaaattgatttatttatgttaagtagtgctaagaaggaatatttgtcccggagtgaggcatttgagatagagggggaaaagcaaaaaaaaaaaaaaaaaaaaaaaaaaagtgattacatcatcttcccgttcaagcagtattagtagcgaagatgggttcatcagtgaaatattttgcaaagataaatatacctccactctgcattctgatctatagcctctttctttttggaagaagcattttctttgcccagtttttttaggcagtcacattaaaattctcattaataatgttgacagacaattacgtttattatttctgctaataggcatctgcattcctattcagaattttcattgttagtctataaagtctagttttaactttggaatgtttggtagaggaggacatctatacattttcttttaactgtcctttctaatgtggtacatttgtgacagtgtttgaattctgggttttcagtgaattatggaggactaaaataccaggagtagtccgtactgcttctcttatacatgagagatatctaaggactataaaacataacttaagtatacccttttaatgcctttgtaagatttttaaaccaaggaatgactgggctatctataaacccagatgcactaagtggggagaaaagctcggagctgcagcatatcagcttttgtcaacctgccaacagcagagcgtaccatgctgcaaggagtaataaacaaggaattagaaaactcgctgctggagaacagtcaaattaaacacctttttgaaaggatgagcatgtatatattgcagttctattaaatgtagcttcttagtgaggttggcattatgttaaggctggtatggaagagaactgatgaagcaggagtggtctggtgacatttttctgacttgattggctggggcgtgtgatgtaataggtttcagtgcagccccttataggttttaaaatgaattccaagacaccattacaaagaaagccggactcttttcttataactgagctcagccaaggaaactcttgcacaaatgtacaatactgtttggaatatggaagacctggatttagaatatgccaagacagatataaattgtggcacagacttgatgttttatatagaaatggacccaccaggtaatactgcagtattattgtaga

SEQ ID NO: 33740 - DNA, 2300 bp, Homo sapien
aggatgagcatgtatatattgcagttctattaaatgtagcttcttagtgaggttggcattatgttaaggctggtatggaagagaactgatgaagcaggagtggtctggtgacatttttctgacttgattggctggggcgtgtgatgtaataggtttcagtgcagccccttataggttttaaaatgaattccaagacaccattacaaagaaagccggactcttttcttataactgagctcagccaaggaaactcttgcacaaatgtacaatactgtttggaatatggaagacctggatttagaatatgccaagacagatataaattgtggcacagacttgatgttttatatagaaatggacccaccaggtaatactgcagtattattgtagagagttagttaatttcgtggctttttaatttttcgaaagctactgtaaaagatcctttttggatttctgtttttattaatttgtttcattgataaaaattagtttgctcatggcttaaaaattaaacagattgtttgactgtctgtggaagcaagcagctcaggctgtgtgtggtaaatgcttattcttacttgaatggatatgaattgaactccagtttttcactggtgtcttttgttaatcgagatccttccctgggtgagttatgttgtgggatattgtccctgtaattaaaatgatgcatcttttgtgctgcttttctctgttgccagtggatgagaacagtgtagcactttgcagtgataacacttggtactttagaaagcatgtaaaatgtagcagtgattacaactcagttctctaaatgttgagactttgcttgctctctcatattaagatattataatgaaaaaagaagttgactttccattattgttagtctttgtaaaatattcttggtagatacctgaaatcattttttgtataagttaaaatagtaacagtgctttaaaacttatgacagaatttacctaaaaatcctagatttattttgtttcctaagtaagttgttttattccaatgttagctctccccctgcccccatttaaggtattcaggaatactgcagtcttttatttgtcaccaattggtatatatgaatactgatttgacattgaggaagggggatatcatttttaatcagacctagtatatagagcacaatttatccaacagaatattaacatattaaagagatttagggcacagatgagagtttcttaaagtggcttttggcagaacagtgcctgaaatactaagattagagaaacccaattgctcctcttaaaacatactgctgtagatgagcctttttattactgcaacagagtttgtggaggacagagaccaaatttgtctttcgtaattaaataagaggaaattaaagccaactcatgttattcctgctactcatatgttcatagtttcttactttagatggatttgaccaggcatgaaactttaatataactagaatctagaagtacagaatgtcatgactctggatttactttgaaatttattcacatggccagcccaatttatttgttagtttctaaggctctctctcttttctccttttcagtttcatttctttttgagccatgctctgaaagattttttttaagaaaattatcttccatattgcatggaattgtgaactaatgctatatatttcagttactctaactttttatttttttaaagtaaaagtattcatctaaagaaatttagttctaatgtagttgggattgcgaacaactttttctttttcatctgcagcactgcctcctaaaccaccaaaacctactactgtagccaacaacggtatgaataacaatatgtccttacaagatgctgaatggtactggggagatatctcgaggtaaggctacagaaacttcattttcagagagttttagattaaaagaaagaaaagcaccagcttgctaagttccatttttaggatatcatccaacataagcatgaagcatagttggttctcttccaaagacgaccagaaaaagtcactgagcactggagaactgtgggtgctggatgccacaggaaattaaatacccgggaagtttcattattgacagagatgtcagtgaagtgccagagtgaagtggcactgcctaagaacagagtgtgaaggcactctatctattaagcacaactctaagaattcttgccttaaacacaataagaaaacaatgccattttatgttagctttgggaagggggagtaaggttggagaaactcttttgagatcatgagtttctgtgct

SEQ ID NO: 33741 - DNA, 2300 bp, Homo sapien
aagacagataaaaagagcagactgggcctcctaaactgcaaatcaatctgttttctttttcctatggcctacattatgaaaataaattagaaagtaacatatcactcattaatggtaatggtttttagttaaaatgctagaagtactatttcagtaagcaggtgatctaaagtcgtgatcttcaaactttagtatacattaaaatcactcagcttgttgaaacagattgctgggctccagtgtcagagttagtaggtcaggggtagggcctgtgaatttgtacttctaacaggtttccaagtgatgctgatgtgaatgctgttagtctgggaaccacactttgggaaccactggtttaaagcaagcccaggctatttcctgtgattcatcattgaccacctgtgcactgtctactaattgaaagccacatggttacctccccagcaaaaagttaccagtgagcctttttttttttttttttttgcattctcttgtgcattttccattgaaagtctattacattacagcataggggcaaagagctctggcttgagaagcctatgcgttcaactctgttctcagatgctgcatgatcttgagcaagtcatctcacatctatgcttgttttctcatctaaagaatgggaatataatcatcttacccaggtaattgtggaaagagtaaaacaaagagtttaacagataataatcacttgatatgtcagagaccagtgtgtgtatgtggggggggaattaccctagctcttactggaataattgaatgataattacttgagtgagggaagggttcagaaaccaaatgggggtggtgagggaaaccagacgtttagcaacagcataaagctgcaaccacttcttgggctggagtaaaaaatgggagtaggtaatgtttccagagccttctcctgagagctagagcagagggggtttgctcagacctgaaaatgagggtctatctggcaggagctagagccagggaagagacacctagaagccccaggacaagcgctccagcgaatatagttctctgtgataccaaacagagcagggggaaagcagaacatcagtctgggagctactgccatactcaaaaaatattagtcattgttgccctgagagtaattatttgtacgtccctctcccctctactactagactatgtctttcaggtctagaccctcactgtgtctacatgtaaacaccatatacatgcaaagtggtattgccttaagtccacttagcaatcaaaacaaatgggaaagttatcctacagtaagacttgtgtatcttgactaggtgatacaatgtaaaatctgcatttgaggtgtaacttagctccctgtctacagtcccatgtcatccctgcactgtgagtgttcaaaatatgcagactgcacaacagagacaaaactggacacttcgttcttagaggatgattctcaaggtttgggtatgaatgcggaggaggcgagaattgaaggatgatgggcattctagttttcctatagcgagaacgtgccttgaagggacattacctaggtgtatttcctcatttaagatggtgaaattggccgggcgcggtggctcacgcctgtaatcccagcactttgagaggccgaggcgagtggatcacgaggtcaggagatcgagaccatcctggctaacacggtgaaaccccgtctctactaaaaatacaaaaaattagccggacatggtggcgggcgcctgtagacccagctgctcgggaggctgaggcaggagaatggcgtaaacccaggaggtggagcttgcagtgagccgagatagcgccactgcactccagcctgggcaacagagtgagactccgactccgtctcaaaaaacagtgaaattatgaaagacagctcatatgtattacttacatgtgaccactcaatgtccttctcaactttacaaaaatgagatactgtgataacaatcaaaagggagtgggtgggagacaacagaaatagcagcaacatttataagccaaaaggtagctgttttagaaagatttcttaggtgataagtgaaatttcaacccaaaacttcagtttcaaaacaacctttattctgtttgaagatctaatacaatgcattaaagcaacttaaaacaagacatagctccattgaatctataacttgaacgaaatgtcaaggaggcacactacccccaccccccaccccagttgccttgtgaaggcaaagttacaactgaccgtgacatcctccctctcgtcaaaagaccaactttattttaac

SEQ ID NO: 33742 - DNA, 2300 bp, Homo sapien
aaacattgttctgagagggggatccataagctttatcagatactgaagtggtctgtggtacacacacaaaaatgaagagaacaagaaagtggtaacagtgtttgccttgggtgggggatgaattctaggggtctggagtcaggagtgggaaagagattcctattctttgtatatccttttgtgctattgggatttttgctgtgtgcatggattacattctaaaaagattaaaacataagaaaatgtatttttaaaaactacctccccacatttttttttttaaagagacagaatcttgctctgtcacccaggctggagtgcagtggtgtgatcgtggctcactgcagccttgaactcctgggctcaagccatcctcctgcctcagcctcctgagtagctgggaccacaggtgtgtgccaccacatctggctaatttttaaattttttgtagagatggggtttcactatgttgtccaggctggtcttgaactcctggccttaagcgattgtcttgcctcagtttcctaaaatgttgggattacaactatgagccactgtacccaaccctatttttcctggattttctcttcactcttacttcctacgttgccttttctgttttatacaatttctgcaattgcttgtcttcctcttcctaaagtctcttcctatctctaatgcttgcatttgattttaaagctgttctggcacacttgaatagaatcctgcataataatctttcactaatttttcccccgactccttatcaaatgttcactaaagtgtatagttatttcttagcatatatgcacatacttgcaaaatagaccactataatctgcacaattcttcttaaattcagcttttaaaacatgcctttaaatgaagaaaatatttgtataatgagaataaattttgaaggttgtttcacattcaagattctttgaggtttttaaccagaacaggtttggggacaacaactgatgcctcctttaatcacaatacatttttaaaaagttgagatttactaaaatctacctttcaggattttaaaatggatgtgcaatctccaccacttttattgccaagggagcacgcatctgccctggaaaaccttcctgtggagcgatgtcagcagagataaatgaatgagagtacatgcagttctggaataatagtgcaatttggctaaagggtgacatcatcttttcactgttgtatgtgccattctaagtagcaataagtccagctgagctagagaatgaattataaggaaagtacattggcaaggtggaataaaatataaaaaattgaaaaagaaggtagctttgaatagatccagtccgcaatatattttttgatatggaaggtcttgatttaatcaccacatcataatttgccattattttggattatgtggaaagatgcaaagcttctttcctaatggctggtttgctatatatacacatgtgtaccaccagagtataaatagggacgttggaattgattttagtctttaaagtgtacacttaaatgctggaaaataaaatgcctttatcagttaaatctccttactgtgattctacatgcctcattggtaacacttgaagaagggtttgctgggttttatttggatcgagaaaagaatgccatcatccttcatgctgatgaacccaggggaggatcagtttgtgattctgcatgggttcttgaggggtcggccagtattaactcattgctttttttctctttaagtaacagctttattgagattggattaacatcccaatatattgcttctgttctctaattttttagagtgcaactcaaacccctaatatctccttgtcttctaattcctcaggcaacagatgactttctgcaaaggcactgataatagctatgaggaataaatattgcagatggattaaatcaaagaatcaaatttcaaagccaaattagtcgtgaaaaggagggagaagcagaaatgaagaaaaaagaaccacagaagtaaaatcagcagcattgaaaagaaaatcatctgctgtttgaataaagacccaagatctttcattgttggatccccaaagccagtgccttttttgagcagcaagtcccaagatcaagaaatcagaaggaactaatactttaactaattagtagtaatgaaaatttactagacatcaatgacaaatttacaaggcaaatttatttccaaagtacattcatatatatcacaggtaaaatgaggttttcacaaacaccattttaaacatagggtttatttgcaggagctattt

SEQ ID NO: 33743 - DNA, 2300 bp, Homo sapien
tgggattcaaaccaagactgacacaggaacccacattcctaaatttttagcaacagaaaaataacctttataatacccagtcctacttgtcagaggcgtttgacccagagtgcctccatcttgaataggggctgggtaaaacaagggggagacttactcggctgcattcccaggaggttgggcattcttattactattattatttttttttttttgagacggagtttcactcttgttgcccaggctggagtgcaatggcgcgatcttggctcactgcaacctccatctccgggttcaagccattctcctcctcagcctcccgagtagctgggagtacaggcatgcaccaccccacccgactaattttgtatttttagtagagacagggtttcgccatgttggtcaggctggtctcaaactcctgacctcaggtgatccacccgcctcagcctcccaactgctgggattacaggcatgagccactgtgccctctgcctatggagtagccattcttttattcctttacttttttaataaacttgctttcactttactgtatggacttgcctcgaattctttcttgcgtgagatccaagctctcctggggtctggatggggacccccttttcaggtaacactacctgacctgtttttacagatgtgcctggattacacagtttcacaggcagaatttaaagaaaatcaacgctttccttttcaaaaaggagacaaaacagtttgcagcaacacttaacaaaatcctcttccttctcctatgttctgtcctcacacagttggattccagggcctctagcaacaacggttaccagtactccaggccccacacaaaaagccacaaaagcagtcaccttcctccgttactttatttgatagatgaccccaggctccctgtggcaaagaagaatcctttctttttctttctttttttttttttttccagagacggtcttgctctgttgcccaggctggagcacagtagcatgatcatgccttattgcaaccttgacctcccacgttcaagcgatccttccgcctctccctcctgagtggctgggaccacaggcatatgccacgcctggctaattgtttttgtatttttgatagagacagggttttgccatgttgcccaggataagaatgtttctttagaaatctggaaattgcctttaggttcccttaggagtaggagagaaggccatgaagtttcgcacgtggtcactcctagaaaattgccctgggatagtttgctgaggaggcaaattttggtcaatactagtttctcctctccaaagtccatcaaaggcattgttcaaaagaaatggccgtaccactatttgtaattgattctctacagcttcaaaaatagttatctctggttgggggaagggcacgtgaacttttaagacttcgggccttctcatcacaaaaatgatccatactcacaaaaacttagaggcagagggtatgttaacctagattaagaatctctaggccgagtgcggtggctcactcctgtaatcgcagcactttgggaggccgaggtgggtggatcacctgaggtcaggagttcgagaccagcctgaccaacatggagaaaccccgtctctactaaaaatacaaaattagccaggtgtggtggcacatgcctgtaatcccagctacttgggagactgaggcaggagaatcgcttgaacctgggaggtggaagttgccgtgagccgagatcgcgccattgcactccagcctgggcaacaggagcgaaactccatctcaaaacaaaaaaaaaaagaatccctaacgcagaggaaaagattggtgagctttgtttaatcacacacgctgtacattttccacgccctccccctctgccctacaggaatccgctgtacttctgacggcccataggtggcactgtagggacaggtaagtgcacagggagcgccacccggagaggctgataggaggcggagcttcaatgcgacacaacgtggcgggaggagcctaagggacgaggaaaggcgagtgttctgcttgcgcagacgcaaggctgggcactcccccgggagtgagggttgctgggcctgatgacgtggcttggcaacgtccctaccgccgctgcttcccgggaacctggcgccgccggaactgatcgcggcctagtcccgacgcgtgtgtgctagtgagccggagccggcgacggcggcagtggcggcccggcctgcaggagcccgacggggtctctgccatgggggagtgacgcgcctgcacccgctgttccg

SEQ ID NO: 33744 - DNA, 2300 bp, Homo sapien
atttctttgaaaatcctgttttaacagagtatctttaagaaactttacatacaatattttgtttgttcctcctgacaagtatttgataaacttttttaactgggagtatacttaagattagaggtacaaagagactgaaaagaaaacggattgttgtgctctaatcacttgcctaaacacaaactttgatgagatttttgcaaatttagtttttgggctatttattattattattattcactgcataatcctttcttagtacagagtcctcatgtagtgtgaacattaatttattctacttatacgaaatgctttttttttttcttttttgagacacagtctcactctgtcaccaggctggagtgcagtggcgtgatcttggctcactgcaagatcactgcctcctatgttcaagcgattctcctgcctcagcctcccgagtagctgggactacaggcgctcaccaccatgcccagctaatttttgtatttttaatagagacagggtttcaccatgttggccaggatggtctcaatctcttgaccttgtgatctgcccgcctcagcctcccaaagtgctgggattacaggcatgagccaccacgcctggcctacatataagaaattctaaataaagatttcttggaccttgagattgatagtgaccaccctctgtgttaataaaaacctgttaaagactcttgggagtcagctgggcacggtggctcatgcctgtaatcccagcactttgggaggcggaggcaggtggatcgcctgaggtcaggagttggagaccagcctggccaacatgtcgaaagcctgtctctactaaagatacaaaaattagccaagcgtggtggcatgtgcctgtaatcccagctacaaggggtgctgaggcaggaggattgcttgaacctgggaggcagcggttgcagtgagctgagatcatgccactgcactccagcctgggcaacagagcgagactccatttaaaaaaaaaaacaaaaacaacactcttcgaagtataattttggtaagttgggaaagagattattgactaggaaatattaagcaccagtgacgtgctttttttttttttttttttttttgagacagtctggctaggttgcgcaggctggagtgcagtggctcaatctcaactcactgcagcctctgcctccagggttcaagcaattctgtctcagcctcctgagtagctaggattacaggtgtgtcccaccatggccagctaatttttgtattttttttagtagacacggggttttgccatgttggccaggctggtctccaactcctgacctcaggtgatccgcccacctcggccacccaaagtgctgggattacaagcttgagccactgtgcctggccaagttgtgtgcatttttatataactattttggcaatgtgaaaggtagggatatataattagtaatttcttcattttcattatactatttcaagatttattactgaattttagagaaaataggaattctcttctttgatattttaagatataaaaaaaattgtgactcctttatttttgtggcttgttagctggttctgaagacagttagaaaataagagttctcggccaggtgtgatagctcatgcctgttttcccagcagtttgggaggccgaggcaggcggatcacctgaagtcaggagttcgagaccagcctggccaacgtgttgaaacaccatctctactaaaaatacgaaaaattggctgggcgtggtggcgcacacctgtaatccctgctactcaggaggctgaggcaggagaattgcttgaacccgggaggcagaggttgcagtgagccaagatcgtgccactgcactccagcctggtgacagagcaagactccatctcaaaaaaaaaaaaaaaaaagttatcaaaatattgcaataggagttttactaaaataagtataattaattctccagtatgatttattcagaggataacacttcaagttctggcatatttgtttaaaataagtgtctttacttaaaactgtatcttgtgtttaatatggattaatattaatatattaatgtttcaatatttacaggactgcattttttatggttttgtttcaaaagccattttcttctgggaaaactattaccaaacaccaggtaagatttttgcagaatcttttattcctagcagcttctcgtttagtgggccaggaggcaatgcttattttttataatgggtacttaatgaatgatttaagtatgccacagaacaattttagagttaacttgctctt

SEQ ID NO: 33745 - DNA, 2300 bp, Homo sapien
taagagttctcggccaggtgtgatagctcatgcctgttttcccagcagtttgggaggccgaggcaggcggatcacctgaagtcaggagttcgagaccagcctggccaacgtgttgaaacaccatctctactaaaaatacgaaaaattggctgggcgtggtggcgcacacctgtaatccctgctactcaggaggctgaggcaggagaattgcttgaacccgggaggcagaggttgcagtgagccaagatcgtgccactgcactccagcctggtgacagagcaagactccatctcaaaaaaaaaaaaaaaaaagttatcaaaatattgcaataggagttttactaaaataagtataattaattctccagtatgatttattcagaggataacacttcaagttctggcatatttgtttaaaataagtgtctttacttaaaactgtatcttgtgtttaatatggattaatattaatatattaatgtttcaatatttacaggactgcattttttatggttttgtttcaaaagccattttcttctgggaaaactattaccaaacaccaggtaagatttttgcagaatcttttattcctagcagcttctcgtttagtgggccaggaggcaatgcttattttttataatgggtacttaatgaatgatttaagtatgccacagaacaattttagagttaacttgctcttgtcttttcagaatggagactttaaatcataaagtactaagatcatggaatgtttttaaaaaaaacaagagggtaaaaaaaattataaagcattcatgtaattgttttcttcagtacacacttcttattctgaaagatttacaaattggacatgaaagcatgcccaagagcctagtacaaatgtcactggaaagctgacaaagcataggggttaagagtgtgatttctggagtcagacaaagtcatgttctgtctgtcctccttactgacccttactttgggcaagttacttgatttctctctaccttaatttgctcactgtaaaatggagataacagtaacttcctaacagaactgtgaggaaaaatgaattaatacttatgaagttcttagaatgatgcctcatcatcattgtgacaatgtgacaccctcatgatcattgtcactgttctctttaggcagctgtgattcaaactagaaatgtcctacattttgcataatcatctcacatcgtcacttctttgggcagcagttataccatagtacatgtttgctttatgccatgacttacaaacctgcgtcataatttttttattagaaagacgaatttaagtacttctgtttcagagaccaagaacattttttaaaatatgattaatagtctaaaccccattttaacttttttctctcctttcagataattggatcactaaaaattcctggtagaaaagaatttaaagacaaaaagttaaatgatcctaggaaactagtgggaaactgagaaatcataaaattgtactctgaagaaaaagatttcaaaatctaccagcagacaagaatatagataatggaaaacagaatactgtcctttttttttttctttctttttttgagaaagagtcttgctccatcgcccaggctgcagtgcagtgacacgatcttgtctcactgcaacctctgcctcccgggttcaagcgattctcctgcctcagcctcctgagtagctggaattacaggcacccaccaccacacccagctcatttttgtatttttagtagagacggggcttcattcaccacattggccagcctggtcttgaactcctgacctcaggtgatctgcctgcctcggcctcacaaagtgctaggattacaggcatgagccacagcacccggcccagaataagaatactgtcttggaaatctagacttagtcaagggatcttatgttttctatttacaaaatatgtaatgatttcacctttaaaatatttgttattattatctttctgtattttatttaaaatttggatatatagcaaaatatatgtgactgaaatttttaatttttttgtttccatttatagtggatcaaaatatttaaacatgcagttgctgggtgtattatttcactcttgtggttttttggcctcactctttgtggaccactaaggtaaataaaaatgcatattttgaatgtgtgtttgtatttcttcattttgaatattatttttgttccactgtgttttacgtcaaatatttatctgtacaaatgtgtctagcacttttatagcatcagagagaattcaacagatagaacaaa

SEQ ID NO: 33746 - DNA, 2300 bp, Homo sapien
gtgttgtaaagttggttttcatacagcttccagaaagctctctgtcgacgttggtggagctaaacgtcttcaagctttatctcatcttgtttctgtgcttctcttgtgcccatgggtcattgttctttctgtgacaactgaggtaagataagagcaagaatttattggtattaaattgctagtaaaatgaattgctattaaatttttagttcactgtattcaataaattatattttaatttgaggttgaaagtggcttaaattgtctttgctttttctttgtagttttttaaaaaaaatttggagttaattttattgtttatagaaaatacaaatcaaatgctattacatttacatatccctcacattgctatggcccaaaggaatcatttgaagaaggagcaattaaccatgtgttaggcttaaagattgtgtgtcgcctagtgttcatcgaatgattacacaatagtgcttttgttttttaaaactttggagaatactgagaaaatgtaccaatatcttatagcttttatatgttggcatattatgaatcatattgaatcatgcgatttttatttttttaaaagattaacagaaacatcttgtaagatgtgaactttatacatgtatagtcttgacaattcttttttttaatttctagagtaaagtggagtcttggttttctctcattatgccttttgcaacggttatcttttttgtcatgatcctggatttctacgtggattccatttgttcagtcaaaatggaagtttccaaatgtgctcgttatggatcctttcccatttttattagtgctctcctttttggaaatttttggacacatccaataacagaccagcttcgggctatgaacaaagcagcacaccaggagagcactgaacacgtcctgtctggaggagtggtagtgagtgctatattcttcattttgtgtaagcattccccccttttttttattttaacaaatttctatttatggattttgatggtcacatcatttacttattttgggaaattcttcagtgcttgcatttagtgccgacagttactgtgttggttttggtagcttaaacttcgaaaatttaaacaatattgttttttctctttgtagctgccaatatcttatcatctccctctaagagaggacaaaaaggtacccttattggatattctcctgaaggaacacctctttataacttcatgggtgatgcttttcagcatagctctcaatcgatccctaggtttattaaggaatcactaaaacaaattcttgaggagagtgactctaggcagatcttttacttcttgtgcttgaatctggtaagatttttaaatgttaattgacatatcctaaaagcataatattttaattttgacagttctggtataagtttagtacttcccaaatttctgataataagatgagctaaaatttaaattttttctaagtataatagcaagattacgagatcatattcagattccttaggcaatccttaaggcatgtgccaccgtgcccagccacttaagcaaacaatttgtgaggcattttagaagcattgatttagtatgttccttcaaatcagtaaatatagtagcatttaaagagttctaataacttacaggatctcactattagcaatcagtgttataaatcacctattgctaacattttataacctagtttattatttttatagacatataaacaaaaccatttttaaatagtttctaaaatggatttatcttagttttttacaatttaatagtttgtaaaatgggtttatcttagtttttacaatttgtgtgaaatagggtttctaatgtaagtggcagttaaataactaaacaattatagcagatcttcaagtaaatttggataattaagggttaaaatcctcctaattgaaacagtgcccaacatactcctccctttttttttggtgacatttttagctttttacctttgtggaattattctatggcgtgctgaccaatagtctgggcctgatctcggatggattccacatgctttttgactgctctgctttagtcatgggactttttgctgccctgatgagtaggtggaaagccactcggattttctcctatgggtaggtacattgactgtcgaggtggtatatcttaagtgcaaattccatcttaaggaacagaattatattacttatattacttttaatacaaataatttccaaatcttcatttttaaaaaatgtgaagtaaataaggggatgtgaatcgggcatttgataaatactgaat

SEQ ID NO: 33747 - DNA, 2300 bp, Homo sapien
caaaaacaacttacgtccactcaaaaatctgcacacagatgttagtagcagttatattcataccaaaacttggacgcaatcaagatgtcacttagtaggtgactgaataaataaactagtacatccagacaatgcaatattattcagggctaaaataaaatgagatcccaacccatgaaaaaaacatggaagaaccttaaatgcatatttgagtaaaagaaaccattctgaccgccaggtgcagtggctcacgccttcaataccagcactttgggaggttgaggcgggtggacattatacgtcattatatatttgtcaaaacccgtagaagacacaacacctagagtgaaccttaatgtaaactatggactttgggtaatactgtggtgtcaatgtaggttaacagattataattaaagtacaactttaatgtggggtgtcaatagtggggaaggcaggtgaaatgctctatactttctgctaagttttgctgcgaacctaaaactgctctaaaaaataaagcatataaaaggaaaaatttggccgggcgtggtggctcacgcctgtaatcgcagcactttgggaggccgaggcgggcggatcaccaagtcaggagatcgagaccatcctggctaacatggtgaaaccccgtctctaccaaaaatacaaaaaattagccggccgttgtggcgggcgcctgccgtcccagctactcgggaggctgaggcaggagaatggagtgaaccctggaggtggaggttgcagtgagtcgagatcgcaccactgcactccagcctgggcgacagatcgagactccgtctcaaaaaaaagtaaaaaaaaaaatttttaaactggaacacagaggataagtaatcctgcttcgccccttgcctctcgcccctgcatggggcgaggaaggattgatcaaacccagaaagactgagtgagaatggatgttgaacacagaactgaaggatgaatgggagttacctgaatagaacccaggggcttgaatgcaagaagaggcgggcattccaggcagaggagagcaagggtaagggccccacgggaggcattcgagtaggagggtgaactatgatgacagaagactcaataacgatccaaagaaaccaaatgattgggcgccttctttcggatccgtgacttccagcgccaggagtctctattggctcttataccgttgctctatgggatagcaatgtttttgtccttcagcctcccctccaattgctgagctgctggtgtgttttgaggagtagaaggcaaaaagaaccctcttgtttttctttggatctagagagaatctgagcaaatgacaaagcaaatggggtaaaatgtctttttgtttagtttttcctgattttcccatgagaggcaaatacatgttaaggatagttgaatctgagtaaagggcatagaaatattccttacaagatttttgttggcaactggtctaagtatgaaattatttccaaatagaaagctaaaacaaacaaaacaattggccttgggaaactggacaatcttgaagtaatcaagtaatattgttaagggacaatcagtgttgtgaaaacaacacggatacaccccctccctccccctcaaaaaaaaaaaccctaaattcagttcccccgttgctaatgtgtgaccctggcaaagtcatctaagtcgctgagcttcagttcctccaacccagagagttgttgcaacgatcaaatgaaagaatgtctattaaagcctttcatgaactatattattgctgctaccgtagaaatggaaagtgtgcaacactagatccaaaactacttttgacacttctgagactgtggccgcgcctctgtcaccttccaaaggccactaggcctttcctgagctggcattggcaacgcacactcttgcccggctaacctttccaggtgggcggcgcactggcttcactgctctccaggtggccgctgcagctgcccgagagcgcaggcgcagaggcagaccacgtgagagcctggccaggccttccggcctagcctcactgtggccccgcccctctcgaacgccttcgcgcgatcgccctggaaacgcattctctgcgaccggcagccgccaatgggaagggagtgagtgccacgaacaggccaataaggagggagcagtgcggggtttaaatctgaggctaggctggctcttctcggcgtgctgcggcggaacggctgttggtttctgctgggtgtaggtccttggctggtcgggcctccggtgttctgcttctccccgctgagctg

SEQ ID NO: 33748 - DNA, 2300 bp, Homo sapien
ggtgatctgctcactttggcctcccaaagtggtgggattacaggcgtgagcgactgcacattgcattatttttgtcccaaatgtgagcagtggagacacctgataggcaactgcttaaaaggataagattgtggtgagacagtggaaggcatccactaagtggtaaagagaaaaagttaacaatgggatcatcctttttgtaaaacaaaatgaaaggaaacaagaaaatgttccataagtttacatgtaggaatagcaaacctaatgcctgattttacatcctgtgcttttttttttttttgagacagggtctcactctgtcacccaggatggagagcagtggtgcgatcataggtcactgcagtcctcaacggctggggcccaagtgatcctcccatctcagcctcctgagtagctgggaccacaggtctaagtcaccacacctgttgtttttttgtttgtttgtttgtttttgttttaagtagaaacgaggtctcactatgctgcccaggctgttctcctgacttcaagcgatccttccgctttggcttcccaaagtgctgggattacaggcgtgggccatcgccaccagtccattctgtgtcttttgaactgtttttttgtttgtttgtttgtttttcgagaaggaatcttgctctgttgcccaggctggcgtgcatctctggtgtgatctcggctcactgcaacctctgcttcccgggatcaaaggattctcctgcctcggcctccccagtagctgggattacaggtgcccaccaccacgcctggctaattttgtatttttagtagagacgaggtttctccatgttggtcaggctggtctccaactcctgacctcgagatcctcccccctcggcttcccaaagtgctgggattataggtgtgagccacagcgcccggcttttttttttttttttgagacggagtttcactctgtcacccaggctgaagtgcagtggcgcgatctcagctcactgcaacctccgcccccccgggttcaaacgattctcctgcctcagcctcctgagtagctgggattacaggcgcccgccaccacacgcagctaacttttgtatttttagtagagacggggtttcaccatgttggccaggctggtcttgaattcctgacttcaggtgatccacccgcctcagcccccaaagtgctgggagtacaggggtgagccaccacgcccagcgaatttaacttttgtcaggagccgtattacattgacaatggagaggaagaaaacagcacagtatgatcaagtttaactagtgggtaattagctgtaaaagaactctcgactcttgttcaaagaggttcaagctgctgtgcttgtgcggcaaggacagtgtccaaatgaaaaactacaaatcagtcatctgtccttcattttctccattccccccactcactacacagctaagaaagctcaaaggtaccctgcagacactcaaaacttgagggcacgcaactctcagttacgagtggtggcaatcataatgacagaatgaagtaccagtgcaagaaactggaagcgtgtggatgtctccaggctggaagtctgggttcgaaatgtctgcaatgcctcgcacttgtggcccgtccctgatcttcagaagccactggtttctccgccaaacaaagggtatgcacctcatgggctcaggtcaaaaaagtcttctaaacaaccctctaatgtttatctttcacagcctgccgggcacacccatcttcaaaggcagaggacggaaaagtgccaagatggatggacatatggctgtcgccgcactcccgtgtccaagcgccaaggccgaatgaccacttaggtcaggagatttttcccctccaggctgctgttcccgggagatgtcccaacgtctctagtccagcccctaactcagcactctacacatccgacgcttaacgaaagctattccaactttttaccagccgtctgcagttattttcaccagtagagcccggatgaaagaggagcccgtagtaaccacggcaaccgaaaaacaaggcggaaagggtggggccctgggcggaaggggcggggccctcgggccttttcccggcgtccatttagtggcgggaaaagcgaccttttctgagcgcgtttgcctgttgagtggtagcctttcccctcaaccagcaatggaggagcagccccagatgcaagacgccgacgagcccgcggactccggaggggaaggccgggcaggcgggccaccgcaggtcgccggcgcccaggcggcgtgcagcgagga

SEQ ID NO: 33749 - DNA, 2300 bp, Homo sapien
ggaatacactgggaaaacagcatctgtcaggaaaagttaaaaaattggtgtttaagatttttttctttttttgagacggagtcttgcactcttgcccaggctggagtgcagtggcgcaatctcggctcaccacaagctccgcctcccgggttcacgccattctcctgcctcaggctcccaagcagctgggactacaggcgcctgccaccatgcccggctaattttttgtatttttagtagagatggggtttcaccgtgttagccaggatggtcttgatctcctgacctcgtgatccacccgcctcggcctcccaaagtgctgggattacaggcgtgagccaccgcacccggccgcttaagattatttttaataggccagactgaactgaggatgctatacaaagaatagaccaaaatgattaaaccccaaaccactgtatttacaaacacagatttttatcaggagatacagaaaaataacaaagatactaatccttggattactaattcatatagtttttcagttgttctataaatccaaaaatcatacataagtagaaaaactatgagcaaatggtaatttaagatgacagcaagggtgaggaggaaaaaacaataaaaaagaaatagacatcttttcatttttcaaaacatttaagaaagaaaaaaatggtaattaattttttttttttgagtcaagagtcttgctctattgcccaggctggagtgcaatggcacaatcttctgctcactgcaacctctgcctcccgggttcaatcaattctcttgcctcagcctcctgagtagctgggattacaggcgcccgccaccacgcccagctaatttttgtatttttagtagagacggggtttcaccatgttggccatggttggccaggctggtcttgaactcctgacttaaggtgatccgtctgcctcggcatcccaaagtgttgggattacaggcgtgagccaccgcgctcagccaataatgatttttttaaaactacctctgttatgatatagaacagaggaccgcaaatttttttctgtaaaggacctgatagtaaattttttagggtttgtgagtcacacggtctctgttttagctactcaattccacccttgtggcaggaaagttgtactccaataaaactgtttatggaaactgaaacttgaatttctaatagagttcacgtgttatgaaatatttttatgatcttttccctgcaacacttaaacataaaaactattcttagcttgagtggtcacacaaaaataggcagttaggcagatttggcccaggaccttctcctgctcactagtttagaagacgaatgtcccttctcatcgaatcttccccagcaaccgcttagtggaaaagtataaacaccgtccgcttagtagaatttataacatataaagcttctgggttacaaagggtcgtagttctaaaagaaatggtaggggcaccttccttccagtttagctctggcattcaatttgtctgtaaaccagagaggtagggggagggcggggaaacaggaggagaaattacagcttctaagggcccggggcactgtgctcaacactttcctagactatctcatttaacccttgtaacctctctccagggggtcatttttctctccttttcgctgatgaagaaagagcttcaacagtttaagtgaatgaggcaatcacggagacctgacgtgaccgagcgtgaattcgaaccctagcccttctgagcaagggcggagttccgggccacaacgcccacttggccccggctgaggaggccaaagggaacaacctgaggagcagggtcatgcggtcctcgctgcacgccgcctgggcgccggcgacctgcggtggcccgcctgcccggccttcccctccggagtccgcgggctcgtcggcgtcttgcatctggggctgctcctccattgctggttgaggggaaaggctaccactcaacaggcaaacgcgctcagaaaaggtcgcttttcccgccactaaatggacgccgggaaaaggcccgagggccccgccccttccgcccagggccccaccctttccgccttgtttttcggttgccgtggttactacgggctcctctttcatccgggctctactggtgaaaataactgcagacggctggtaaaaagttggaatagctttcgttaagcgtcggatgtgtagagtgctgagttaggggctggactagagacgttgggacatctcccgggaacagcagcctggaggggaaaaatctcctgacctaagtggtcattcggc

SEQ ID NO: 33750 - DNA, 2300 bp, Homo sapien
cactgcatccagcctgggtgtcacagcgagactctgtctcaaaaaaaaaaaaaaattatcggctgggcacggtggctcacacctgtaatcccagcactttgggaggctgaggcgggcagatcacgaggtcaggagatggagactatcctggctaacacagtgaaaccctgtctctactaaaaatacaaaaaaaattagcctggtgtggtggcgggtgcctgtagtcccagctacctgggaggctgaggtgggagaatggtgtgaaccagggaggcggagcttgcagtgagccgagttggcaccactgcactccagcctgggtgacagagcaagactctgtctcaaaaaaaaaaagaattaccacagatgaatggataagcaaaatgtggtatacacatataatgggattttttcagccttaaaaaagaaattctgacacattctacaacatgaatgaactctgaagacatgctaagtgaaacaagctaattacaaaaggacaaatactgttatggctccacgtacattaagtacccacagtagtcaaattcatagacagaaagtaaaatgatagttgtcagaggctgagggaaggaggaataagtttttgtttaatgggtacagtttctgaagatggtaacaattgcccaacaatgtgaatgtacttaatgtgactgaactgcacatttgaaaataattaaaatggggccaggcgcagtggctcacgcctgtaataccagcacttagggaggctgaggtgggtggatcacttgaggccaggagttggagattagtctggccaatatggtgaaactctgtctctaccaaaaatacaaaaattagccaggcgtggtggcgggcgtctgtaatcccagctactggggaggctgaggctggagaattgcttgaatccaggaggcaaaggttgcagtgacctgagatcacgccacagcactccaggctgggcaacagagcgagactccgtctcaaaaaaaaaaaaaaaaaccacaaaaacaaaacaaaacaaaacgggttaatggcctctctgtagtcactgaatcccaatagaccatacctgggttcagtaatttatatttctaaaaagatcccaagacttagaaatcactgatgtatatcatcaaacacattggtcaagcttacaatactatatataacctaagcattatcacagaacgtaatgtaactttttttttttttgagacggagtctccctctgtcgctcaggccggagtgcagtggcacactctcggcttactgcaacctctgccttctgggttcaagcaattctcctgcctcacctcctgagtagctgggactacaggcgcccgccaccacgcccggctaatttttgtatttttagtagagacagggttttacaatgttggccagtctggtgtcgaactcctgacctcaagtgatccgcccgcctcagcctcccaaagtgctggcattacaggcgtgagccatagcgccccgcccgtaatgtaattttgggggaaagatatgagtggcttacatttcaaatatttctgaatttttgagttatctcaacttgaagcaaaggcccagcagttcgatatcaggagtaataaacggtaaagaaaacagaaacaaattacaatcaagcaatgccaatcagcaagagagtgtgacatggccctttttaagccagagtaaactcttgtgagcttgccactaactcccattttaacgaaattattcattttaggaaaccgcaaggttttttttttgtttttctttaatttttttaatctttgcaagagctgtcagataagaaggttgtattatttatttggttccagataaaattttgaactatatcgaaattatagactggctttctggaaaggaaatggtcctagacaatttataggctaatgagcagagacccaccttaacaaaattttgtccccaaaacgaaacaatagaacacacgtgggtggatcctagtagggagaaggggtgggcggggtcaggcacagggggcggagccagccccacggcggaggagagcccagtccggtctccgcctccgtgacgtcccgggaagcaccgcccacagctgcccgggactccagtgatcgccgcggctcgctcgcgccccggaaactgccccttctcgggggtcatgatgggcagcaagatggcgtctgctagtagggtcgttcaggtaaagcaatttgtcgcgtttccgcatcttgggcggtagggacggtgctgactatggcgacggcgtcggggagtaaaggcggtggcag

SEQ ID NO: 33751 - DNA, 2300 bp, Homo sapien
acacccaactaatttttgtatttttagtggagatggggtttcaccatgttggccaggctggtttggaactcctgacttaaggtgatccacctgcctcggcatcccaaagtgctggattacaggtgtgagccactgcacctgccgctcactagcttatttctacaagtgaggttaaattattatttcaatgatacctgtcagaagaaactatgacaacagcatcactaggtatgacttgcctcaagagagatggtgtcttttctgcaatgtgtgagttttgcctagacccaagtaatgacaagggactgaaagataatggctaacatatagtaaacacttaactgtcaaacattattctaagggctttgcaggtgtgaggtcatttaagccttggaacaatcctttgagtagatcctattagggatgaagaaactggaaacaaagtaagtaatttgccctagttgtatctagtggctgaatactgatagggccactattcaaatgcaagcagtctgattccagagttaaaaaaaataactaaattattggccttggtattttgctactttcttcaacatatctctgaaacttaggattttcaactcttagaaataacaaatataggctgggcgcagtggcttacacttacaaataccagcactttgggaggccgaggagggtggatcacctgaggtcaggagattgagaccagcctggccaacaaggtgaaaccccgtctctactaaaaatacaaaaattagctgggtgtggtggagcaggccagtaatcccagctaatcgggaagctgaggcaggagaatcgcttgaacccaggaggcagaggttgcagtgagctcagatcgggccagcgtactccagcctgagcaacagagtgagactgtctcaaaaacaaacaaacaaacaaaggcagggggaggggggcacatttccatgttgacagctgctctggctcagaaacttttaattatccactagtagagccatctggattactgcaatagttctctaataggccttctttctttttcttgtccctcaaaatctataatatagtctcccaacagcaagagtgaaccttttaaaagtgagtcaggtcatatcacttgtctgctccaatccctccagtgggttttcagtgatgactttcttgtaccaccctatttaaaacctccatccctgcccctgccctgatttgttatcctttatctgctttattatctctatagcacttatcacctatgtatcataacacatatttgacttgtttttttatctcctcccattggaaggcagggatctttgctccctgctatctcagattctacaatggtgcttggcacatagataacactcaatatcagcatcctaagagagagaaaaatgaaaaaggaaaagcactcaatatgtttttgaataaatgaattagtgtgtttgttatgacaatttatgataatcaaggggttgggtactcattactgctaagttaattgagcactgtctcaattaattgagttaatgtctaagctttctgcatgtttcatttaatacccacaatctcctgtgatgtagttcattattttttccattttaccgagtagaaaactgaggactagaagctgattcccacagcacgtttcagttgagttggattttgttttcctgggcctgcttcttcataaagggactggactaagaatactcttgaccagcccgtaagaacttggcactcgtctcagtaatctgagatagcagggtttggcgtccatagcaaccacggcgacaggacgcgctcgagcaagaaccaaaaagcgagaacaggtacaaggccaaactttctacattcacagacacctaccaaaccccgaacatggaacaccaaattagaacgctgaccagttcctggtaatgtagaaaacacccaagttaaaacggcaacagagtgacacagcagccattgaagatgccccacttcaggcaccgacaggcgtcacgtgacgggtggggaacgccaaccgcctgggcctagcgcagcttcctccgcccaccacggaagtgaggcggggatactaaagcgacggagcccggtggacggaagtgggtgttggaggctttaaggtagctttaaattcgtgttgtcctgggagctcgcccttttcggctggagtcgggctttacggcgccggatggctctggacgtgaagtctcgggcaaagcgttatgagaagctggacttccttggggagggacaggtgaggctctctggaaggacggggagggccc

SEQ ID NO: 33752 - DNA, 2300 bp, Homo sapien
cacttgagcctaagaggtcgaggctgcagtgagctgtggatgccatcactgcacttcagcctaagcaatgagcaacagagtgagatgctgtctctcttttttttttttttttttttttttttgagacagagggttttgctttttcacccaggttggagtgcagtgacacgatcttggctcaccgcaacatccaccttctggtttcaagtgattctcctgcctcagcctcccgaatagctaggattacaggcacctgccaccacacctggctaatttttgtatttttagtagagatgaggtttcaccatgttggccaggctggtcctaaactcttgacctcgtgatccgcccacctcgaccttccaaagagctgggattacagacgtgagccactgtgcccagcccgagaccctgtctcttaaaaaaaatccatctccacttctggttgactgtgttactcagtctctgtctgcttcagtttaattttcgtacttaataatggtattttcttgcagagtgtttgtaaagaataaatataatctaaggcacttaaaactgtctagcacatggaaagcaggcaacaagtgctaggtattattacatcttttttttttttttttttgagacagaatctcactctgttgcccaggctgtagtgcagtggtgcaagctcggctcactgcaacccctgcctcccgggttcaagccattctcctgcctcagcctcccaagtagctgggactacaggcatgcaccaccacacctggctaattttttgtattttttagtagagatggggtttcaccatgttggccaggcaggtcttgaattcctgacctcacgtgatccgcccaccttggcttcccaaactgctgagatgcaggcatgaaccaccacacccagcctaatgagttttgataagtggccactgtggtgaagatatagaagttttccattaccccagaaaacttccctcatgccctttgtggtcatttctccaatgccaagcaaccattaatttgtttaccatcattgtgtgttagttttcccagtatttcatacagtatgtgctgttgtttatttatttattgttttaattagtgatggggatctcgctatgttgcccaggctggtttcgaactcctggcctcaagtgattctcacacctcagcctcccaaaatgctgggattacaggtgggagccaccacatccggcctagtatgtgcttttttgttagcgtaatgtctgggaaattcattgcatatatcggaaatgcattgcatgtgtaatgcatatgtcagaaatgcgttgttctttactgacaaatatattctgttgtatggacagaccacagtttctttgttttactgcagatggacacttgggttgtttccaatttttgacaaattgagtgatgtatgaatattcatgcacacatctttgtacggacatggggttctgtttctcttgagtaaatcctgaagaatgcagttgccaggtcacatgtttgtaagaagctatcaaattgttttccacagtggttgtaccatgttttactcacatcaccaatgtatgagagtttcagttactccacatcctcagcagcacttggaattgtcagtgcggtgaggtggaatctcactggggtttaagttataattgcctgataactaatgatgctgagcatctttccatccatgtatcttctttgatgacatatctgttcaaatcttttaagggtatttgtttttaacattgaaaatatatggcattttgatcctaaaaatgacagaaattccttaatacatggtcagatttatttggtgtctacataaggtttaatagtggaagaatagagagatctccacaacaaatgcaagactgagattaaatgtctttcgaagttttggaagcaactacttaaacagcaggatatttagagaaaaatgttagacatgtttatacccccacaccccacttttttttttaatgagccttgagagaaggatgaaatatttctaaatagctatagcaaagcagctgttttgaaatgcctggtggtgaaagtccctcttaactgcactctgtcctggaggcacaaggttgagcatttctgcttctcccggctgcttcactgtcaccaggtaggtgactagggtggtctccacatggggagggctcagtgatactagttgatctgtaggcatttttgccaggagaagttttctgctgggaagaaaggcaggcataactcctctgtatctgctgtggagtcctgctagggtgccggttttgtttt

SEQ ID NO: 33753 - DNA, 2300 bp, Homo sapien
ctctctctctctctctctctctcccacccccacctcctctttttaagacaaagtcttgctctgtcacccaggctggagtgcagtggcgcgatctcggctcacggcaaactccgcttgccgggttcaagagattctcctgcctcagccaagcagctgggaatacaggcacctgccaccacgaccggctaattttttttttggaagaaaatgactttattctaattaactcacaaagaataaaatcataacagctagtttaaggaggccacacaaacatttgccctgtcacagattctacagagtaggaacaccccccttccatttcaattctgaagcaaggaagctaggaatgacaggagaggtttaactcatggttacactttataccctcactatcaattctatttttatactaaattaacttagttatgagagctgattttccatctctccaggttgaacttcttgattaggccaatccgtttgcaagtcggcactgtttcagcacctcattgaaaccctcacagagcttgatgtcaccctggttctgggcacactccagaaactgatctcatagaagcaaggctgctgctgctgtgccggctgggttccctgaggctcctggtaagtgatgtcaggcctcgcaggctcagcattacttcctcccctgaaagccccagtaatggcgtgacccacagcagagcccacagccacgccagctgcagtggttgccatctgggccatcagacctggctgccggggcgcagcagcagaagagccaactacagatgggggtgccgctgctggtggctgaacgactggtactggcctgggtgcagctctcatctgagggggcctggctggccggaggggccatgcgggaggtgcggcttcggcttccacgcggcatcctaggtacgcgacggctcggcctccggacgtgtgacgaccggctaaattttgtattttagtggagatggggtttcaccatgttggccaggctggtctcaaacttctgacctcaggtgatccacccaccttggcctcccaaagtgctgggttaacaggcgtgagccaccgcacctggcccgatctacccttctcttacaggattcctagagacttaatattttggttttggtttgtttcttttttgagacagggtctccactccgtcgcccaggctggagtgcagtggtcactgtagcctggatctcccaggctcacgggatcctcccacctgacggcctcccggcctcctgagtagctgggactacaggtacgcaccaccacacccgctactttttaattattttttttttttgagacggagactcgttctgttgcccaggctggagtgcagtggcacgatcttggctcactgcaagctccgcctcccgggttcacgccattctgcctcagcctcctgcgcagctgggactacaggcacccgccaccacgcccggctaatttcttgtatttttagtagagaagggttttcactgtgttagccaggatggtctcaatctcctgacctcgtgatccacccgcctcggccacctaaagtgctgggattacaggcgtgagccaccgcgcccagccctactttttaaattttttgtagagcggggtctcactatgttggccatgctggtctcgaattcctggcctcaagcgatcctcccgccttggcctcccaaaagctgggattacaggtgtgaaaccccgcgccggtctgaacctcaatgtttgaaccaccaaattttacctgtattgacacaggccccgtcttgttgtttttctaaatctcatgtcattgtttgcatattggttacccgtggttggctttggagctgaaggtggacagagctaacatcaggttgcacacaggaacacagtgaggtcgcgaaaaagtagcgcgagctgcctccatggcccagggcgacctcaccggcgtttcctgtctgggactgcgcccacgcggtcacgtggtggcccggaggacgcgcggcggcagcggcgcacgcgcacggagaggaggctacttgccaggtgagcgagctgagtggggcgccggggcggtaggagggtgctgttcgctgagctggagtccgggctccggtccccgccacggaccttgagagggtacccggggtcagacctggcaggtgggaaccgggagtggggaggacccagggcaggggcgggatgcgcagattcgtggaaactctgcaggttgtggacaaactgcccaaatccttttccctgaatgccagtttaatggcctcgtctgataagaa

SEQ ID NO: 33754 - DNA, 2300 bp, Homo sapien
cggggaactgctgagaataaaattagccatctcgtgctgggcgcagtggctcatgcctgtaatcaccgcactttgggaggccgaggcgggcagatcacaaggtcaggagattgagacaatcctggccaacatagtgaaactacatctctattaaaatacaaaaattagccgggcgtggtggcgcgtgcctgtaatcccagctactcaggaggctgaggcaggagaatcccttgaaccaggtagttgtaggatgcagtgagccaagatcgcgccacagcactccagcctggcgacagagactccatctcaaaaaaaaaaaaaaaaaaattagccacctcgaatcaattacaataatttatttacctttttctttttttaaagacaagatatctctttgttacctaggctggagtgcagtggaacttggctcactagagcctttacctcctgggctcaagcaatcctcccatctcagcctgtccggtagctaggaccacaggtatgcaccaccatgccctggttaatttttgtagagacggggtttggctatgttgcttaggctaagctcaaactcctgagctcaagcgatctccccacctccacctcccaaagtgctgggatttacaggcatgagccacccacctggcctatttgctttaacttataaagatttaaaaactgttcatggccacgtgtggtggctcgcgcgtgtaatcccagcaatttgggaggagaaggcgggaggatcgcttaagcgcaggagttcgagaccagcctggccaacataatgagactctgtctcaaacaaaaacaaaaacaagaacaaaaacaaaactgttcatgttaaaattaagcagtctgaaaattacctctactgaccccttgcgcccttccctagagataaccactgtaaaccagtttcctttcccaaagaaaccctatttatgtttgcatgtaaatgtacatatatgtacatactctttgttatataaatacaacacatattcccttttacataaatgacaatactatatacattgttctttaccttccccttctgatacctattaaaattacatttcaagatcatcaaattcataattttcagctattcagatttaacatccctgaaattaaacttaagcataaagataacagggataatccagttcccatacccaggagaataacggtcacctcaagtccactataatacaccaagtctgaaccctggactcaacatgttttcaataaaatgttcactttaaagttttgacaatgacttaataaccagggcactatgtttgatccatgcaaaaagatgtaaaatcttccgcttaaggaatctaaaattctaaacgttatttgtggggtggttaatctgcacctctcagaaacagacatgtcttgtgcgctgccaacaattttacctttgggtgaatgatgtaactttactgttcccacaaagagtcttaatttttctgtaccttgcaataaaatctacatgcattagatttttccacgaatggcctacaatttgataaacactttcaggactaaacggctagcaaaaatattcgttaaagtcgttatgcagcattttaattcccttcactgataacatgcaccctgagtatggcttcaaagacccactcctacgcgagaaacgacccgaaatgctctatatgccttccttttaaggggcggggggatcctttgatgtaactcaacaaaagcatacagcaatttcgtcacgtcacaaacatctgaactcgtttaccgaaatctaatctgaggcgtttatcagaagcaaagaaaaaataaaatacggcccacggaggcctaaggagtgaggcatccaccattaatgactctaccgggaagcagatatggccttacgttatttcgctaaaaatcccaaggccaaccctgccaaagaatcaacaacccattttacaaacgaaataccagattcagaaagactaagcaggttgccaagctggagagctggatctgccgacctctctccacccccccccgcccccccccggagcctcaggccaacggaattaacgttccgcgtcccctccctcgcctcccgcaacgcccgcgagggtcggctcccggggcgctgacaaccgcctcgtggccctcggccggcctctgaagagggcagtgaggggcccccacctgggcgcccgatgcccagagcactctgcgcccccagcctgccccagcccagtccctcccggccgcgcgccctgaccggtgagcaggatgttcggaagcaacatggtccc

SEQ ID NO: 33755 - DNA, 2300 bp, Homo sapien
cctggttaatttttgtagagacggggtttggctatgttgcttaggctaagctcaaactcctgagctcaagcgatctccccacctccacctcccaaagtgctgggatttacaggcatgagccacccacctggcctatttgctttaacttataaagatttaaaaactgttcatggccacgtgtggtggctcgcgcgtgtaatcccagcaatttgggaggagaaggcgggaggatcgcttaagcgcaggagttcgagaccagcctggccaacataatgagactctgtctcaaacaaaaacaaaaacaagaacaaaaacaaaactgttcatgttaaaattaagcagtctgaaaattacctctactgaccccttgcgcccttccctagagataaccactgtaaaccagtttcctttcccaaagaaaccctatttatgtttgcatgtaaatgtacatatatgtacatactctttgttatataaatacaacacatattcccttttacataaatgacaatactatatacattgttctttaccttccccttctgatacctattaaaattacatttcaagatcatcaaattcataattttcagctattcagatttaacatccctgaaattaaacttaagcataaagataacagggataatccagttcccatacccaggagaataacggtcacctcaagtccactataatacaccaagtctgaaccctggactcaacatgttttcaataaaatgttcactttaaagttttgacaatgacttaataaccagggcactatgtttgatccatgcaaaaagatgtaaaatcttccgcttaaggaatctaaaattctaaacgttatttgtggggtggttaatctgcacctctcagaaacagacatgtcttgtgcgctgccaacaattttacctttgggtgaatgatgtaactttactgttcccacaaagagtcttaatttttctgtaccttgcaataaaatctacatgcattagatttttccacgaatggcctacaatttgataaacactttcaggactaaacggctagcaaaaatattcgttaaagtcgttatgcagcattttaattcccttcactgataacatgcaccctgagtatggcttcaaagacccactcctacgcgagaaacgacccgaaatgctctatatgccttccttttaaggggcggggggatcctttgatgtaactcaacaaaagcatacagcaatttcgtcacgtcacaaacatctgaactcgtttaccgaaatctaatctgaggcgtttatcagaagcaaagaaaaaataaaatacggcccacggaggcctaaggagtgaggcatccaccattaatgactctaccgggaagcagatatggccttacgttatttcgctaaaaatcccaaggccaaccctgccaaagaatcaacaacccattttacaaacgaaataccagattcagaaagactaagcaggttgccaagctggagagctggatctgccgacctctctccacccccccccgcccccccccggagcctcaggccaacggaattaacgttccgcgtcccctccctcgcctcccgcaacgcccgcgagggtcggctcccggggcgctgacaaccgcctcgtggccctcggccggcctctgaagagggcagtgaggggcccccacctgggcgcccgatgcccagagcactctgcgcccccagcctgccccagcccagtccctcccggccgcgcgccctgaccggtgagcaggatgttcggaagcaacatggtccccgccgcgacggcttcgggcgcctcgctcacgtgccctttgctctacagggaggagccggaaggggcgggcggcagcaaaagcccacggccccaaaggccccgaagcccaccgcggcgcccctagcctgccccggcggcccagccgcggcccactggttacctggctttcgatgacacatttccgtcgcaaagttggagggtgggcataactcgggtcggtacttcgggtcaggcagtgcgctggatgcctaagtcacacactccttcggtggtccccgcccttcgcttgcgccgaccagtctggaaggtccccgggaggccgtacctccgagaggctcggcgttgagcccgggtagggccaggtggctgccctttcacctagggtagtccctggtcgcctccgctcttcgcctaaaaggggatgcagctccgggaaagtaaggccgccgcggttgcggctatattatgtatatgtcttagagacgtgagtctatctctgccttcaagctttcctg

SEQ ID NO: 33756 - DNA, 2300 bp, Homo sapien
ttcgagaccagcctggccaacataatgagactctgtctcaaacaaaaacaaaaacaagaacaaaaacaaaactgttcatgttaaaattaagcagtctgaaaattacctctactgaccccttgcgcccttccctagagataaccactgtaaaccagtttcctttcccaaagaaaccctatttatgtttgcatgtaaatgtacatatatgtacatactctttgttatataaatacaacacatattcccttttacataaatgacaatactatatacattgttctttaccttccccttctgatacctattaaaattacatttcaagatcatcaaattcataattttcagctattcagatttaacatccctgaaattaaacttaagcataaagataacagggataatccagttcccatacccaggagaataacggtcacctcaagtccactataatacaccaagtctgaaccctggactcaacatgttttcaataaaatgttcactttaaagttttgacaatgacttaataaccagggcactatgtttgatccatgcaaaaagatgtaaaatcttccgcttaaggaatctaaaattctaaacgttatttgtggggtggttaatctgcacctctcagaaacagacatgtcttgtgcgctgccaacaattttacctttgggtgaatgatgtaactttactgttcccacaaagagtcttaatttttctgtaccttgcaataaaatctacatgcattagatttttccacgaatggcctacaatttgataaacactttcaggactaaacggctagcaaaaatattcgttaaagtcgttatgcagcattttaattcccttcactgataacatgcaccctgagtatggcttcaaagacccactcctacgcgagaaacgacccgaaatgctctatatgccttccttttaaggggcggggggatcctttgatgtaactcaacaaaagcatacagcaatttcgtcacgtcacaaacatctgaactcgtttaccgaaatctaatctgaggcgtttatcagaagcaaagaaaaaataaaatacggcccacggaggcctaaggagtgaggcatccaccattaatgactctaccgggaagcagatatggccttacgttatttcgctaaaaatcccaaggccaaccctgccaaagaatcaacaacccattttacaaacgaaataccagattcagaaagactaagcaggttgccaagctggagagctggatctgccgacctctctccacccccccccgcccccccccggagcctcaggccaacggaattaacgttccgcgtcccctccctcgcctcccgcaacgcccgcgagggtcggctcccggggcgctgacaaccgcctcgtggccctcggccggcctctgaagagggcagtgaggggcccccacctgggcgcccgatgcccagagcactctgcgcccccagcctgccccagcccagtccctcccggccgcgcgccctgaccggtgagcaggatgttcggaagcaacatggtccccgccgcgacggcttcgggcgcctcgctcacgtgccctttgctctacagggaggagccggaaggggcgggcggcagcaaaagcccacggccccaaaggccccgaagcccaccgcggcgcccctagcctgccccggcggcccagccgcggcccactggttacctggctttcgatgacacatttccgtcgcaaagttggagggtgggcataactcgggtcggtacttcgggtcaggcagtgcgctggatgcctaagtcacacactccttcggtggtccccgcccttcgcttgcgccgaccagtctggaaggtccccgggaggccgtacctccgagaggctcggcgttgagcccgggtagggccaggtggctgccctttcacctagggtagtccctggtcgcctccgctcttcgcctaaaaggggatgcagctccgggaaagtaaggccgccgcggttgcggctatattatgtatatgtcttagagacgtgagtctatctctgccttcaagctttcctgggctctcgtcgctcctcctcccgacccgcccatcccatctggggatgagaagattgagggtgcagagccctgtcctgcagcggggatttgcgagctcaacccggcaccccactgattacaggattacgttggacgaatatttgagcttagtattccctgttcactgtgtggggtggtggtgggtcggctaggaatagtcttgaaggtctacctctgacatctcatttcagtaacctcgcatcttcagg

SEQ ID NO: 33757 - DNA, 2300 bp, Homo sapien
aaaaagcagataactgtccctgaagatgcgaggttactgaaatgagatgtcagaggtagaccttcaagactattcctagccgacccaccaccaccccacacagtgaacagggaatactaagctcaaatattcgtccaacgtaatcctgtaatcagtggggtgccgggttgagctcgcaaatccccgctgcaggacagggctctgcaccctcaatcttctcatccccagatgggatgggcgggtcgggaggaggagcgacgagagcccaggaaagcttgaaggcagagatagactcacgtctctaagacatatacataatatagccgcaaccgcggcggccttactttcccggagctgcatccccttttaggcgaagagcggaggcgaccagggactaccctaggtgaaagggcagccacctggccctacccgggctcaacgccgagcctctcggaggtacggcctcccggggaccttccagactggtcggcgcaagcgaagggcggggaccaccgaaggagtgtgtgacttaggcatccagcgcactgcctgacccgaagtaccgacccgagttatgcccaccctccaactttgcgacggaaatgtgtcatcgaaagccaggtaaccagtgggccgcggctgggccgccggggcaggctaggggcgccgcggtgggcttcggggcctttggggccgtgggcttttgctgccgcccgccccttccggctcctccctgtagagcaaagggcacgtgagcgaggcgcccgaagccgtcgcggcggggaccatgttgcttccgaacatcctgctcaccggtcagggcgcgcggccgggagggactgggctggggcaggctgggggcgcagagtgctctgggcatcgggcgcccaggtgggggcccctcactgccctcttcagaggccggccgagggccacgaggcggttgtcagcgccccgggagccgaccctcgcgggcgttgcgggaggcgagggaggggacgcggaacgttaattccgttggcctgaggctccgggggggggcgggggggggtggagagaggtcggcagatccagctctccagcttggcaacctgcttagtctttctgaatctggtatttcgtttgtaaaatgggttgttgattctttggcagggttggccttgggatttttagcgaaataacgtaaggccatatctgcttcccggtagagtcattaatggtggatgcctcactccttaggcctccgtgggccgtattttattttttctttgcttctgataaacgcctcagattagatttcggtaaacgagttcagatgtttgtgacgtgacgaaattgctgtatgcttttgttgagttacatcaaaggatccccccgccccttaaaaggaaggcatatagagcatttcgggtcgtttctcgcgtaggagtgggtctttgaagccatactcagggtgcatgttatcagtgaagggaattaaaatgctgcataacgactttaacgaatatttttgctagccgtttagtcctgaaagtgtttatcaaattgtaggccattcgtggaaaaatctaatgcatgtagattttattgcaaggtacagaaaaattaagactctttgtgggaacagtaaagttacatcattcacccaaaggtaaaattgttggcagcgcacaagacatgtctgtttctgagaggtgcagattaaccaccccacaaataacgtttagaattttagattccttaagcggaagattttacatctttttgcatggatcaaacatagtgccctggttattaagtcattgtcaaaactttaaagtgaacattttattgaaaacatgttgagtccagggttcagacttggtgtattatagtggacttgaggtgaccgttattctcctgggtatgggaactggattatccctgttatctttatgcttaagtttaatttcagggatgttaaatctgaatagctgaaaattatgaatttgatgatcttgaaatgtaattttaataggtatcagaaggggaaggtaaagaacaatgtatatagtattgtcatttatgtaaaagggaatatgtgttgtatttatataacaaagagtatgtacatatatgtacatttacatgcaaacataaatagggtttctttgggaaaggaaactggtttacagtggttatctctagggaagggcgcaaggggtcagtagaggtaattttcagactgcttaattttaacatgaacagttttgtttttgttcttgtttttgtttttgtttgagacagagtctcattatgtt

SEQ ID NO: 33758 - DNA, 2300 bp, Homo sapien
tgtgcgctgccaacaattttacctttgggtgaatgatgtaactttactgttcccacaaagagtcttaatttttctgtaccttgcaataaaatctacatgcattagatttttccacgaatggcctacaatttgataaacactttcaggactaaacggctagcaaaaatattcgttaaagtcgttatgcagcattttaattcccttcactgataacatgcaccctgagtatggcttcaaagacccactcctacgcgagaaacgacccgaaatgctctatatgccttccttttaaggggcggggggatcctttgatgtaactcaacaaaagcatacagcaatttcgtcacgtcacaaacatctgaactcgtttaccgaaatctaatctgaggcgtttatcagaagcaaagaaaaaataaaatacggcccacggaggcctaaggagtgaggcatccaccattaatgactctaccgggaagcagatatggccttacgttatttcgctaaaaatcccaaggccaaccctgccaaagaatcaacaacccattttacaaacgaaataccagattcagaaagactaagcaggttgccaagctggagagctggatctgccgacctctctccacccccccccgcccccccccggagcctcaggccaacggaattaacgttccgcgtcccctccctcgcctcccgcaacgcccgcgagggtcggctcccggggcgctgacaaccgcctcgtggccctcggccggcctctgaagagggcagtgaggggcccccacctgggcgcccgatgcccagagcactctgcgcccccagcctgccccagcccagtccctcccggccgcgcgccctgaccggtgagcaggatgttcggaagcaacatggtccccgccgcgacggcttcgggcgcctcgctcacgtgccctttgctctacagggaggagccggaaggggcgggcggcagcaaaagcccacggccccaaaggccccgaagcccaccgcggcgcccctagcctgccccggcggcccagccgcggcccactggttacctggctttcgatgacacatttccgtcgcaaagttggagggtgggcataactcgggtcggtacttcgggtcaggcagtgcgctggatgcctaagtcacacactccttcggtggtccccgcccttcgcttgcgccgaccagtctggaaggtccccgggaggccgtacctccgagaggctcggcgttgagcccgggtagggccaggtggctgccctttcacctagggtagtccctggtcgcctccgctcttcgcctaaaaggggatgcagctccgggaaagtaaggccgccgcggttgcggctatattatgtatatgtcttagagacgtgagtctatctctgccttcaagctttcctgggctctcgtcgctcctcctcccgacccgcccatcccatctggggatgagaagattgagggtgcagagccctgtcctgcagcggggatttgcgagctcaacccggcaccccactgattacaggattacgttggacgaatatttgagcttagtattccctgttcactgtgtggggtggtggtgggtcggctaggaatagtcttgaaggtctacctctgacatctcatttcagtaacctcgcatcttcagggacagttatctgctttttaaaggaggtaattgtcaatcttgttttcaagagtgaatagagacctgaccgtgacaacagtctgcacctttttttgtttgtttgtttgtttttgttttgttttgagacggagtctcactcttgtcgcccaggctggagtgcaacctccgcctcctgggttcaagtgattctcctgccttagcctccagagtagctgggattacaggcgcccaccaccacgcccggctaatttttgcatttttaatagagacggggtttcaccatgttttggccaggctggtctcaaactcctgacctcagatgatccgcccgcctcgtcctcccacggtgctgggattacaggcatgagccaccgcgtccggcccctggtctgcatcttttatttcgagctacaaactatatttactcaaataggtgttttttttccacctgtataccttttgaaacgtcacagtctctaatcgtgaacgatttggggcggagggctgaacaatgtgttttctagtgtgtcgaggtgtttataggctatgtgtgcctccaaactgtaaagtagtccagtatactttccaatgtataagtttgtagaccttaaacttttcttctggctaacttaaaatcgttgaattc

SEQ ID NO: 33759 - DNA, 2300 bp, Homo sapien
aatttataattattttaaggcaattattacatggccattccagtgtatcatacctttgtggaagatacctttggtctaagaaaagtttttgacattataaactgtaatagttcccatccgtagtttaggacttgcagtacattaaactataattcacctgggggggggggggggaagaagccctcaaatgaagaaaaactgtaaatgcccaattatagtaataaatgtatactgatataatcaacaatacaataaaggctcaagaactagtgaaaaagaacagtaaatttaagtgatacaagaaatcaaaattctaaaataattttaatgactataactgtatcaaataatctacttgtggtgttaagagtttttcacatgaactcaatgatgtattagaaaaaaaaaaacaaaaaaaccacacatactatgtacttaccttttgtcattaaaatcaggcaattctatttgagcaatttttatactgaaaattaaagttttccttatttcaaattacagttgcaggtcttcatttccagtatttcccaaaaaagtaaaataccatgaattcacttgctgtggacgaagaatttaagtcttaaactgtaaaatttttgtcttcatttgaacatgttattacaaaatttcttggtaacactgtttttcaaccgtgttttcaaattcttaaatgtttatgcaaactagtgaattcaacgattttaagttagccagaagaaaagtttaaggtctacaaacttatacattggaaagtatactggactactttacagtttggaggcacacatagcctataaacacctcgacacactagaaaacacattgttcagccctccgccccaaatcgttcacgattagagactgtgacgtttcaaaaggtatacaggtggaaaaaaaacacctatttgagtaaatatagtttgtagctcgaaataaaagatgcagaccaggggccggacgcggtggctcatgcctgtaatcccagcaccgtgggaggacgaggcgggcggatcatctgaggtcaggagtttgagaccagcctggccaaaacatggtgaaaccccgtctctattaaaaatgcaaaaattagccgggcgtggtggtgggcgcctgtaatcccagctactctggaggctaaggcaggagaatcacttgaacccaggaggcggaggttgcactccagcctgggcgacaagagtgagactccgtctcaaaacaaaacaaaaacaaacaaacaaacaaaaaaaggtgcagactgttgtcacggtcaggtctctattcactcttgaaaacaagattgacaattacctcctttaaaaagcagataactgtccctgaagatgcgaggttactgaaatgagatgtcagaggtagaccttcaagactattcctagccgacccaccaccaccccacacagtgaacagggaatactaagctcaaatattcgtccaacgtaatcctgtaatcagtggggtgccgggttgagctcgcaaatccccgctgcaggacagggctctgcaccctcaatcttctcatccccagatgggatgggcgggtcgggaggaggagcgacgagagcccaggaaagcttgaaggcagagatagactcacgtctctaagacatatacataatatagccgcaaccgcggcggccttactttcccggagctgcatccccttttaggcgaagagcggaggcgaccagggactaccctaggtgaaagggcagccacctggccctacccgggctcaacgccgagcctctcggaggtacggcctcccggggaccttccagactggtcggcgcaagcgaagggcggggaccaccgaaggagtgtgtgacttaggcatccagcgcactgcctgacccgaagtaccgacccgagttatgcccaccctccaactttgcgacggaaatgtgtcatcgaaagccaggtaaccagtgggccgcggctgggccgccggggcaggctaggggcgccgcggtgggcttcggggcctttggggccgtgggcttttgctgccgcccgccccttccggctcctccctgtagagcaaagggcacgtgagcgaggcgcccgaagccgtcgcggcggggaccatgttgcttccgaacatcctgctcaccggtcagggcgcgcggccgggagggactgggctggggcaggctgggggcgcagagtgctctgggcatcgggcgcccaggtgggggcccctcactgccctcttcagaggccggccgagggccacgaggcggttgtcagcgccccgggagccgacc

SEQ ID NO: 33760 - DNA, 2300 bp, Homo sapien
cggcctctgaagagggcagtgaggggcccccacctgggcgcccgatgcccagagcactctgcgcccccagcctgccccagcccagtccctcccggccgcgcgccctgaccggtgagcaggatgttcggaagcaacatggtccccgccgcgacggcttcgggcgcctcgctcacgtgccctttgctctacagggaggagccggaaggggcgggcggcagcaaaagcccacggccccaaaggccccgaagcccaccgcggcgcccctagcctgccccggcggcccagccgcggcccactggttacctggctttcgatgacacatttccgtcgcaaagttggagggtgggcataactcgggtcggtacttcgggtcaggcagtgcgctggatgcctaagtcacacactccttcggtggtccccgcccttcgcttgcgccgaccagtctggaaggtccccgggaggccgtacctccgagaggctcggcgttgagcccgggtagggccaggtggctgccctttcacctagggtagtccctggtcgcctccgctcttcgcctaaaaggggatgcagctccgggaaagtaaggccgccgcggttgcggctatattatgtatatgtcttagagacgtgagtctatctctgccttcaagctttcctgggctctcgtcgctcctcctcccgacccgcccatcccatctggggatgagaagattgagggtgcagagccctgtcctgcagcggggatttgcgagctcaacccggcaccccactgattacaggattacgttggacgaatatttgagcttagtattccctgttcactgtgtggggtggtggtgggtcggctaggaatagtcttgaaggtctacctctgacatctcatttcagtaacctcgcatcttcagggacagttatctgctttttaaaggaggtaattgtcaatcttgttttcaagagtgaatagagacctgaccgtgacaacagtctgcacctttttttgtttgtttgtttgtttttgttttgttttgagacggagtctcactcttgtcgcccaggctggagtgcaacctccgcctcctgggttcaagtgattctcctgccttagcctccagagtagctgggattacaggcgcccaccaccacgcccggctaatttttgcatttttaatagagacggggtttcaccatgttttggccaggctggtctcaaactcctgacctcagatgatccgcccgcctcgtcctcccacggtgctgggattacaggcatgagccaccgcgtccggcccctggtctgcatcttttatttcgagctacaaactatatttactcaaataggtgttttttttccacctgtataccttttgaaacgtcacagtctctaatcgtgaacgatttggggcggagggctgaacaatgtgttttctagtgtgtcgaggtgtttataggctatgtgtgcctccaaactgtaaagtagtccagtatactttccaatgtataagtttgtagaccttaaacttttcttctggctaacttaaaatcgttgaattcactagtttgcataaacatttaagaatttgaaaacacggttgaaaaacagtgttaccaagaaattttgtaataacatgttcaaatgaagacaaaaattttacagtttaagacttaaattcttcgtccacagcaagtgaattcatggtattttacttttttgggaaatactggaaatgaagacctgcaactgtaatttgaaataaggaaaactttaattttcagtataaaaattgctcaaatagaattgcctgattttaatgacaaaaggtaagtacatagtatgtgtggtttttttgtttttttttttctaatacatcattgagttcatgtgaaaaactcttaacaccacaagtagattatttgatacagttatagtcattaaaattattttagaattttgatttcttgtatcacttaaatttactgttctttttcactagttcttgagcctttattgtattgttgattatatcagtatacatttattactataattgggcatttacagtttttcttcatttgagggcttcttcccccccccccccccaggtgaattatagtttaatgtactgcaagtcctaaactacggatgggaactattacagtttataatgtcaaaaacttttcttagaccaaaggtatcttccacaaaggtatgatacactggaatggccatgtaataattgccttaaaataattataaatttttatatatattcttaataacttattactgctatcaaagtaat

SEQ ID NO: 33761 - DNA, 2300 bp, Homo sapien
ctttcgacagcaattctgatttgcaaattatttatacattttatagtttcatttcttacataaatgtggactcccatatactgaaaaaaagagaaagataaacagcaaagttaagtaacttacttaacatcaaagaaaatttagagctaccacttagggaaatagctaccctgcatgcatgaaactgtctgacccccatcccaccttaacccctatcttgctgagaactcacacactgaattacattacttctaagaagcagtgcttttggttaagctataacaccaactaccactcatatttctctcttctatgttctttcattcaaatgttttcagcctttgtgactgggactgtaaaacactttttcaaaattaaggttgtgcttttagagaacacttgtttcacaacttattaccagacttgcttaaatcattaattacaatagatactcggctctattactttgatagcagtaataagttattaagaatatatataaaaatttataattattttaaggcaattattacatggccattccagtgtatcatacctttgtggaagatacctttggtctaagaaaagtttttgacattataaactgtaatagttcccatccgtagtttaggacttgcagtacattaaactataattcacctgggggggggggggggaagaagccctcaaatgaagaaaaactgtaaatgcccaattatagtaataaatgtatactgatataatcaacaatacaataaaggctcaagaactagtgaaaaagaacagtaaatttaagtgatacaagaaatcaaaattctaaaataattttaatgactataactgtatcaaataatctacttgtggtgttaagagtttttcacatgaactcaatgatgtattagaaaaaaaaaaacaaaaaaaccacacatactatgtacttaccttttgtcattaaaatcaggcaattctatttgagcaatttttatactgaaaattaaagttttccttatttcaaattacagttgcaggtcttcatttccagtatttcccaaaaaagtaaaataccatgaattcacttgctgtggacgaagaatttaagtcttaaactgtaaaatttttgtcttcatttgaacatgttattacaaaatttcttggtaacactgtttttcaaccgtgttttcaaattcttaaatgtttatgcaaactagtgaattcaacgattttaagttagccagaagaaaagtttaaggtctacaaacttatacattggaaagtatactggactactttacagtttggaggcacacatagcctataaacacctcgacacactagaaaacacattgttcagccctccgccccaaatcgttcacgattagagactgtgacgtttcaaaaggtatacaggtggaaaaaaaacacctatttgagtaaatatagtttgtagctcgaaataaaagatgcagaccaggggccggacgcggtggctcatgcctgtaatcccagcaccgtgggaggacgaggcgggcggatcatctgaggtcaggagtttgagaccagcctggccaaaacatggtgaaaccccgtctctattaaaaatgcaaaaattagccgggcgtggtggtgggcgcctgtaatcccagctactctggaggctaaggcaggagaatcacttgaacccaggaggcggaggttgcactccagcctgggcgacaagagtgagactccgtctcaaaacaaaacaaaaacaaacaaacaaacaaaaaaaggtgcagactgttgtcacggtcaggtctctattcactcttgaaaacaagattgacaattacctcctttaaaaagcagataactgtccctgaagatgcgaggttactgaaatgagatgtcagaggtagaccttcaagactattcctagccgacccaccaccaccccacacagtgaacagggaatactaagctcaaatattcgtccaacgtaatcctgtaatcagtggggtgccgggttgagctcgcaaatccccgctgcaggacagggctctgcaccctcaatcttctcatccccagatgggatgggcgggtcgggaggaggagcgacgagagcccaggaaagcttgaaggcagagatagactcacgtctctaagacatatacataatatagccgcaaccgcggcggccttactttcccggagctgcatccccttttaggcgaagagcggaggcgaccagggactaccctaggtgaaagggcagccacctggccctacccgggctcaacgccgagcctctcggaggtacggcc

SEQ ID NO: 33762 - DNA, 2300 bp, Homo sapien
aagctttcctgggctctcgtcgctcctcctcccgacccgcccatcccatctggggatgagaagattgagggtgcagagccctgtcctgcagcggggatttgcgagctcaacccggcaccccactgattacaggattacgttggacgaatatttgagcttagtattccctgttcactgtgtggggtggtggtgggtcggctaggaatagtcttgaaggtctacctctgacatctcatttcagtaacctcgcatcttcagggacagttatctgctttttaaaggaggtaattgtcaatcttgttttcaagagtgaatagagacctgaccgtgacaacagtctgcacctttttttgtttgtttgtttgtttttgttttgttttgagacggagtctcactcttgtcgcccaggctggagtgcaacctccgcctcctgggttcaagtgattctcctgccttagcctccagagtagctgggattacaggcgcccaccaccacgcccggctaatttttgcatttttaatagagacggggtttcaccatgttttggccaggctggtctcaaactcctgacctcagatgatccgcccgcctcgtcctcccacggtgctgggattacaggcatgagccaccgcgtccggcccctggtctgcatcttttatttcgagctacaaactatatttactcaaataggtgttttttttccacctgtataccttttgaaacgtcacagtctctaatcgtgaacgatttggggcggagggctgaacaatgtgttttctagtgtgtcgaggtgtttataggctatgtgtgcctccaaactgtaaagtagtccagtatactttccaatgtataagtttgtagaccttaaacttttcttctggctaacttaaaatcgttgaattcactagtttgcataaacatttaagaatttgaaaacacggttgaaaaacagtgttaccaagaaattttgtaataacatgttcaaatgaagacaaaaattttacagtttaagacttaaattcttcgtccacagcaagtgaattcatggtattttacttttttgggaaatactggaaatgaagacctgcaactgtaatttgaaataaggaaaactttaattttcagtataaaaattgctcaaatagaattgcctgattttaatgacaaaaggtaagtacatagtatgtgtggtttttttgtttttttttttctaatacatcattgagttcatgtgaaaaactcttaacaccacaagtagattatttgatacagttatagtcattaaaattattttagaattttgatttcttgtatcacttaaatttactgttctttttcactagttcttgagcctttattgtattgttgattatatcagtatacatttattactataattgggcatttacagtttttcttcatttgagggcttcttcccccccccccccccaggtgaattatagtttaatgtactgcaagtcctaaactacggatgggaactattacagtttataatgtcaaaaacttttcttagaccaaaggtatcttccacaaaggtatgatacactggaatggccatgtaataattgccttaaaataattataaatttttatatatattcttaataacttattactgctatcaaagtaatagagccgagtatctattgtaattaatgatttaagcaagtctggtaataagttgtgaaacaagtgttctctaaaagcacaaccttaattttgaaaaagtgttttacagtcccagtcacaaaggctgaaaacatttgaatgaaagaacatagaagagagaaatatgagtggtagttggtgttatagcttaaccaaaagcactgcttcttagaagtaatgtaattcagtgtgtgagttctcagcaagataggggttaaggtgggatgggggtcagacagtttcatgcatgcagggtagctatttccctaagtggtagctctaaattttctttgatgttaagtaagttacttaactttgctgtttatctttctctttttttcagtatatgggagtccacatttatgtaagaaatgaaactataaaatgtataaataatttgcaaatcagaattgctgtcgaaagttttactataatgaaagatattttcatactctcaaaaatatagaggaaaggggccaagattatagtaccagtcacaatcttttgatgaggacgaaatgaatcaggtagctatgactaaaattttttccagtggtcttccttttttaatccactgccgataatattcctaactctgtcttaaaagaag

SEQ ID NO: 33763 - DNA, 2300 bp, Homo sapien
ttatgttaattttcatttttaaaattacaaattagatttaacaatttaggaaccatttgtatttgttttataagttgtccatgtttgtgcccatttttctatttcattttttcctttttaatttgtaaaaattctttactgaaggctgggtgtggtggctcacacttgtaatccccgcactttgggaggcggaggcagatggatcacctgagttcgggagttcaagattaccctggccaacatggtgaaaccccatctctactaaaaatacaaattagttgggcatgatggcatgtgcctgtaatcccagctacttgggaggctgaggcaggagaatcgcttgaacctgggaggcagaggttgcagtaaactgagattgcaccactgcactcctgcctgggcgatagagaaagacagtctcaatgaaaaaaaagaaaaaagaaaaattctttactgaagacattatttctttttatttttaggtgtttttgttgttgtggtttggtttggtttttttgtttgtttgttttttgtttggagacagagtcttgctctgtcgtacaggctggagttcagtggcacgagcttggctcactgcagcttctgcctcctgggttcaaacaattctcctgcctcagcctcctgagtagctgggattacagatgcgtgccaccacgcctggctaatttttctattttcaatagagatgggtttttgccatgttggccaggctggtcttgaactcctggcctcaagtgatctgcctgccttggcctcccacagtgcagatagtacaggcatgagccatcgtgttcagctcctttttgtattttaagttgtaggaacttattcagtttgtcatttaccttgtagttttgtttttatagttaaagggactagctaaacagcacaatgtaggtaaatgaaagatggcttcataatcatcacactcatggtgtaatttaaaaatcttctcctttggttcttattaatgcctgcactgtgaatctgacagattgaaaatggaagccctgactgacagggaacatggaatgatagaccctgacagcggagatgaagcccagcttaatggaggacattctgcagaggaatctctgggtgaacccactcaagccactgtgccggaaacctggtctcttcctttgagtcagaatagtgccagtgaactgcctgctagccagccccagcccttttcagcccaaggagacatggaagaaaacataataatagaagactacgagagtgatgggacatagaagccagcctgctaatcagattgctacttcacagcttcatttttgtttcattcagtggtacttcagcagagttaatatgcttttctgatgaattacacaacagtttgttaattcttcattcttgtagtatttcatcacaagaaacctactcttctgtcatcttgaagtaaatagaagatcaagccttcaaatctcttaattttttcggtatttattaaatctgtgagtggtttaaggagcggtcagtgtgtataaagtgtgtttgaacattatgccaaatatcaagatgtgaaggactaattcaggatgcaaaaacgttattggggggttgtaaatatcaactattcaacagtttaggatgcaattacgagtgtaaactgtgtgccttatttacactttattgtctcccgcttctcagatagttttgatgtgttgtacagtggaatatcttagatactttttggaaagtatttacataagttatatcacaattaaaatgttgaatttaattttgtttctcctgtcttttaacattatctagcacgcactcgctgccatgggtccttaagcacagtgcaccaatctccctcccccagtgtcaaacttttcaaaagatagggaagaggatggcaacgttgcgatgagaactgtaaactctttccaaaagagcccagtgtgtggtcattgccgcgacgtgccggctggtggcaccgagcagcctgggcccagagcggttgtcgggccgacagatccgggcggggcaaagccgggcggggaaagctgggctcgtcccgtcccggccccgcccccaccccgggagcccgataccggtttcagagtcctgggcagcgtgcgcgctcttcctggcggctgcgcaggtaagtgggaccggggtggggccacgtgaccgggagaggagggcccggcggcccccggcccaggtgtgctgcgacggacggctgcccgcgctcggcgctcagcctgccatagcccgcgggggaggccggagccagggatccgggg

SEQ ID NO: 33764 - DNA, 2300 bp, Homo sapien
actgtattagtcagaacggctttggtttctaataacagaaactcaaatcagcttatgcatacaagggactcttttgaattagagaactgagaagtttaggagctgacttggcttcagggttccctttcagtctgtttctctcatcttcactgcttctcacagcatatttagtctcatgctgtcatgtttagactttctctgtgtaactgcggaagatgcctggtgtcagctccagtacataagcacgtagtgggttacagggaagtggctctcttccagcagctttctatcatgtctctggaagcgtctgataggtcttggtttgggttatgtgtccatctttgaacctatcaccacatcagatgaggcagcctggatctcatatccgctaatgtgtgggcagaacacaatcccgtcaggacctcatggaatggaagaaagataaggtttttttttctttttctttttctttttttttttttgagatggagtctcactctgttgcctaggctggagtgcagtggtgcgatcttggctcactgcaatctctgcctcccgggttcacgccattctcctgcctcagcctccagagtagctgggactacaggcgcctggcaccacgcctggctaatttttttgtatttttagtagagacgaggtttcaccgtgttagccaggatggtcttgatctcctgacctcgtgatgcacccacttgacctcccaaagtgctgggattacaggcatgagccactgcgctgggctgaagaagggtgagttataaatgaaaagctgcatgtgtgctctaatagaagctagacatgcaaaaaccacagatgcctccagcatagaccatgcttttgttaccataatagcaggtattcagtctaagtcctgctcctcatagcacagaaaaccaatcactgagacaatgagtattgccaaggaagaaagctttaattgggtgctgcagctgaagacatgggaactagtctcaaattcatctcctgactgactataattaggggttaatctagcagggaagaaatgtaactatgcatgggaaaacaggaactcaacttgagaggggtaaggaagcaatcatgatgaatgaagggcctggtgtctcattgtctggatgcaacgatctggtgagtttcagttctttttcttcaggtactttttgagaggcttttgagggtcctttcctgaggaaggaactcagataatacaaatgtaaggttcaagcttaagaccagaactgtctatgggactattgagttggtttcaccttagctattctttaattccctcctaagaccaagcccatggaagcagcttgcccttaaatattgaatggctcaactgctagtagcactttattcttccaaacattttcacagactgataaggtttggatgttttgtctcttccaaatcttatgatgaaatgtgatccccactgttggaggtgggctagtgtgaggtgtttgggtcatgggggcagattcctcataaatgggttagtgctgtcctcacaataataagggagttctcgctctgagagctcttgagagctctggttgtttaaaaaagtgtggcacctcctccacctccaccactcactctcaccatgtgacatgtctgctcctgttttgccttctgctatgagtaaaagctccctaaggcctcactagaagccaagcagatgctggtgccatgtttcctatacagcctgcagaacggtgagccaattaaacctcttctttttcctctctcctttttttttgagacggagtttcactcttgtcgcccaggctggagtgcaatggtgcaatctcagctcactgcaacctccgcctcccaggttcaagcgattcacccgcctcagcctcccaagtagctgggattacaggtgcccgccatcacgcccagctaatttttgtatttgtagtagaaatggggtttcaccattttggccaggctggtcttgaactcctgacctcaggtgatccgcccacctcggcctcccaaagtgctgggattacaggcgtgagccactgtggccggccacctcttttctttgcgaattacccagtctttttccagcggtgacgacctacccaggagaacatgcctctcacaaaggatctccttcatccctctccagaataggggaagaggaaacacaagaagcagtgcctgatgcagagccccaattcctacttcatgggtgtaaatgcccaggatggtacaaaatcatcacagtctttagccatgcactaacagaaattttgtgtgtt

SEQ ID NO: 33765 - DNA, 2300 bp, Homo sapien
tatgaaatatacacaatattggacaatagttaaccgttcttttgatgttgttgtttagaaaattaatctcaagcgaataaaatagaattcatacaattaatgaatcctattattccatatggatgaactcagaactaactagaaagtaagtttcacagagatttttgagttttgttcactcgtgtgtgtacagattaggcactcagaaaatagttgaaggaatgaattgggaaagcaaatagaatatgaaagccttctacccaacacaacatgtctttgagtttaggtttagggtgggaataagaaaaataacatgatatgcataagttatcttaaaatgataaaaagtttaatttaaaaacctaatttaccaagagaaccgaaaacatatgtccacacaaaaacttgtacacaaatgttcatagtaacattattcataacatccccaaaggagaaacaacccaaatgttcatcaacagatgaatgattaaacgaaatgtgatacatcgatacaatggaatattattcagttataaaaaggaatgaagtaccaatacatactacatcatggatgaacctttaaaatattatgctaagtgaaagaagacagacacaaagggcacatattgtattatccattcatataaaatgtccagaataggcaaattaatagagacagaaagtacattagtggttgccgagggatgaggggagaggggaaatggggagtgactattaatgggcatggggtttcttttgggggcgattaaaatggaattagatggtggtgatggttgtacaatctggtgagtatactaaaacccactgaattgtacgtgccctttaaaagggtgaattttatggtatgtgaactctcttttataaagtggaaaaaaactcctaagatctcttcagaacatgtcaaaatacattataaaataatagacatgtgtttacaaatctgagagtattaggaaatgttcccttgtttaattataaaccaaatggaatgtttggagatttcagtaatctgacagggaacattaaggggattaacctgacttccccagtgttaacaataccaatttaaactgcatcattcaaaaactacatagtcatattaaagcatttgtagcaatgacttccacgaaaaaaataccaattaaattaattacccattaaagctgccatcatctgaaatacctcatatttatatagtgcttttacttcctcaagtatgaattgtgccttaagatctaatgtatgggagagtcacatctctaaccatttaattaaaggtagagaagtgggtgggattggatagaaatttattagcaatgctgacattccagattggaacacaaagacaagcaggatgtaagaaacctaaaagttcgctttcaatgcagatagttaaatgccaagaactataattgccacatcctggagtacaattaaaaaatatgttgaaaaacaaccaacatacataaaaatatacacagtgttaagtgcagactatgaaatttcccttggaaacagaatccagatcaagaaatagaatacagcacccggaactaaggtgctttttcgttttcttaaaaaaaaaaaaaaagtaaaccaagtttattttgctttttaagtagtgttgttcttaaagcactacaggttggtaaacaacgtataaggtgctttttctcaggccaaagagccataatagtttaaatttcccggtcctcaagagcggaccgggtgggcaggagaggaccctggggtggtgatgtgtaaactgtattatgcactttagcctgctggatggcaactaacacctacagtagttcaccctcattttaacccctctaagtaattgtctcttattctgaatctagagattcagaaacagcgccaatgtttacacacgacttttgaaattttcccaggagtctttcgttggagcaatacatctagatgcctttttccagcaacagtttaatcaaattctggaagcagaaaagtgtcctgtgaggacgtgcctttcctatcaaagtgctgagtgcctggaccctctttccggaggaaacagtcccctctggacctcgttcggcctctctccatcagacaccccaaggttccatccgaagcaggcggagcaccgaacgcaccccggggtggtcagggacccccatccgtgctgccccctaggagcccgcgcctctcctctgcgccccgcctctcgggccgcaacgtcgcgcggttcctttaacagcgcgctggcagggtgtgggaagcaggaccgcgtcctc

SEQ ID NO: 33766 - DNA, 2300 bp, Homo sapien
tgatacatcgatacaatggaatattattcagttataaaaaggaatgaagtaccaatacatactacatcatggatgaacctttaaaatattatgctaagtgaaagaagacagacacaaagggcacatattgtattatccattcatataaaatgtccagaataggcaaattaatagagacagaaagtacattagtggttgccgagggatgaggggagaggggaaatggggagtgactattaatgggcatggggtttcttttgggggcgattaaaatggaattagatggtggtgatggttgtacaatctggtgagtatactaaaacccactgaattgtacgtgccctttaaaagggtgaattttatggtatgtgaactctcttttataaagtggaaaaaaactcctaagatctcttcagaacatgtcaaaatacattataaaataatagacatgtgtttacaaatctgagagtattaggaaatgttcccttgtttaattataaaccaaatggaatgtttggagatttcagtaatctgacagggaacattaaggggattaacctgacttccccagtgttaacaataccaatttaaactgcatcattcaaaaactacatagtcatattaaagcatttgtagcaatgacttccacgaaaaaaataccaattaaattaattacccattaaagctgccatcatctgaaatacctcatatttatatagtgcttttacttcctcaagtatgaattgtgccttaagatctaatgtatgggagagtcacatctctaaccatttaattaaaggtagagaagtgggtgggattggatagaaatttattagcaatgctgacattccagattggaacacaaagacaagcaggatgtaagaaacctaaaagttcgctttcaatgcagatagttaaatgccaagaactataattgccacatcctggagtacaattaaaaaatatgttgaaaaacaaccaacatacataaaaatatacacagtgttaagtgcagactatgaaatttcccttggaaacagaatccagatcaagaaatagaatacagcacccggaactaaggtgctttttcgttttcttaaaaaaaaaaaaaaagtaaaccaagtttattttgctttttaagtagtgttgttcttaaagcactacaggttggtaaacaacgtataaggtgctttttctcaggccaaagagccataatagtttaaatttcccggtcctcaagagcggaccgggtgggcaggagaggaccctggggtggtgatgtgtaaactgtattatgcactttagcctgctggatggcaactaacacctacagtagttcaccctcattttaacccctctaagtaattgtctcttattctgaatctagagattcagaaacagcgccaatgtttacacacgacttttgaaattttcccaggagtctttcgttggagcaatacatctagatgcctttttccagcaacagtttaatcaaattctggaagcagaaaagtgtcctgtgaggacgtgcctttcctatcaaagtgctgagtgcctggaccctctttccggaggaaacagtcccctctggacctcgttcggcctctctccatcagacaccccaaggttccatccgaagcaggcggagcaccgaacgcaccccggggtggtcagggacccccatccgtgctgccccctaggagcccgcgcctctcctctgcgccccgcctctcgggccgcaacgtcgcgcggttcctttaacagcgcgctggcagggtgtgggaagcaggaccgcgtcctcccgccccctcccatccgagtttcaggtgaattggtcaccgagggaggaggccgacacaccacacctacactcccgcgtccacctctccctccctgcttcctctggcggaggcggcaggaaccgagagccaggtccagagcgccgaggagccggtctaggacgcagcaggtgggactcgcggcgctggcccgcaggcttcccgcacccccttccacgttggtgcgcatgcccgggggcagggccggttgtagggaggagggaaaggagagggagaagggggaggagacgtccccagcccagtccccggctgagcgctggcggtcggtgcggcgtcaggtgcgcccgccaggtgagcgcgctccctggcaccgttggcccccggagggtcgggcccagttgcggcgagcgggtgagtgttgggcgcggcgtcaggggcgcacgggagcccgagggtccccgtggggggaccgcggcgactatgttaggggaggtgccgggg

SEQ ID NO: 33767 - DNA, 2300 bp, Homo sapien
gcaaatatgctttatatttattggggagtcctctatctttttcctggttttccttaaagccttcccaggctgatggataacaaacatatgcaagaaacttggggcttgggattcctctaggctgtttgtcctagaggaatgcatcccgtcttgcaaataggatggtcaattaagatggaaggaagcaaaagtgtggataggaaggaagggcacaaaaggaaaagtgtggaatttgtgtgtgagtcctctaatgaggtcaaaggtgggagggaggcaagcatggaagcttcctggcactgcgatactaatttcccctcctctcccttttaaaatcctgtcttctgggaggaaatgagactgattatggagttcccactaagccctgcagggttggtggagacaaccccattttacacattagttcatagacttgggttgtgacttgcttgaggtcacccagccagtgtgtcagagcctgattttaaatccagggctgttctttccactgctatgcaagataccttctgtttatatttttgagggagacaacagagatgggaaaaatttttaacaataaaataaaggcaatggaggggatgagtatgctgatggggaaggaaagaggccctagcttctgcagttcctttgtgttattcctaacccttttctcatctgggggtgcactgcctctccatttctcaagtatgggaaatgccagtaattccacttgtgttaattggcagtcatacaacttgtccaaaactgaattgatcttacccaccccgccaacattttaataattgcaaccccaacctttcagttgctcagctaaagactatggaggtatccttgattcttttctcataacacacatccagtgtattggtaagatttagaattcagtcacttctcaccagctgctggtccaagccatcacaattcccccaaagttcttaacagtgctcacagcctctcctccccaccttacccttctgattgcagcttccaccactcatcccctgctcactcctgcagtcgtcaaagaccccaatgcacttctacctcagggcctttgcacttgcagctctctttgtctgaagagcttttcccctaggtatcagcagggttaacacccttcctcattcaggtcatggcttaactgtcttcccagcgaggactcctctggccaccctattttattttttgagatgaagtctctgtcacccaggctggagtgcaaggttggctcactgcaacctgtgcctcctggattcaagcgattctcctgcctcagcctcccgagtagctgggattacaggcgcctgccagcacgcccggctaatgtttttgtatttttagtagagacggaattcactatgttggccaggctggtctcgaagtcctgccctccgatgatccacccccgctcggcctcccaaatcaccatgcctgggattacaggcgtgaaccatcgcacccggcctggccaccctattttaaactgcaaacttctccccttcagtgcttagtttttctccacagcattatcaccatttcatatagtatatgtttttcttcatactgactccccttggagaaggaaaactccacgagagcaaggatttttgtcagtttttcattgttatttcctcagtgcttagacatgcatcaggctcaaagtagatgctcaatgtttgttgaatgaacagcaagagcaatggaggagtcctgaaatacacagcaagaagcaaggataattctggctttacttctgtggccagggtccttcatcccaaccttttagaagtagaaagacaagatcgagctcctcagaacccaggtcgatggctgcagagccttcgaccttccgagagcgaatggcgatcactctttccggttctctgcgaattccagctggaacaccgtccctttccgcgccccaactcagcggaggccatgccctgcacctgagcgccccgctccggcagctgcactctgcagcatccggaacgtttcggcgtggccgcagggcgcggcggaatgacttccggggcgcccctaaagcggcggagaggagtgtcgggctgagtttccggctgagagtccttctagcggcgccggtgagtccgcgtgtggaagtctgtgaggcgcagaggtggggcaggccgtctgactagctaggcggctgggagcgttttcgtggcggggaacggaggttgaattgccctgcctgggctcatagggaaggaggatgtgaaggagcttgtgaaggcagaggaaggtaactttcgtctggggag

SEQ ID NO: 33768 - DNA, 2300 bp, Homo sapien
ccaccatgcccagccctttccttttttttttttttttttaaataggagacaagggctcactctgttgccaaggctgtagtacaagtgcagtggcatgattctagctcactgtagcctcagattcctgggcttaagcaatcctcttgcctcagcctctcaaagtgctgggattacaggtgtaagccaggacacccggcctcctttcttttgaatgatattaatctgttcatcattcagcacaatttggagcaaaggaactagtaagtcttcaacaggctttcacttcatcctgctcccccagtagtagggtcatacaaaaagtctacgaaggtagaggccctcttatcacagcaacaatcatcacttaagtcaaagacataaaattaagggataccttagtttcatcacagaaccagtccaaatgtgtttgtttgcattctcaacatttcagtaacctctagggagtatttcttctaacaattatgggtggaattgggcagttcccctttacaagatatgttttatgtactgccacctttgtgcagctcaaccgatttggaatttgcccagctaaccacattccggcaaaagctgcagctaattgaagatcttcaacgaattcagctaattaagaccaaacacaccctttcatttgaaggtacatttgacagtacctaatacaaggaaaagagctcctttgtcattcatgtatatccaacccagcagtggttctgcaggaagctctgtcagtccacaggcaacttcactcttgtgtagttccctgtttcagttgtctcttgatgccctcccactgtagtttcgttggtgattatctacccgatgagggtcacattcccatcagaagaaatatctgcccaactcctctttggcatcatgttccttccctttacagaaggaaattggtggacttggcaacacaggctcttttttagttactttcatttttgccaaagcagcctaaccagccagggaactgtattcttggctgacttcctctgtgtctggatttctttttaaatctatttagcgatttcctcttgctctgcatcaaccaccttcaagttccattgtcatccctttcttcccattgagagttgtagcacttcagcaaattcaaacagggattccccagcaactagcctggcaccagtggctctaaatctttccccacttttcatctttctcccaaacaaagccttagctatcatttaaattataaagtaaaaaactggggggccaggcgcagtggctcacacctgtaatcccagaacttcgggaggctgggacgggcggatcacttgagttcaggagttcaagaccagcctggccaacatggcgaaaccccatctctactaaaaatacaaacaaattagccgggcgtggtggtgcatgcctgtaatcccagctactcgggtggctgaggcacaagaactgtttgaacccaggaggcagaggtttcaggcttcagtgccactgcactacagcctgggcaacagtgtgagaccctgtctcgaaaaaaaaaaagaaaaaaaaaaacctggggccaggcgcagttgctcacacctgtaatcccaccactttgggaggccaaggcaggcaaatcacttgagcccaggagttcgagaccagcctgggcaacatggtaagactccagctctacaaaataatttttttaaaagttaggcagccgtgatggtgtgcgcctatagacccagctactcgggaggctgaggtgggaggatctcttgagcccaggaggttgaggctatagtgagctgtgatcaagatactgcactcaacttgggtgacagagtgagagagaccctgtctcaaaaacaaaaaaaaagtaatgatcctattcacagtaccctcttcatcaattacacaggtttggatcattgaaaagacttagaagactccgcatagtatcctcacataaggctttaataaaggtaaaggatagatacaaaaaaaaaaaaaacccaacaaaccaaaaggcaagtgaaacaccacacccagttcctagggtccttttgcagccacagaggatgtggaagatgtgcttcatctttaagcaatgaaccagctagatgatacatgcaagacaccttggtctcaagagaactgtaacctcatctgaggctcttttatactcctctgatcaggtagccaacactagcttgcataccagggctcaaaaccagaaacaagctggtatagtcaagctggggcagtggcatgcacctgtaatcccagctacttgggaggctgaagtggga

SEQ ID NO: 33769 - DNA, 2300 bp, Homo sapien
taggtagagtgacaactatattctgcttctctgtgttgctctatggtatttgtgacaactacttgatctctcagttaaagatctgcattaacctccactgtaacttatgcatgtgttcggtttgagcaagaccagcaaggtacctaggaacctttccctgatcatcttgtatttcaggcagagatttagctgacaggaaccagcccatcatttatagattgcagaggtgcttcctaatgaccagcagctaaagagaaaatgccacaatctggtggaaggctctacgtgtttaggaatcatgaaaattaatttcctgattttctcctgcaggcagaatgtggcaaagattgctatccatgttcctattatctcaaatccttccatactaatagaaatcccaatatttagctgggcacattgtcacccaggaaaaagattaggtttcccagctcctcttacagctaggtatggtcatctgactaataataataataataattattattattattattattattattattattattattatttttgagacagagtttcactcttgttgcccaggctggagtgcaatagcatgatcttgactccccgcaacctccacgtcccaggttcaagcgattctcctgcctcagcctcccaagtagctgggattacaggcacccgccaccatgcctggctaattctttgtatttttagtagagacagagtttcaccatattggccaggctggtctcaaactcctgacctcaggtgatccacccacctcggcctcccaaagtgctgggattacaggcgtgagccaccatgcccggcccatccaactaagttctgattaaagaaatataagcagaagtgtcctgtgacagtttctaggagcactttgtcaggggacaagaggtgaggagagtaatgtgtagaaagaaaagacatgataattatcacaaatagaatacttgtattcattgttagtccagaccttaaggtttcaaatttgaaggtttaccacctaagggaggaatagaaaactgggagaggatttatgatgcaggaaagaaaagagatgtatgccaggtgcagtggctcacacctgtaatcccagcattttgggaggccaaggcaggaggattacttgagcccaggaggttgaggctgcagtgagccatgatctcgccactgccctccagcctggatgaccatgtctcaaaaaaaatagaaagaaaagaaaacgaatctataagaaatgctgaagagaggcctggcgcgatggctcacacctgtaatcccagcatttgggaggccaaggcgggcagatcacgagatcaggagatcaagagcattctgactagcatggtgaaaccctgtctctactaaaaatacaaaaaagtagctgggcgtggtggcaggcgcctgtggttccagctactccagaggctgaggaaggagaatctcttgaacccgggaggtggaggttgcagtgagccaagatctgcattccagcctgggcaactctgtctccaagggggaaaaaaaaagaaaagaaaaagaaacgctgaagctagtggacattgctgagtgtagctaaacgtaagcccaggagcataaagtctatgtgggaattaaaggtcaagcaagcaagtgggcacaacctactgactcacctgtgtagaaaagacctgctttggccagtgctgcaactcccacagctgattcccggggccagtccttaaaagagtccagccgtagttcttcgtaagcaaagatgctgtcattgcaataagcttgaataaaaagcacaaggtgagaccagcaggctttagtcttttttttttctatatctttattgctgctgcacaaattaaagagaccagtaggctttgatattgcaagtatcagcgttcaagttgtcccttcacagttacagatggaatgatgtctagagtttgcttcaaaataaacggggcggggcgggggggacgacaaaaagagatagggacaaaaaatcaaaagaagaaataaacaagcaaagcctttggaaaatgtttgagtttttacctgatgccataggtaattctctctggacccaggaattcacaaaatgttctccctgagggaaattaaaattcaagttgttgattatctgactttttttttttttttttttttgaggcagagtctcactctgttgcccaggctgaagtgcagtggcaggttctcgtctcactgcaacctccgcctcctgggttcaagtgattctcctgcctcagcctcccgagtagtacaggcatgtg

SEQ ID NO: 33770 - DNA, 2300 bp, Homo sapien
tgcgggtgttcaactccactagataatgcaaagctttttcccaagtggttgcactgatttacattcccattggcctagatgcgttgctattgatttgcttcctcactaacttggtattgcccaaattttaatttttgtcagtgtaattactaataatgttaagcttattttcttcttctttttttctttcttttttttttttttgagacggagtttcactcttgttgcccaggctggagtgcaatggcacgatctcggctcaccacaacctccgcctcccaggttcaagtgattctcctgcctcagcctcccgagtagctgggattacaggcatgtgccaccacgcccagctaattttgtatttttagtagagatggggtttctccatgttggtcaggctggtctcggactcccaacctcaggtgatccacccacctcagcctcccaaagtgctgggattacaggtgtgagccaccgcgcccggcagttgagcttattttcatattttcctgcagaatagtcttgttctttctcttcaagagtgtgtcttagctatttttttgccctttggtctttcatattccagagaatatattaaatatcccaagcaggcatggtggttcacacctataatcccagcactttgggaggctgaggtgggaggagtgcacaaggcgaggagtttgagactagcctttgcaacatagctagactccatttctacaaaaaatttttaaaacaaacagggtgtggtagcatgcatctgtagtcccagctacctgggaggcagaggcaggagaatcgcttgagctcaggagtataggttgcaatgagctatgattgtgccactgtactgtggcctgggtgacagagtaaaactttgtctctaaaaaacagaaatatccctctttatccttgatagtattttttaggcctttattagttttttcatgttacatcttttagattattttctttttaatctatctgtgactatatttaaagtcaattcttgttttttccttttcctttttgtgggtaacggggtctcactatgttgcccaggcagatctcaaactcctgggctcaagctgtcctcccacctctgccaccctaagtgttgagattacaggcatgagccactgcacccagccttaaagtgaattgttataggcaacaacacagtggggtcttttattttattttttatttgtttatgagacagactcgctctgttgcctacgctgcagtgcagtggtgcagtcttgactcactgcagcctggacttcccaggctcaagcaatcctcccacctcagactcctgagtagctgggactacaggcacatgccaccatgccaggctaattttttttttctgggcctagagatctgtggaactttgaacttgagagagatgatttaaggtatctgacagaagaaatttctaagcagcaaagcattcgagaagaagcagagcataaaatttcagaaaatttgtagcctgatgatgcaacagaaaagaaaaatctattttctcaggagactgggttgtagaaatttgcataagtaatgaggagccaaatgttaatcaccaagacaatggggcaaatgtctccagggcatgttagagaccctcacagcagaccctcccatcgcaggccaggaggcttagaaggaaaaatggttttgtgggtccagaaccccctgctgtgtgcagcctaggaacttggggccctgcatcccagctgctcctgccataggtaaaaggggacaaggtacacctcaggccatggcttcagagggtgcaagttccaagcctttcaggttctaggtggtgttaagcctgcagatgcaccgaagtcaagaattaacgttcatgaacctccgcctacatttcagaagatgtatgaaaatgcctggaaatccaggcaaaagtttgctgtgggggggaggggaggggggggccctcatggataacctctgctagggcagtgtcaaagggaaatatggggttggagcttccacacagagtccccactggggtactgccaagcagagctgtgagaaaagggccaccatcctccagaccccagaatggtagatccactgacagcttgcactgtgtgcctagaaaagctgcagacactcaatgcagccagaaggggggctgtaccctgcaaagccacaggggcggggctgcccaagaccctgggaacccacttcttgcatcacctagatgtgacacatggagtcaaaggaggtcattttggagctttaagatttgcctgctgggttttgga

SEQ ID NO: 33771 - DNA, 2300 bp, Homo sapien
acagaacaatctgctggcttagcctttggccaagttggcagctggacgaggacgctcagagcccagctcttgagagttcaagtatccgacagttccccactgctcccaggagcggttacccgggcactctgtgcccctcattcctgtttgggccaaggccgaggacctgcgagtagggctcagttgcctggagccccttcagcccatcccccagttcactttgcttgtgggatctccccgttgctcctgcccctggactgagtggcaggccatcctacaaacacccgcacactcgacatcagtggtgtcaagacaactctaagaaggttttccgtgatcctgcaagacctgtgttccatcctggtgattctgtcttcaacttcactgcacaggtaccacagtaagccagtgctgtgtgctctgagttccagggcatcccccagctcagccactacactgagcacaaggactctgtggggcccaggagcaggtagtcacccctttggggtccacaacacccggctgtccccagacttgtgtccagggaagatagtgttgagggccctcaaggagagcggggcagggatgcctgagcagcacaaggaccccagagtccaagaaaatcctgatgatcagagaacggtccccgaggtcaccggggatgcacggtctgcattttggcccctgcgggacaatggaggcccctctccctttgtgcccaggcccgggcctctgcagacagacctccacgcccagagctcagaaatcagatataaccacacatcccagacatcctggacgagctcgagcaccaaacgaaatgccatctccagctcctacagctccacgggaggcttgccggggctaaagcagaggagggggccagcctcatcccgctgccagctgaccctcagttactcaaagacagtgagtgaggacaggcctcaggctgtctcttcgggtcacacacggtgtgaaaagggggcagatacagcaccagggcagacaatcgccccaacgggtggctcccccagatcccaggactctaggccccgtagacgcaagattcccctgctgccacgcaggcgaggggagcctttgatgctgccacctcccttagagctggggtaccgggtcacggctgaagacctgcacctggaaaaagagaaggcattccagcgcatcaacagtgcactgcacgttgaggacaaggccatctcggactgcagaccctcacggccttcccacactttgtcctcacttgcaacaggggcttcgggtgggcctcccgtttctaaagcacccactatggatgcacagcaggacagacccaagtcccaagactgcctgggcctagtggcccccctagcatctgcagcagaggtccccgctacagctcccgtgtctgggaagaagcacagaccaccaggacccctgttctcctcctcagatccccttccggccaactcttcccactcccgggactcagcccaggtcacctcgatgattcctgtccccttgacagctgcaagcagggatgccggcatgagaagaacaaggtcggctcctgcagctgccgcagcagcccctcccccctccacattgaaccccacgtcggggtcactactcaatgcagtggatggaggcccctcacatttcttggcctcagccacagctgcagcacgtgtccagaggtcagaagtgagatataaccagagatcccagacctcccggaccagatcgtgcctcaaacgaaatgccagctccagctcccacagctctacggaaggcctccaggaagtaaagcggaggagggggccagcctcatcccactgccagctggcccacagttcctcaaacacagtgagtgaggatggacctcaggctgtctcttcgggtcaccgctgtgaaaacaaggcaggtacagcaccagggcagacacttgcccccaggggtggctcccccagatcccaggcctctaggccccacatcaacactgcactgcacgttgaggacaaggccatctcggactgcagaccctcacgaccttcccacactttgtcctcacttgcaacagaggcttcgggtgggcctcccgtttctaaagcacccactatggacgcacagcaggacagacccaagtcccaagactgcctgggcctagtggcccccctagcatctgctgcagaggtcccctctacagctcccgtgtctgggaagaagcacagaccaccaggacccctgttctcctcctcagatccccttcctgccacctcttcccactcccgggactcagccca

SEQ ID NO: 33772 - DNA, 2300 bp, Homo sapien
taggccggatgcggtgggtcacgcctgtaatcccagcagtttgggaggctgaggtgggtggatcacccgaggtcaggagttcgagaccagcctggtcaacaggtagtgaatcctgtctctactaaaaatacaaaaattagctgggcatggtggtggacgtctgtaatgccagctaccaggtaggctgaggcaggagaatcgcctcaggtgaaccaggaggcagagattgcaatgagctgagataatgccactgcattccagcctgggctacagaatgagactctgtatctcaacaaaacaaaacaaaacaaaaacacaacagtctgttctgtggaggccttgggcagatgctgggagctctgagcacggactggtccctctgttgggagcctcttcccttcatccctcctggttaacttgactcagcataaaggccatttcttctaagagcctgtccctgactctccaatcggggatgtgtctgttgtctcatagagtgcccaattcctgccaccacttgtcatttccattcgcaacatttctttcattgtttgtttttcagagtcagggtctcactctgttgcccaggctggagtgcagtggtgcaatcatagctcgttgccatctcgacctcctgggcttaagcgatcctccccactcagcctcccaaatagctgggaccacagacgtgcgctgccttgccaggctaaattttaatatttttttttccccacgagtcagagtcttgctctgtctcccaggctggagagcagtgttgcggtcttggctcactgcgtcctctacctcctgggtacaaacagttctcctgcctcaccctcccgagtagctgggattacaggctcacgccaccatgcccagctagttttcttctttattttttgttgagatggggtttcaccatgttggccaggctggtctcgaactcttgagctcgtgatccacctgccttggcctcccaaagtgctcacaggcttgagccaccatgcccggccctaatttttaaatttgttgtagaaacaaggtcttgctatgttgtccaggctggtctcaagcgcctggtctcaagtaagcctcccaaagtgctggggttctaggcttgagccacctcgcctggcacttgcaccgtttttctgtgcatgcatctccactcccactgcccaggacctgtggacttagatttgagtcattactgagcacctagcacccagcctcatgcctacctcccacctcgcactacctgtttgcttgatgcattaataaatattccacctgaatccacagcccattcactcctgtgttcaagagctatttcaggaagtgaacctcatttctggcagtgttcagtccagtgacctcagctctgtgtacccggcagggtggctacgcctctgggggagttggattcaggggtgggggagaaagagtgttgttagagagctcggtctaggactagaggaacgtgcccttatgtaaaatacatctcaagttagggaagaaagcagcggctctgtgctttgtttttttttttttttttcttttctttctttcttttttttttttttgtttgtttgtttgtttgtttgttttggggcagggtcttgctctgtggcccaggctggagtgcagtagcgtgatttcggctcactgcaacctccacctcccgggttcaagcaattcttgtgcctcagcctcccgagtagctggagttacagatgcgtgccactaagcctggctaatttttgtatatttagtagaaatggggttttgccatgttggccaggctgttcttgaacccctgacctcagtgatctgcctgcctcagcctcctgaagtgctgggattacaggcgtgagccatcgtgcctggcccccagttgtgttctggcaggggaagatgggacagagaggatgggagggtgtctgagcctttcccggactgacggaacctgtgtcttctctcttttgtggacaggatggtgattgctcacaccaaagccttggacccctcccagcctgtgacctttgtgaccaactccacctacgcagcagacaagggggtgagcctgggggtccccaccccatttctccctgcctttgcctgggcttgtcctgaagcctgctcatgggaacagctggaaagaaccatgtgctgccagtctgagctttttattttgttttacttagaaagatagagacagggtcttgccatgttgcccaggctggtctcgaactcctgggctcaagtgatcctcctgcctcggccttccaaagggctggggt

SEQ ID NO: 33773 - DNA, 2300 bp, Homo sapien
aatcccagctactcaggatgctgaggcaggagaatcgcctgaacccgggaggcagaggttgtagtgagccgagatcataccactgcactctccagcttaggtgacagagcgagactctgtctcaaaaaaaaaaaaaaaatatttgaattttgtttaaatcgctaacacatactgggcatttaataacaaaaaaaaaggacatgagattgtgatccttatgaaggtttgagaggcatttcactagggttcaacatacagcagtctgaaacatactgtaataatttaatccaatggctcatctacagcacctaaaaagattacagcagattctcattattcagtgtagttacggtctagaaagttccatgaacaaataaaaagttaggtttcagcaagctactggtcacacttttgtaagcttaccaacacctacttttgttgtatgtgtgcttatttaatatatattgttggccaggcacagtggctaacgcctgtaatcccagcactttgggaagccaaggcgggcagatcatttgaggtctggagttcgagaccagcctggccaacgtggtgaaaccccgtctctactaaaactacaaaaaaaaaaaaaaaaaattagccaggcatggtggcgcatgcctgtagtcttagctacttgggaggcgaaggcaggggaatcgcttgaacccaggaggcagaggttgcagtgagccaagactgcaccactgcactccagcctgagcaacagagtgagactctatctcaaaaaaaataataataataattaattaaatgaagaataaataaataatatacattgttcattcattaacattgaactcacagccaacggcactacagcactcacgcctgaatggagtttatttaatgcatgtattttctctgtaagacacatcacagacttcttggacttgtgaatgctaagcagcacttcagcactatgcttgggggttaatttaaatggcaaaacaaccaacaaacagtacaaaaacaggaaaagcatggcattaaatagaccacaaaaaggatacctgactattgtatgagagctgaaaaagaaggcagaatatcatcctgttcaaactcaaattctttgacactctgcgcaaacacatgactatgaaagtgctgtgagtactgatttgggggttacaaaaaatagtaggtgagttcacaaatacaaaagctgaaaacaaggaggatcgactgtattttcgtagacaatctaatctcagaagatttcagttcagacaaaaatcatgataattactgtattacaaaagggcactagataggggggaaagagtaaaaatcacaattaaaacaaaggttcaaaattctgcagcaaccatatccagttacactttaatatgtttgcggcagactacattattgttcccaactcatcacccctccctatatctaaaacctttccccaagacaatgcagttcctcctgctagagatcaggtatatttatctatactatcaatgttagccatggacaaggtatgtgctttggctgactgaatgttagtggacatgagagaagcaatggcttaaaatgtacttccagaactggagtttccttgtgattctatcactgtgacagaaacacattctcaggtagtccactgatccaagggggaacaaacacacagaaaacatacctagactctatctgcagcttgcagcctcaccaagccaacaacagtcaactcacagatatgttagcaaaaataaatgtttttcgtaccttaagttttatataattattgacctgcagttaactgatatacaatatacattaatcttaaaatatcagtatcccattaaaaatatttacattaaaaactgagaccactttctttcctcctttttttttttttttttttttaaattaagagacagggtgtctcaatgttgcccaagctggagttcagtggctagtggctattcacaagaacgatcatcgcacactacctcaaactcctgggatcaagcaatcctcctgcctcagctttccaagtcgctgggactataagtgtgtaccacagcatgtcagctctctctctccttcttgacctaaagcctagcataaaattagctaagtagaatgtttccaaagatgcctgcatcagtatctcccatcccacataatttctgtttgattttgccattcacccataaaatggtgggatctacctcccctccttgcaaatttgagctggccctctgatcctgtctaagatctgaagccagatattaaggtacttcatt

SEQ ID NO: 33774 - DNA, 2300 bp, Homo sapien
ctgcagcttgcagcctcaccaagccaacaacagtcaactcacagatatgttagcaaaaataaatgtttttcgtaccttaagttttatataattattgacctgcagttaactgatatacaatatacattaatcttaaaatatcagtatcccattaaaaatatttacattaaaaactgagaccactttctttcctcctttttttttttttttttttttaaattaagagacagggtgtctcaatgttgcccaagctggagttcagtggctagtggctattcacaagaacgatcatcgcacactacctcaaactcctgggatcaagcaatcctcctgcctcagctttccaagtcgctgggactataagtgtgtaccacagcatgtcagctctctctctccttcttgacctaaagcctagcataaaattagctaagtagaatgtttccaaagatgcctgcatcagtatctcccatcccacataatttctgtttgattttgccattcacccataaaatggtgggatctacctcccctccttgcaaatttgagctggccctctgatcctgtctaagatctgaagccagatattaaggtacttcattaatttccatgtttgtcctctatgcaacctagcaatcaagcaagaagtcaaaacatactgacatagtttggatgggtccccacccaaatctcaccttgcattgtaataattcccacgtgtcaagggtggggccgggtgcagataactgaatcatggggatggttccccccatactgttctcgcggtagtgactaagtctcatgagatctgatggttttataaatgggagctcccctgcacatgctctctcctgcctgccactatgtgagacatgcttttgcacctccttgccttccaccatgactgtgaggcctccccagccatgcagaactgtgagtcaattcaacctctttcctttataaattacccagtctcaggtatgtctttatttgcagtgtgagaacagactaatacaataagttgataccagtagagtggggtgctgctgtaaagatacccgaaaatgtggaagcaactttggaaatgggtaacagggagaggctggaacagtttggaaggctcagaagaggataggaaaatgtgggaaagtttggaacttcctagagacttgttgaatggctttgaccaaaatgttaatagtgatatggacaacaaggtccaggcggaggtggtctcagaggcagatgaggaatttgttgggaaatggagtaaagtcactcttactatgcaaagacactgcaggcattgtgcacctgtattagaaacgggcataagataggcgggaaagagggaaaataagaatttttttctagagttccctacagatctgtggaactttgaacttgagagagatgatttaaggtatctgacagaagaaatttctaagcagcaaagcattcgagaagaagcagagcataaaagttcagaaaatttgtagcctgatgatgcaacagaaaagaaaaatctattttctcaggagactgggttgtagaaatttgcataagtaatgaggagccaaatgttaatcaccaagacaatggggcaaatgtctccagggcatgttagagaccctcacagcagaccctcccatcacaggccaggaggcttagaaggaaaaatggttttgtgggtccagaaccccctgctgtgtgcagcctaggaacttggggccctgcatcccagctgctcctgccataggtaaaaggggccaaggtacacctcaggccatggcttcagagggtgcaagttccaagcctttcaggttctaggtggtgttaagcctgcagatgcaccgaagtcaagcattaacgttcatgaacctctgcctacatttcagaagatgtatgaaaatgcctggaaatccaggcaaaagtttgctgtgggggggaggggaggggagggggggccctcatggataacctctgctagggcagtgtcaaagggaaatatggggttggagcttccacacagagtccccactggggtactgccaagcagagctgtgagaaaagggccaccatcctccagaccccagaatggtagatccactgacagcttgcactgtgtgcctggaaaagctgcagacactcaatgcagccagaaggggggctgtaccctgcaaagccacaggggcggggctgcccaagaccctgggaacccacttcttgcatcacctagatgtgacacatggagtcaaaggaggtcattttggagctttaagatttgcctgctgggttttgga

SEQ ID NO: 33775 - DNA, 2300 bp, Homo sapien
cttaatgtataatctattttgtcctaacaattacaaatatattttttatttcagattgtatatattcctaccagatggagataattacagctttaaaaatttttattttttcattttatttcacacattgacattaaatttttatggacacataataactgtacatatatatggggtagaatgtgatgttttaatacatgtactcaatgtgtaatgatcaaatcagggtaatttgcataatgatttttctgtagggagaaaattcaaaatctactcttctggctattttcaaatatataatatgttattgttaactatactcatcctactatgcaataggacaccagaacttattcctgggttctacatccgttaaggcaaccaaggattggaaatattggaaaaaaaaattgcgtctgtactgaacatgtacagacttttttcttgtccttattccttacacaatatagtacaataactatttgcatgacatttacatcggatattatgagtgatctagagttgatatgaagtatatgggaggatgtgcaaaggtgatgtgcaaatactatgtcattttatatcagggacttgagtatcctttgttaccctcaggagatcctgaaaccagtcccccatggatactgagggctgactgtatagtcctatcctcacggaactttcattctaatgggggaagactgactataaacaaaatatatgtaataggtggtggtaagtaccgtggagaagtaacaaacggggcaaagtgagttatacagctccattcttagaaaccttggagtacttttcttagtttatacttgtggtggtttccttttgtctcctttattacatgggactctgacatgtgcccatagctagggtgacagtaggatctacccgatagtagggtggcagtaggatctacccaaaaagcgtcctgctgatacaggaccaaagcatcctgttgttctcgagcctataaaaagagctaatggtcttgcttctcttaactgtggcctcctacactgtgttttggatgattggtgatgtcttggatattctgtttctttggaactttgaatatacaacactttactagggaattagcaatggaagcagagcaaagatgtacagaggaaacaatgcgtaactctgatggaattgaagtcatgaggcagcagagagcttaaattacagctttaaaaatttttattttttagagggaatttacttgggagtaacagcagtaatagttaacggagccagaatgcttgagtcatataattgcaaagcagagttgggagcaacagatgctaaagagtagttgctgtagttcctctttgggtcgtaggagcagttgtcatattcctatatagctactgcatgaagaagagttcttagtgaggcctgggtgaacagctcttcttagtattctgtgtgaccccatttgaccttttaacaaatccctaagtaaataaatagcccctcaggtaaactaagtttttctctgctgtttttttgcttgagagagctataactgtaatagacttatatttctgaacatttcagtgcttgccaatatttggtaatatttatgtttcctatatttgtaatgaacattcttcttccggtacattttttgttaaattattgtttgatggataaaagttcaccctttattgtataaaattgactgagattaatttatacacattgacaatgggtaaatagaatttttcagattattaaaagctgaaggatgcccacgtaagcaaaaaaaaaaaagaaaaaaccaacaaaaataaacccaaacccctcaaacaatttcgaacacgaaacattcttctgatgccggcatccctgcttgcaggtgtgaagggggcaggaatcagcgaggtgtcctgggctgagtccccggagtgggaagaggtggcaggaaggggatctgaggaggagaacaggggtcctggtggtctgtgcttcttcccagacacgggagctgtagaggagacctctgcagcagatgctaggggggccagtaggcccaggcagtcttgggacttgggtctgtcctgctgtgcatccatagtgggtgctttagaaacgggaggcccacccgaagtccctgttgcaagtgaggacaaagtgtgggaaggccgtgagggtctgcagtccgggatggccttgtcctcaacgtgcagtgcactgttgatgcgctggaatgccgtctctttttccaggtgcaggtcttcagccgtgacccggtaccccagctctaagggaggtggcagcat

SEQ ID NO: 33776 - DNA, 2300 bp, Homo sapien
tgtgtgtgtgtgtgtatgctaactgaactcattatagattttattggatcagatatatgaagagacttggaagacttgggtttgtctggaactgggtgaaatagagaaggacgatcattgacatagaaagctgattactttgtcctttgagtataaatagtcttacaataaaatggcatctccactgtctaaaacacatttttacatttgctctccttctgaaattatttatgtgaaattaacaaatgtacttattaccttagaaacaaacgatccgtaatttatattatttattgtatatttgtagatccacttaaaattgatttgcaatataaggaaaaaatgcgttttataagttgtttgctttgtgtagtgcatcttgttaaccgtaggactactgttgcattgaaacaaaatagaattaatctgttcaggtaaatagaactggaagtgagatttgttgtcactccttctccttcaagtactgaccagtcttttaattcacacataactaacactctgtgcaataatatttttttgttctctgtcttttcaaacagaactcaagctccatgaggagatgtttcattgtcggtgagcacattcttgtcaattagttccttcttgtttcttactatagcccctgtgtctagaacctttccaggtattcagtagccatttaaaaattatttgttgaatgaattgttattttaaagaacatccacaattttgcctgactgggcatgggaatacatgcccatctttggactgaatgtccatttttcccttctttgatttatcaaaatattggttaaatgatcaggactaccgtcagaaggaattttatatctaaaaatagtttaccttctatggatgtaaaaaatagttgtagtagttctggcttttatattattcgatgtttcaaagcggttttttttttccatcaccatattctacgttcttgaaaagtactcgttcatgtgactgctatcatttatgcttgtgcagcacgtagatacaggagagaagataaggaaaatgcttaccctgtgtctccttccctgtaacacagttttttttaccatattgattctccactttctactccctaagtaaaattttgcaacaggcatttgggaaactctggatacaagaaaaaaattttaatattgtacaaagagacaagaggtgacttcttttttatttttcatttagagtttatagtttaattaaagaaaatgcacatatatctaaagataatcatggataatacactcatgtaattactactttcagtggttgtaacaacagccaaagcacaaacagaaatgagaaagaattatcagcattatgcaagtacatatcctctttaagaattcctgttatagtgaaagcattaaaataattgaacacgtacagagaccatatactttgtgatctttttaaaaaagtattcaaaatatatttctgtgtgcaaaacattttcataatggtcttgtttaaatgaaagtatttagaatagcacattgtaaaattatgctgcagagcacaagtatttttctctttagaagacacataataaaatagaatcatcagtgttttttcataaacatgaatctttagagtgttacttgatcctgcataataagggtacttttttgcttaatgtaagcatagtatactaattcttttaaacttcagaaagcatatttacagtctaggcagatgggacatgaaggtcacacagcatgagcggtgaaatatctcatttacctagagttctagagagaattttaggaactcttatttattatcagtgcataaacaagagtaaactctacaaaactgtttgcaaaactctcctctttctactcagaaggctttccctagaataatcattatggagtctgtccatcctttactcattcactgcatggggacaggtgttagttatgagattggtgaatttagaaagctaaccaatttcatacctattttgggattctcaattcacaaacttttgtgcgtttcttaattatttcctttctttttcttgtagagagcagtcatgatggcctgcactccacacaatgcaacagagtgaaagagcaggttctgcttctttggtgtagtcctgaagcttcctaagaaacttcacatcaggtgatggataggagcaaccctgtaaaaccagccttagactatttttcaaacagtaagtaataaaggtgacgttttgatctttatctgcttaattacttctgctatgattctattgattctaacattgaaggagcagt

SEQ ID NO: 33777 - DNA, 2300 bp, Homo sapien
atgaagtaatgcaatacgtatttatgttctaagtgttaatttccttggatataaaataatatcttgttcctttgattctcttacatataagtgtatttactcagatattactccaaatacaccagatatattcaaagttgaaaaaatatatactttggaatgtattatcatcttatgtcacatgaagaaatcaaaatctctggcatccaagtgcattccagcctgaaaaaaattatgcaattgtgaatttaacagaaagcaaattgctcacatatggagtcaacgtgaagctatatcaatatttattaaaagtttatatattacttttgatcccctggagagaaatacaaaattcaaataattattctatttttatatcccaatttgtaattatgaaactctagcattttaatttttctctttcaagtttacctgaagcttcacaaaattctgtgaggaatctattataacaggtattttgcttatttccacacaaacagaaggaaatgtgtattttctatgccctgaagaatttactcttttctgtaaatgacatatggtagttaattctttttggtaataaaatattcctgtttttaggccgaacagccttttcatttaaattcagggcaacatatcaaagctttgccgtaataatacagagtaatcgactaaagtaatatagaatttaaataacaaagagtttaaacaatttaatatgtcttctattaatttcaaactgaaattttacagaaattatttggaatatgctgccagagtacacacacacacacacacacacacacacatcacacgctcacatcacacactcacacccagctaaaggaaattaccacagctataatgatttcattaaatatctgaaattaaagtttcttttggattttcagctgaagctcatagtaaataaaagtaatatgatcattgttgcatactgtgaatcaacagcacccagaaaccttcgactttctatatttacacagcttaattatccgaactgaaacctgaggccatctgtgtcaacatgatttcacaattcattccagaaaattatttttcaggaaagtaaggctgcaaaccaataaataacttattgtttgcttcaggaaatttctgcaaatcaatttatgtcagtaagcaactctcctctgggccaacagattgctcacctgggcaggtagcagcttgtgtcaattaacagtttacttatgaagacttctgtcatggcccttaactcacagtgtcccccaatcctaaactctatgtcctgaacattacctattcttatcagtcattggtcttgaaaggccccgggcaaccatctgagcccagacttcaatactctatcaataccaccttatcatctacttttctaacatgacccctcaaggtggtgaccccacttacagtcgtcttttattgaatttagctttccctaatcaacatgctagtctattggatgcagtgtcagaggcaaaaatcacagaggttctgaaagcatcagcccatggttttctaaacatcatggttcaagacccttaacacgaaacagaaagtttccccgaggcgccgtaaacaacccatttgggcgcttccctgataattatagtgaaatctggcatctaattttttttggtggactctcaaattttatatttatgttttgattcctagaaataaaaaatgtttttataaggaattctttgatcgtttatgttttattcttgatagaaacctactactttataacttcgtttatgttttactcttgatagaaacctactactttataacttcgaacattattgatgttcttcctgtatttctgagaggtgacagcttgctggcatccctcgctggctctcggcgcctcctcggcctcagcccactctggccgcgcttgaggagcccttcagcccgcagctgcaccgtgggagcccctctctgtgctggctgaggcctgagcgggctccctctgctggcggggaggtgtggagggagaggcgcgggccggaacctgggctgcctgcggtgctcgcaggtccagcgcgacttccgggtgggcgcgggctcagcgcgacttccgggtgggcgcgggctcggcgcgccccgcactgttgagcggtcggctggcgccgccggccctgggcagtgagaggcttagcacccgggccagcagctgcggagggtgcactgggtcctccaacagtgatggcccgccggcgccgcgctcgaattttcgctgggcctcagccacctccccgcggggcaagggggca

SEQ ID NO: 33778 - DNA, 2300 bp, Homo sapien
agtaatgcaatacgtatttatgttctaagtgttaatttccttggatataaaataatatcttgttcctttgattctcttacatataagtgtatttactcagatattactccaaatacaccagatatattcaaagttgaaaaaatatatactttggaatgtattatcaccttatttcacatgaagaaatcaaaatctctggcatccaagtgcattccagcctgaaaaaaattatgcaattgtgaatttaacagaaagcaaattgctcacatatggagtcaacgtgaagctatatcaatatttattaaaagtttatatattacttttgatcccctggagagaaatacaaaattcaaataattattctatttttatatcccaatttgtaattatgaaactctagcattttaatttttctctttcaagtttacctgaagcttcacaaaattctgtgaggaatctattataacaggtattttgcttatttccacacaaacagaaggaaatgtgtattttctatgccctgaagaatttactcttttctgtaaatgacatatggtagttaattctttttggtaataaaatattcctgtttttaggccgaacagccttttctttaaattcagggcaacatatcaaagctttgccgtaataatacagagtaatcgactaaagtaatatagaatttaaataacaaagagtttaaacaatttaatatgtcttctattaatttcaaactgaaattttacagaaattatttggaatatgctgccagagtacacacacacacacacacacacacacacacacaatcacacgctcacatcacacactcacacccagctaaaggaaattaccacagctataatgatttcattaaatatctgaaattaaagtttcttttggattttcagctgaagctcatagtaaataaaagtaatatgatcattgttgcatactgtgaatcaacagcacccagaaaccttcgactttctatatttacacagcttaattatccgaactgaaacctgaggccatctgtgtcaacatgatttcacaattcattccagaaaattatttttcaggaaagtaaggctgcaaaccaataaataacttattgtttgcttcaggaaatttctgcaaatcaatttatgtcagtaagcaactctcctctgggccaacagattgctcacctgggcaggtagcagcttgtgtcaattaacagtttacttatgaagacttctgtcatggcccttaactcacagtgtcccccaatcctaaactctatgtcctgaacattacctattcttatcagtcattggtcttgaaaggccccgggcaaccatttgagcccagacttcaatactctatcaataccaccttatcatctacttttctaacatgacccctcaaggtggtgaccccacttacagtcgtcttttattgaatttagctttccctaatcaacatgctagtctattggatgcagtgtcggaggcaaaaatcacagaggttctgaaagcatcagcccatggttttctaaacatcatggttcaagacccttaacacgaaacagaaagtttccccgaggcgccgtaaacaacccatttgggcgcttccctgataattatagtgaaatctggcatctaattttttttggtggactctcaaattttatatttatgttttgattcctagaaataaaaaatgtttttataaggaattctttgatcgtttatgttttattcttgatagaaacctactactttataacttcgtttatgttttactcttgatagaaacctactactttataacttcgaacattattgatgttcttcctgtatttctgagaggtgacagcttgctggcatccctcgctggctctcggcacctcctcggcctcagcccactctggccgcgcttgaggagcccttcagcccgcagctgcaccgtgggagcccctctctgtgctggctgaggcctgagcgggctccctctgctggcggggaggtgtggagggagaggcgcgggccggaacctgggctgcctgcggggctcgccggtccagcgcgacttccgggtgggcgcgggctcggcgcgacttccgggtgggcgcgggctcggcgcgccccgcactcttgagcggtcggctggcgccgccggccctgggcagtgagaggcttagcacccgggccagcagctgcggagggtgcactgggtcctccaacagtgatggcccgccggcgccgcgctcgaattttcgctgggcctcagccacctccccgcggggcaagggggca

SEQ ID NO: 33779 - DNA, 2300 bp, Homo sapien
agaggaaattcaaatttaattggcaggtgtaggaagacaaggagatgacaaaaggaactggaaatgagtaatcagagacagaaaagtaaaagtaagagtagaatgtcatggaaggcaaataattggaatgtttcaagatcagggaaatgggcaataaagagaagaaaaaaatagtgaccagagggtatagtaatgtgtagaaattcatcctgtgttaggtttgattgcttagacgttttatataaaaatctttcccagagagtaataaaacagaagtgaggttagagaaagaacatacgatttagccaaaaggtgggaaaagttaggaaatgaagaataaatatgtttaaagataatgttatggctactcaatgtacaacctcttttctttcattatttttaattgtcatatttaaaaatagtaattaccacttttaaaaattgtcttattatttgttacataagaaaatgcattaattcaagccacatagtatcatttatattatgactgtcgaaacattactagaattactagaactattaacctaatggcctgaaaatttcaactcacttccctagctgtcctgatgatcattagtgaaaggaaagactccattagataatgcttacttatagagaactggttatatctgtctcatttccatacatatatctgtataaattaatttgattaataaaacaaacacaaggcacaaacaacaaaacacaatttataaatgtcattgaaaaatgcatgcctgtacaatttgggtatttgtaattgtaaattgatatacttcattttttatccaggagttacttagattgaaactttacctaatgtatgataaaataatacgtgattaaatttaaaaacatgatgaatttatttaaaattggcttcaataatgtcagaaagtaataaaataaaatgattccttcaaagactgcacctgtttattgcctgagattatctctcttggccacaaatcaatattactttctttcattcatcagtgataaagcttttcaataattctaattttaaaggatgattacagcaagtatatagtcattgattgcttaaaggttgcagctaaaatgaacacaatggtcattttatttttaataaatgagcccttttgaaaagtcaagcatttttcctctcacaaaactttgtgtaataagattatagatttgatcatgtatgagtttgcactgtgtgtgtgtatatatgtgtgtgtgatttcagcgataaagttcactgttccacagctggcaatttcttctgcttaattgaaaattccgttttaaaatatttctttaaagttctaaaatgggtttaaatgggttcatgagctgtaatactattaaaaatatatatatctacatatttgttgattcttctcagtttaagaagtggagcttcatactcctccccttgaaggcaggctaagctgagtgactcccatctaagaaataaaacaccacaggattggaatgttaccttctgagacaaggtcacaaaggctagggttttaattttgagtgaactaatttgctccttactggtgtttctctctctttctctccttcaactctttacgagcccagccaccatgcaaataattccaaactatcttttctagaaagctcacatgaagaaccgaggcatcctatctgatatccagccaaatgattaaacattctagaagcagactatgatgcactgaatttgtgaaatcctaacccccagtgtaatgatagtaggaggtggagcttttggtagatgatagtctgtcttcatgttggggattagtgccttgattattattttttatttttatttttatttatttatttatttattttttgagacagagttttgctctgttacccaggctggagtgcagtggtgccatgtcagctcactgcagcgtctgcctcctgggttcaagtgtttcttctgcctcagcctcctgagtagctgagtagctgagactacaggtacgcaccaccacacctggctaatttttgtatttttagtagagacggggtttcaccatactggccaggctggtctggaactcctgacctcgtgatctgcctgcctcagcctcccaaagtactgggattacagatgtgagccaccgtgcccagccggggattagtgcccttgtaaaagagaccccaaaaagcgtccttgccccttctgccatgtgagctagaggacagtaatctatgaactaaaaaatgggctctgaccagacaccaaatctgcaagcaccttgattttgcac

SEQ ID NO: 33780 - DNA, 2300 bp, Homo sapien
acagaacaatctgctggcttagcctttggccaagttggcagctggacgaggacgctcagagcccagctcttgagagttcaagtatccgacagttccccactgctcccaggagcggttacccgggcactctgtgcccctcattcctgtttgggccaaggccgaggacctgcgagtagggctcagttgcctggagccccttcagcccatcccccagttcactttgcttgtgggatctccccgttgctcctgcccctggactgagtggcaggccatcctacaaacacccgcacactcgacatcagtggtgtcaagacaactctaagaaggttttccgtgatcctgcaagacctgtgttccatcctggtgattctgtcttcaatttcactgcacaggtaccacagtaagccagtgctgtgtgctccgagttccagggcatcccccagctcagccactacactgagcacaaggactctgtggggcccaggagcaggtagtcacccctttggggtccacaacacccggctgtccccagacttgtgtccagggaagatagtgttgagggccctcaaggagagcggggcagggatgcctgagcaggacaaggaccccagagtccaagaaaatcctgatgatcagagaacggtccccgaggtcaccggggatgcacggtctgcattttggcccctgcgggacaatggaggcccctctccctttgtgcccaggcccgggcctctgcagacagacctccacgcccagagctcagaaatcagatataaccacacatcccagacatcctggacgagctcgagcaccaaacgaaatgccatctccagctcctacagctccacgggaggcttgccggggctaaagcagaggagggggccagcctcatcccgctgccagctgaccctcagttactcaaagacagtgagtgaggacaggcctcaggctgtctcttcgggtcacacacggtgtgaaaagggggcagatacagcaccagggcagacaatcgccccaacgggtggctcccccagatcccaggactctaggccccgtagacgcaagattcccctgctgccacgcaggcgaggggagcctttgatgctgccacctcccttagagctggggtaccgggtcacggctgaagacctgcacctggaaaaagagacggcattccagcgcatcaacagtgcactgcacgttgaggacaaggccatcccggactgcagaccctcacggccttcccacactttgtcctcacttgcaacaggggcttcgggtgggcctcccgtttctaaagcacccactatggatgcacagcaggacagacccaagtcccaagactgcctgggcctagtggcccccctagcatctgctgcagaggtccccgctacagctcccgtgtctgggaagaagcacagaccaccaggacccctgttctcctcctcagatccccttcctgccaactcttcccactcccgggactcagcccaggtcacctcgatgattcctgcccccttcacagctgcaagcagggatgccggcatgagaagaacaaggtcggctcctgcagctgccgcagcagcccctcccccctccacattgaaccccacgtcggggtcactactcaatgcagtggatggaggcccctcacatttcttggcctcagccacagctgcagcacgtgcccagaggtcagaagtgagatataaccagagatcccagacctcccggaccagatcctgcctcaaacgaaatgccagctccagctcccacagctctacggaaggcctccaggaagtaaagcggaggagggggccagcctcatcccactgccagctggccctcagttcctcaaacacagtgagtgaggacggacctcaggctgtctcttcgggtcaccactgtgaaaacaaggcaggtacagcaccagggcagacacttgcccccaggggtggctcccccagatcccaggcctctaggccccacatcaacactgcactgcacgttgaggacaaggccatctcggactgcagaccctcacggccttcccacactttgtcctcacttgcaacaggggcttcgggtgggcctcccgtttctaaagcacccactatggatgcacagcaggacagacccaagtcccaagactccctgggcctactggcccccctagcatctgctgcagaggtcccctctacagctcccgtgtctgggaagaagcacagaccaccaggacccctgttctcctcctcagatccccttcctgccacctcttaccactcccgggacacagcaca

SEQ ID NO: 33781 - DNA, 2300 bp, Homo sapien
gttgatgtggggcctagaggcctgggatctgggggagccacccctgggggcaagtgtctgccctggtgctgtacctgccttgttttcacagtggtgacccgaagagacagcctgaggtccgtcctcactcactgtgtttgaggaactgagggccagctggcagtgggatgaggctggccccctcctccgctttacttcctggaggccttccgtagagctgtgggagctggagctggcatttcgtttgaggcaggatctggtccgggaggtctgggatctctggttatatctcacttctgacctctgggcacgtgctgcagctgtggctgaggccaagaaatgtgaggggcctccatccactgcattgagtagtgaccccgacgtggggttcaatgtggaggggggaggggctgctgcggcagctgcaggagccgaccttgttcttctcatgccggcatccctgcttgcagctgtgaagggggcaggaatcatcgaggtgacctgggctgagtcccgggagtgggaagagttggcaggaaggggatctgaggaggagaacaggggtcctggtggtctgtgcttcttcccagacacgggagctgtagcggggacctctgcagcagatgctaggggggccactaggcccaggcagtcttgggacttgggtctgtcctgctgtgcatccatagtgggtgctttagaaacgggaggcccacccgaagcccctgttgcaagtgaggacaaagtgtgggaaggccgtgagggtctgcagtccgggatggccttgtcctcaacgtgcagtgcactgttgatgcgctggaatgccgtctctttttccaggtgcaggtcttcagccgtgacccggtaccccagctctaagggaggtggcagcatcaaaggctcccctcgcctgcgtggcagcaggggaatcttgcgtctacggggcctagagtcctgggatctgggggagccacccgttggggcgattgtctgccctggtgctgtatctgcccccttttcacaccgtgtgtgacccgaagagacagcctgaggcctgtcctcactcactgtctttgagtaactgagggtcagctggcagcgggatgaggctggccccctcctctgctttagccccggcaagcctcccgtggagctgtaggagctggagatggcatttcgtttggtgctcgagctcgtccaggatgtctgggatgtgtggttatatctgatttctgagctctgggcgtggaggtctgtctgcagaggcccgggcctgggcacaaagggagaggggcctccattgtcccgcaggggccaaaatgcagaccgtgcatccccggtgacctcggggaccgttctctgatcatcaggattttcttggactctggggtccttgtcctgctcaggcatccctgccccgctctccttgagggccctcaacactatcttccctggacacaagtctggggacagccgggtgttgtggaccccaaaggggtgactacctgctcctgggccccacagagtccttgtgctcagtgtagtggctgagctgggggatgccctggaactcggagcacacagcactggcttactgtggtacctgtgcagtgaaattgaagacagaatcaccaggatggaacacaggtcttgcaggatcacggaaaaccttcttagagttgtcttgacaccactgatgtcgagtgtgcgggtgtttgtaggatggcctgccactcagtccaggggcaggagcaacggggagatcccacaagcaaagtgaactgggggatgggctgaaggggctccaggcaactgagccctactcgcaggtcctcggccttggcccaaacaggaatgaggggcacagagtgcccgggtaaccgctcctgggagcagtggggaactgtcggatacttgaactctcaagagctgggctctgagcgtcctcgtccagctgccaacttggccaaaggctaagccagcagattgttctgttgccgggcaacgcgacttctaaacctgagggagtgggcatgtgagcacataatggcaccagtgacagagcgaccataatggatgaataagcacagccaggtacccgcgcaaggcacctgctggcaatggcaggaggcggacgtggggggtcgtgcagtaggtactggagggagagacgtgggcacaaaggtcgcgggaggaacaggtgcccacaatggctgcatatttgcccgtggatcactgaagattcctgctctcctgctgaggtggagactgcagtgagctgagatcgcaccattgcactc

SEQ ID NO: 33782 - DNA, 2300 bp, Homo sapien
agactctatctgcagcttgcagcctcaccaagccaagaacagtcaactcacagatatgttagcaaaaataaatgtttttcataccttaagttttatataattattgacctacagttaactgatatacaatatacattaatcttaaaatatcattatcccattaaaaatacttacattaaaaactgagaccactttctttccttttttttttttttttttttaattaagagacagggtgtctcaatgttgcccaagctggagttcagtggctagtggctattcacaagaacgatcatcgcacactacctcaaactcctgggatcaagcaatcctcctgcctcagctttccaagtcgctgggactataagtgtgtaccacagcatgtcagctctctctctccttcttgacctaaagcctagcataaaattagctaagtagaatgtttccaaagatgcctgcatcagtatctcccatcccacataatttctgtttgattttgccattcacccataaaatggtgggatctacctcccctccttgcaaatttgagctggccctctgatcctgtctaagatctgaagccagatattaaggtacttcattaatttccatgtttgtcctctatgcaacctagcaatcaagcaagaagtcaaaacatactgacatagtttggatgggtccccacccaaatctcaccttgcattgtaataattcccacgtgtcaagggtggggccgggtgcagataactgaatcatggggatggttccccccatactgttctcgcggtagtgactaagtctcatgagatctgatggttttataaatgggagctcccctgcacatgctctctcctgcctgccactatgtgagacatgcttttgcacctccttgccttccaccatgattgtgaggcctccccagccatgcagaactgtgagtcaattcaacctctttcctttataaattacccagtctcaggtatgtctttatttgcggtgtgagaacagactaatacaataagttgataccagtagagtggggtgctgctgtaaagatacccgaaaatgtggaagcaactttggaaatgggtaacagggagaggctggaacagtttggaaggctcagaagaggataggaaaatgtgggaaagtttggaacttcctagagacttgttgaatggctttgaccaaaatgttaatagtgatatggacaacaaggtccaggcggaggtggtctcagaggcagatgaggaatttgttgggaaatggagtaaagtcactcttactatgcaaagacactgcaggcattgtgcacctgtattagaaacgggcataagataggcgggaaagagggaaaataagaatttctttctagagttccctacagatctgtggaactttgaacttgagagagatgatttaaggtatctgacagaagaaatttctaagcagcaaagcattcgagaagaagcagagcataaaagttcagaaaatttgtagcctgatgatgcaacagaaaagaaaaatctattttctcaggagactgggttgtagaaatttgcataagtaatgaggagccaaatgttaatcaccaagacaatggggcaaatgtctccagggcatgttagagaccctcacagcagaccctcccatcacaggccaggaggcttagaaggaaaaatggttttgtgggtccagaaccccctgctgtgtgcagcctaggaacttggggccctgcatcccagctgctcctgccatagataaaaggggccaaggtacacctcaggccatggcttcagagggtgcaagttccaagcctttcaggttctaggtggtgttaagcctgcagatgcaccaaagtcaagaattaacgttcatgaacctccgcctacatttcagaagatgtatgaaaatgcctggaaatccaggcaaaagtttgctgtgggggggaggggaggggggggccctcatggataacctctgctagggcagtgtcaaagggaaatatggggttggagctcccacacagagtccccactggggtactgccaagcagagctgtgagaaaagggccaccatcctccagaccccagaatggtagatccactgacagcttgcactgtgtgcctggaaaagctgcagacactcaatgcagccagaaggggggctgtaccctgcaaagccacaggggcggggctgcccaagaccctgggaacccacttcttgcatcacctagatgtgacacatggagtcaaaggaggtcattttggagctttaagatttgcctgctgggttttgga

SEQ ID NO: 33783 - DNA, 2300 bp, Homo sapien
aatcccagctactcaggatgctgaggcaggagaatcgcctgaacccgggaggcagaggttgtagtgagccgagatcataccactgcactctccagcttaggtgacagagcgagactctgtctcaaaaaaaaaaaaaaatatttgaattttgtttaaatcgctaacacatactgggcatttaataacaaaaaaaaaaggacatgagattgtgatccttatgaaggtttgagaggcatttcactagggttcaacatacagcagtctgaaacatactgtaataatttaatccaatggctcatctacagcacctaaaaagattacagcagattctcattattcagtgtagttacggtctagaaagttccatgaacaaataaaaagttaggtttcagcaagctactggtcacacttttgtaagcttaccaacacctacttttgttgtatgtgtgcttatttaatatatattgttggccaggcacagtggctaacgcctgtaatcccagcactttgcgaagccaaggcgggcagatcatttgaggtctggagttcgagaccagcctggccaacgtggtgaaaccccgtctctactaaaactacaaaaaaaaaaaaaaaaaaaaaaattagccaggcatggtggcgcatgcctgtagtcttagctacttgggaggctaaggcaggggaatcgcttgaacccaggaggcagaggttgcagtgagccaagactgcaccactgcactccagcctgagcaacagagtgagactctatctcaaaaaaaataataataataattaattaaatgaagaataaataaataatatacattgttcattcattaacattgaactcacagccaacggcactacagcactcacgcctgaatggagtttatttaatgcatgtattttctctgtaagacacatcacagacttcttggacttgtgaatgctaagcagcacttcagcactatgcttgggggttaatttaaatggcaaaacaaccaacaaacagcacaaaaacaggaaaagcatggcattaaatagaccacaaaaaggatacctgactattgtatgagagctgaaaaagaaggcagaatatcatcctgttcaaactcaaattctttgacactctgcgcaaacacatgactatgaaagtgctgtgagtactgatttgggggttacaaaaaatagtaggtgagttcacaaatacaaaagctgaaaacaaggaggatcgactgtattttcgtagacaatctaatctcagaagatttcagttcagacaaaaatcatgataattactgtattacaaaagggcactagatagggggaaaagagtaaaaatcacaattaaaacaaaggttcaaaattctgcagcaaccatatccagttacactttaatatgtttgtggcagactacattattgttcccaactcatcacccctccctatatctaaaacctttccccaagacaatgcagttcctcctgctagagatcaggtatatttatctatactatcaatgttagccatggacaaggtatgtgctttggctgactgaatgttagtggacatgagagaagcaatggcttaaaatgtacttccagaactggagtttccttgtgattctatcactgtgacaaaaacacattctcaggtagtccactgatccaagggggaacaaacacacagaaaacatacctagactctatctgcagcttgcagcctcaccaagccaagaacagtcaactcacagatatgttagcaaaaataaatgtttttcataccttaagttttatataattattgacctacagttaactgatatacaatatacattaatcttaaaatatcattatcccattaaaaatacttacattaaaaactgagaccactttctttccttttttttttttttttttttaattaagagacagggtgtctcaatgttgcccaagctggagttcagtggctagtggctattcacaagaacgatcatcgcacactacctcaaactcctgggatcaagcaatcctcctgcctcagctttccaagtcgctgggactataagtgtgtaccacagcatgtcagctctctctctccttcttgacctaaagcctagcataaaattagctaagtagaatgtttccaaagatgcctgcatcagtatctcccatcccacataatttctgtttgattttgccattcacccataaaatggtgggatctacctcccctccttgcaaatttgagctggccctctgatcctgtctaagatctgaagccagatattaaggtacttcatt

SEQ ID NO: 33784 - DNA, 2300 bp, Homo sapien
tctccgtcaagtgcagtaaccagttcaagttggaagtgtgtcttttgaatgcagaaaacaaagtcgtggacaaccaggctgggacccagggccagctgaaggtgctgggtgccaacctctggtggccgtacctgatgcacgaacaccccgcctccctgtactcgtgggaggtaatggtggtttgggacttgcgtaagggaggtcttttgcccccatctggtagccctggcttcagcaggagcccaggacaggtgaacgggcaggtgtggtcctctgagctttctgatgtttcccacccttggtgggaggcccagattttttatttatttatttatttatttatttgtttgtttgtttgtttgtttgtttgtttttgtgatggtctcactctgtcacccaggctggaatgcaatggcctgatcacagctcactgcagctttgagctgcaatcctcctaccttggcctcctgagtagctgggactacaggcacatgccaccatgcctggctaattaaaaaaattttttttgtaggccgggcatggtggctcacacctgtaatcccagcacttcgggaggctgacgcgggcagatcactttaggccaggagttggagaccagcctggccaacatggtgaaaccccgtctctactaaaatatgaaaatttgcagggcatgatggtgcacgtctgtaatcccagctactcgggaggctgaggcaggggaattgcttgaacccaggaggcaggggccgcggtgaattgagatcatgccgcagcactctatcctgggtgacagagtgagactgtctcaaaaaaaaaaactcctttttatagagttggggtcttactaggttgcccaggctggtcttgaactcctggactcaggtgatcctcctgccttagcctcccaaggtgtagggattccaggcatgagccacctcgtctggtcaaggagaaggcctgattttgaagggcaggtcccagggtcagccagtgaagggcagagcctctgattgctgcttctctgcaggcccagtggcgacttctggggtgcatgcacgaggggtcttcctgctgtagggcaggccagatggggctcaggctgtcggggcgctcacacctggcgctttggctgtcgtaggtgcggctgactgcacagaagtcactggggcctttgacttctacacactccctgtggggctccgcactgtgcccgtcaccgagagccagtgggtgagagccagtttcatttgcggtagaggcagcagaggttgtagaaatgctccttgaggcagatgccacaccccaatttcatggagtgatttgggctgagccgagtctgcagcaggcagaaggctctgagatgttgtcctagcctgggcaaaggacaattcagagctcgggggaataggggtgtgctcagcacgactgggtggacaggccgtttgttgtgaatcgtacaggcttccaggagcgggtgcctgaggcttccagacaggctttgggaggtggccagaggagatgcctgtttccggggcaggaaatggagggagggcccaggctggagaggttcagccaggctgtcacaaggctttgaagcttcccatctgagagcctggctattggagagtgtgggtttggaacttgaggctaggaggttctattctgtcctgtgccagccacagccttcggatgggcagagcaatgatggggggaagatgtaaaagaaaagaactgaggaaagaagaagaaaaccagcttcaacaacggtctaggccggatgcggtgggtcacgcctgtaatcccagcagtttgggaggctgaggtgggtggatcacccgaggtcaggagttcgagaccagcctggtcaacaggtagtgaatcctgtctctactaaaaatacaaaaattagctgggcatggtggtggacgtctgtaatgccagctaccaggtaggctgaggcaggagaatcgcctcaggtgaaccaggaggcagagattgcaatgagctgagataatgccactgcattccagcctgggctacagaatgagactctgtatctcaacaaaacaaaacaaaacaaaaacacaacagtctgttctgtggaggccttgggcagatgctgggagctctgagcacggactggtccctctgttgggagcctcttcccttcatccctcctggttaacttgactcagcataaaggccatttcttctaagagcctgtccctgactctccaatcggggatgtgtctgttgtctcatagagtgcccaattcctgccaccacttgtcatttcc

SEQ ID NO: 33785 - DNA, 2300 bp, Homo sapien
gatccacctgccttggcctcccaaagtgctggaattacaggcatgagccaccatacccagccccagttctgaattcttaagaaactcgagagggtctaggtgagcattgatagaacctctgcagtgctgggtgtgctggctcacacctggaatgctagccctttgggagaccgaggtcagaggatctcttgagcccaggagtttgagaccagtctgcacaacatggaccccatctctacaaaatatttaagatgagttgtggctgggtgcagtggctgacgcctgtaatcccagcactttgggaggctgaggtgggtggatcacgaggccaagagttcaagtccagcctgaccaagatggtgaaaccccgtctctactaagaaaacacagaaattagctgggtgtggtggcatgcacctgtaatcccagctactcaggaggctaaagcaggagaatcgcttgaactggggaggtggaggttgcagtgagccgagattgtgccactgcactccagcctgggcgacagagcaagagtccgtctcaaaaaaaaaaaaaaaaaaaaatagttgggtatggtcgtgcttgcctctagtcccagctacttgggaggctgaggtaggaggactgtttgagcccagtaggtcaaggctgcagtccgccataattgcaccactgtactcccacctgggtgacagagtgagaccttgtttcaaaaaagaacctttgcaatgatggaaatgccccatgtctgcactgtctgaaatggtagccactagctacatgtggctattgaggtcttgatatatgactaggataactgaatttatctggtttaattaaaaaaaatttttttttgagacagccttactctgttgcccaggctggagtgcagtggcgtaatcacagctcactgctcaacctcctgggctcaagtgatccttcctcctcggccccccaagtagctggagccacagtcatgcgccactatacctagcgaatatttagcctttttatagagactgggttttactgtgttgcctaggctgatcttgaactcctgagctcaagtgatcctcctgcctcgacctcccaaagtgctgggattacagacctgagctaccatgcccagcctggtttagtttaatttcattttacattcattcattcattcatgagatagggtcttgttctgtcacccaggctggagtgtagtggtgcaaaccacagctttgacctccgggactgaagcagtcctcccacctcagcctcccaagtagctgggaccacaggtgtgtgcctccatgcttggctaacttttgtactttttgtaggctagtcttgaactcctaggctcaagcagtcctcccacctcggtctcccaaagtgcttggatgacagacatgagccagcgcgcctgacctaaagacatatttttccttctagtgtagttcagccttaagactgtatcagcagacagagacggaaaagtaagaaaaattgagtatcaggttatatttataaataaagcagttgctaattgatggtttttttttaaacctcctttttaattctgggttacatcattccctggctgtcgtttctttttttgtatttttttttattattattatactttaagttttagcgtacatgtgcacattgtgcaggttagttacatacgtatacatgtgccatgctggtgtgctgcacccactaactcgtcatctagcattaggtatatctcccaatgctatccctcccccctccccccaccccacaacagtccccagagtgtgatgttccccttcctgtgtctatgtgatctcatcgttcaattcccacctatgagtgagaatatgcggtgtttgtttttttgttcttgcgatagtttactgagaatgatgatttccaatttctccctggctgtctttaccctagcatcagtgagtcctgcagtccctacagcccccagtgaggacagatattttggtcaccatcaagtggatctttatttttatctaacatttacaattctgccagttcttactcttaattctctttgccttgaatcccaggatccacctctgatgttcagtgaagaggaccggaaaagtctgctagagcagtaccatctgggtctggatcaaaaacgcagaaaatacgtggttggagagctcatctggaattttgccgatttcatgactaaccagtgtaagtggcagtttagcgcatgggataatgtacccgtcctcattttttcaggttgccttgcccattctggacattttggctgtaagaat

SEQ ID NO: 33786 - DNA, 2300 bp, Homo sapien
tgtcttcaagcttctgagaaaactctgcttttagggcatagatagaagtggatgataattcacctgttcctctgctactaattgagctgctctctgtttccatggctggctcatgggatgagagaatatatctagttttttatgtttcaatttgtctctctatggcatttttgtgaaaataaggaagtgtggagacttatatatgtttctaaattgtaatagttcattaatgtaaagtacagacagtcttcacttttccttcttagaccgtttaaatatggccacgaaacaagtagtctctggttggctgggcactgtggctcatgtccttaacaccaacactttgggaggccgaggcaggcaaatcacttgaggtcaggagttcgagaccagcctggccaatgtggcaaaaccccatctcttctaaaaatacaaaaattagctgagtgcggtggtgcacaccggtaatcccagttactcgagaagctgaggcaggagaatcacttgaacatggaaggcagaggttgcagtgagccaagaccgcaccactacactccagcctgggcaatagagcaagactccatctcaaaaaaaaaagaaaaaagaaaatagtctctggttaaataacctctgaaagactccaccaaaaatttcatcttagcatttctccccaaacttcatgtaaaataaaatagagttgagagaaaaatagaaaggcaagggagtacctgttcactatttttattaaaccagtgttctactttattttaggtgtatcttttcttatttaaatgtcagctaaactttctttttaagatattgaatgaaagatgcccatccttcaggtttcgtttaagcaagaatccccattctcaaataatataatataaactttccaaattcttaagtagatcatctgagattgaaagctaagtttaactttctcaaagatattttagccgccatgacacctagacaaagtggtatattaaattctgattaatttggtcctaaagcacctaagaatcattcttactttcttatccacaggggttattaagttttcacattaaaaaaaatccaacagtgaataatactgcattggggttactgtaattgttaagtaaaataagaaatacaaatctttagttagatcacatggcacctgactactgcttagaaaatggtaagacttactacataaatcatgagtcactattgacatctactatatcatatcataggttaggtatctaattataaatagtcaaatcagctgactcaaggtggcatagctcaagcagaggaagataatacaagttgagtatggatttaacactctaaacctgtcagcactgtaggaaaagtaacttaaaactgcacaccccacttatgcataatcatcagatataaagagggtacattcctgtaatttattgttgctctagtgatcttaaagaattaagtccacattcataaagtccaaacttgtctccaaggatttgctttgactttgggagtatctggatcattaagtaatttccggaggtcagagtaaaagctttttatctctaaatattacttccctggaatattagatgtagcagaagtcagtaacggagtgacctttctcttaaacaattcatagattcactgaaattttcttcaactttaggaaaattaaatatattccacagtgctgtaagtcttaaatattgattttcctctgaaatcttgactcatcctacccaccaacattctccctttgtacactatgttctttgtaatgttcatgttacacaagtgaaaattagtaacattagtaaattttcattgcaggtttatttgttcatatttctggatatataatccattactgttaaacttcatatcaatgttccgatatttcttcatcttatgttttatgttacaaaacaggttatttcactatatgtatgtttaattgattaattcttccctttttttggaaatgaaacagcactctcaattattgggacagaaaagttatttcatagggaatacttcaaacactgatatctacaacaggcagtaagattcgtcacaacaattggtatactgtcaatataccatacaaagttccatctggtcttgattaaaaattattttagttttctcaggaaaatgatacagagggagaattgcctagattatatgagagaaaaaaaagtagagagaaacataatgttttcttagattattacagcagtgaactatttccacctggtaagaagggtgcacttgagaatggggttcaagta

SEQ ID NO: 33787 - DNA, 2300 bp, Homo sapien
ttgctaggtggggattacggagataataattcaagatgagatttgggtggggacacaaagcctaactatatcacattgagtgaatgcatgcatattcttaaatgcaaaaattgtaaatacatatataaatagataaatagatgtttagtggaatgtagatttctctaaatatctatgcaattttcatgaatatgaggtgcaggaacaataacattaagagtatctaatattatctcagctcatactggctgtggtgtagaattcataagaggaaggcagattaagttcccatttcttagctattcttaatataaagcagttttaaaaaccctggttataggatcctatgagacaagccttaaaggtatctgattgatttagatataaatgacatatggttttttttcttattatcaagatgtttttgtaaatctcatctttttaaagtgtctcttaatacacttctctttttaacattggcttctagaaaaaaataatgaagtaagaaaagaaaagggattctacatcttgagtgagaaattgccttataaaaatgaacaaatagaggctggatgcagtggctcacacctgtagtcccagcactttgggaggctgaggcaggcagatcactttaggtcaggagttcaaacccagcctggcccacatggtgaaaacccatctctactaaaaatgcaaaaattagccaagtgtggtggcacgcacctgtaatttcagctacttgggaggctgaagaagaagaattgcttgaacccaggaggcggatgctgcagtgcactgagatcacgccactgcactccatccagcctgggtgacagagcaagactcctccgtctcaaaaagcaacaacaataacaacaaaaacaaatagaataagtgaagagatttgatcttataattggttggaatatcccataacactgcactgtttatgtttgcacaataatgaaagttcattgagtacatgttcactgacatatatggatcctcagaaatatatatcttaaacatatatataagtatatataaatgtatactcatacgcataactcagatgtatgcaaagacttcatatatctagaatgtatattgtgtatattctatataatatgtaatggaggttgatagacataaccttttcttgatggtgtaggttagaaataactggttcatttagggtagggcagatttcacttgcactgatatggacaaatcagtgttaatgacagaatgcaatagagtcatcctgctatgtaaacagaagcatagataacaaataatacaaaatatgataaaagtttacctcattcataacatcatttatctgaccctttcccgcaatttatctggcctatctgccaccatttaattaaaaaaattacagtgattatatcatgactgctttcaaatctcactgtacaactctaaaaacatacacttatttgatagccttgaatttcagcagaaaagataatacttataagaggtatagactttaaaatatatcatatttgtgcagaatattttaagttataaatatgtatgcataaggcctagttgatgtaacattagtatagatgctacaaatgcaagttcattaaagaatattaagatattcttccctgtaaatctaaggaagcaaaacaatgggaaatttctcaaagatctaaagcaggagatgaaatagggacaaactgagtgtttgctcaaccgtaattgtgaagcaatcagtttaattttctcacagttgattttgtttaattaggagatgacattagctaactttgcagttctacatcgttgcaaaaaggacagaggaggttttgacatattgtgcctttactattaaagaaatatcattcagtgagttttttgtacacatttctatttgtgtggtttttttcactgaaaataatgcttttaaatttcagaatacaacagcttaacttatcacataatagagatatacatattgtatatcccttttaaaattagtgctaatgtagcatgagggaaatgtaattcaacaagctcggagccccggccgagcttcggagccccggcccagccccggccgcgcacgcgcagtgacgcgccggccatgccggcggctgttgtcgggcctccagcgggcggggccgttggcggagcagaggggaggcgcagccgggcggagggcccacgagggctcagccttcccggtcagcggtggtgacggtatcccagagtgccagagaaccgttgcttttccgagttgctcttcttccaggctccgttggtgg

SEQ ID NO: 33788 - DNA, 2300 bp, Homo sapien
caccccggctgagtgcagtggcacgaacgtggctcactgcagcctcaacctcctgggctcaagtgatcctcctgcctcagtctcgtctcccaagcagttgggactacaggcgcatgccaccacgtcaggctgatttttatatttttggtagagataggggttttgccatgttgcccaggctggtctccaactcctgagctcaagtgagccaccttccacctctgcccaaagtgctgggattacaggcgtgagccaccatgcctggccattcttgattaatttttatggcatttaattaaataaatttattgttaagaggtttgatttttaactgcaatatgaccagatgtttcctcaaagcaggcggaaaaattatcggagaggaagaaaattaagtctaattgttggagtatattgacacctatcatgtggtatattgtaatatatatatatatgcaatacattgacaccaatcatgacaccaccatgtggtatagttaaggtaactaaaagtagctgaacttataaagagggaaacaggtcaattataggatactaagggaaaatacaggtgaatagcttttttttttttttttttttttttttttttgagactgtgtcttgcttgctctgttgctgaggctggagtacagtggcacaatctcggctgactgcaacctctgcatcccgggttcaagcaattctcctgcctcagcctcccaagtagctgggattacaggcgtgcactaccacacccagctagtttttttgtatttttagtagagacagggtttcaccatgttagccaacctggtctcaaactcctgatctcaaatgatctgcctgcttcggcctcccaaagtgctgggattacagatatgagccaccatgcccatccctggagaataattttaattattattattattattatttttttttttttttgagacggagtttcgctcttgttgcccagactggagtgcagtggcgtgatactggctcaccgcaacctctgcctcccgggttctcccacctcagcctcccgagtagctaggattacaggcatgagccaccacgcccgactaattttgtgtttttagtagagacggggtttctccatgttggtcaggctggtctcgaacttctgacctcaggtgatccgcccacctcggcctcccaaagtgctgggattacaggcatgagccaccacgcccagccttaggagaatgattgtaaaaagtaaattcatgtaatgattttatttagtttggatattgttagggcttgttgctaaagaaagataaaattattaggtgagatagtaccagatttagaatataatttggaaaataccaaactccatggaaccctccctttaaacatcaaaaatcgtattttgcatcattcttaggaggtagtgcgttatcattagcaattttcattaagtcctgctgaaaatgagaagcagcagccattactgcccaagatacactgtggtcagttttatcagttactttttttttttttttaaacagagtctcgctttgtcatccaggctggagtgcaatggtgcgatctccgctcactgcaacctccacttccgtgcctggctaattttttgtagttttagtagggatggggtttcaccatcttggctaggctggtctcgaactcctgatctcaagttatccactcgctggccatcagtcatttatttttgaatgcctcttctattagtagcatgtgtaagaaattgtgatccatttatcaaactagccagtttttgaaaatagggctaaaaggaaacgttgatttctgacattttccaaaaacttaaaaaatttttatataggctgggcacaatagctcacgcctgtaatcccagcattttgggaggccgaggcaggtgggtcatttgagctcaggagtttgagaccagcctgggcaacacagaaaaacctcatctctaccaaaaaaaaaaaaattaggtgggtgtggtggtgcacgcctgtagtcccagctacttgggaggctaaagtgggaggatcacctgaacccagaaggtcaaggctgcagtgagccgagattgcaccactgccctccaccctgggtgataagagtgggaccctgtctcaaaacatacacacacacacacacacacacacacacacacacactctctctctctctctctctctctctctctctctcaaaaacacttggtctgttatttttacgaaattgtcagtcatagttatctgttagaccaaagctgagtaagaacatttattacattg

SEQ ID NO: 33789 - DNA, 2300 bp, Homo sapien
acaggagaatcacttgaacccgggaggcagaggttgcagtgagccactgcactccagtctgggtggcagagcgagactccgtctcaaaaagaaaaaaattaaaaaacaaaaagaaacctggttctatattttgtttaaatttatttttttaaccatcatgtaatatgtccaggtaatttgtttaaattttgacatcaaatgcaattgtgagaatttttatgattcagaaaaatctaagcaagctttataaaaacatacttttttttttacttttttttttttttctgagacacagcctcactctgtcgcccaggctggagggcaggttttcatgtttatctgtgagatgtacctttggcacattactttcctgacatgagatttaaatttttttttttatcttgtgacaatttaacttttttgacacataaaaattgtacatatttatttgtttgagatggagtcgcactctgtcactcaggctggagtgcagtggcgtgatcttggctcactgcaacctccgcctcccgagttcaagtgattctcctggctcagcctcccaagcagctgtcattacaggcctgcaccaccacacccggctgatttttgtatttttaggagaaacagggtttcaccatgttggccaggctggtcttgaagtcctgacctcaagtgatccacccaccttggcctcccaaagtgctgggattataggcatgagccaccgtaccagacccctaaaaattgtatatatttaaggtgtaccatttgatgtttagatatacattgtgaaatgattacattccacatattacctctacagagttaccatttttgtacacttggtcaacatcatcccattctccccttcctccacagatatttcttgtatactatatagaagccaagggtattttgggggaagagctcaaagttcctttcgtggagttaaaaatatatatatactatgtacatataagccatttagcaaccctagatgcttaataaagaatactggaggcccggtgtggtggctcacacctgtaatcccagcactttgggaggccgaggcggtcggattacgaggtcaggagttcaagaccagcctggccaacatggtgaaaccccatctttactaaaaatacaaaaattagccgggtgtggtggtgggcgcctgtaatcccagctactcggggggctgaggcagaattgcttgaacctgggaggcagaggttgcagtgagctgagatcacgccactgcattccagcctgggtgacagagcaatactctgtcgcaaaaaaaaaaaagaatactggaggctgggcgaggtggctcacacctgtaatcccagcattttgggatgccagaggcgggcggaatatcttgagctcaggagttcgagaccagcctacacaatatgctccaaacgccgcctctacaaaacatacagaaactagccgggtgtggtggcgtgcccctgtggtcctagctacttgggaggttgaggcgggaggatcgcttgagctcgggaggtcgaggctgcaatgagccgagatggtgccactgcactctgacgacagagcgagactccgtctcaaaacaaacaacaaataaggttgggggatcaaatatcttctagtgtttaaggatctgccttccttcctgcccccatgtttgtctttccttgtttgtctttatatagatcaagcaggttttaaattcctagtaggagcttacatttacttttccaagggggagggggaataaatatctacacacacacacacacacacacacacacacacacactggagttcgagacgaggcctaagcaacatgccgaaaccccgtctctactaaatacaaaaaatagctgagcttggtggcgcacgcctatagtcctagctactggggaggctgaggtgggaggatcgcttgagcccaagaagtcgaggctgcagtgagccgagatcgcgccgctgcactccagcctgagcgacagggcgaggctctgtctcaaaacaaacaaacaaaaaaaaaaggaaaggaaatataacacagtgaaatgaaaggattgagagaaatgaaaaatatacacgccacaaatgtgggagggcgataaccactcgtagaaagcgtgagaagttactacaagcggtcctcccggccaccgtactgttccgctcccagaagccccgggcggcggaagtcgtcactcttaagaagggacggggccccacgctgcgcacccgcgggtttgctatggcgatgagcagcggcggcagtggtggcggcgtcc

SEQ ID NO: 33790 - DNA, 2300 bp, Homo sapien
cccagcactttgggatgcagaggtgggtggggtgggtggatcacttgacatcaggagtttgagaccagcctgccaatgtggcaaaaccccgtctctattaaaaatacaaaacttagccgggcatggtggtgcacacctgtagtcccagatacttgggaggctgaggcaggagaattgctggaacccgggaggcagaggttgcaatgagccaagatcactgcactccagcctgagtgacagagtgagactccatctcaaaaaaaaaggaagcaaacagtagaaaatgaagggtggtcctgaagaaataaagaaatcacaaaatcaaggccagtgatatcaatagaagagtgcagtcttaaagcaagatacatagacagatggcagctcaaactcctcatatctcaactgttattgccagaccaggaaacaagtaatttcaaaacgaacagaaaacaaagcgacagaagaaaaggtaatactgattacaaggtacccaaggacaaatacatctgactgaaaatctaaggagcaccaaagcaaagccatgaaaaagaaccaaaggaacaaaaataaataagaagcaaaatggttgatacattggcaaacagtatttatttaacgtatgtataaatggggtccctgaagaataaaaacaaaacaaaacaaacaatcttcctggtggtctagtgattaggaatttaaaaaaaagaaaaattcctagggatgggaggaagaaccccctcccatcctcagagagcctctaagcaaaaagactaagttacaaaataaagaaaatcagttatcattagactttctcatagaaatttatggggaaaaagtatgagccaagaattttatatgcagcctagctgtccttgaagtagcaagactaagaaaagtctaaaatgtagaagaataccgtactcactagcctttccagggtaatctattgaaaatacgcttcatccaaccaagatatgaccagggaaacttgggttttaaaaataacagaactggccaggcatggtggttcacgcctgtaatcccaacactttgggaggccgaggtgggtggatcacctgaggtcaggagttcaagaccagcctgatcaacatggtgaaaccccgtctctactaaaaatacaaaattagccgggcgtggtggcgcatgcctgtaatcccagctactcgggaggctgaggcagaagaattgcttgaacctgggaggtggaggttgtggtgagccaagatcgcgccactgcactccagcctgggcaacaagagcgaaactcttgtctcaaaaaaaaaaaacgaaaaacataaaacagaattgttagcatcaaatatatttaattgtggatctaagaggaaagtagtgtattaaattgaaaagctgattctaaaatttatatggaactactaaggacaaaaataaaccaaagctggacaatttacattatctaactttaagactgtaaaccagaagtagctaagacaggtttcaatcaatttagaaagtttattttgccaaagttaaagacgctcctatgacacagccacaggaggtcctgatgacatgtccccaaggtggtggggtacagctttgttttatacattttagggagacatgaggcatcaatcaatatatgtaagatgtacatgagttctgtcaggaaaggcaggacaactcaaagtgggggtagggaggtttctaggtcataggaagatttaaagattttctaattggcaactagttgaaagagttattatcaacagaaaggaatgtttgggttaccataaggggttgtggagaccaaggttttatcatgcagatgaagctcccaggtagcaggcttcagagagggtaggttgtaaatgtttcttttcagactttaagagtctgttctatcagtaattccaaaaggtagtagggtgtgatgagacatgtccaactcccccttcccatcatggcttgaactagtttttcaggttaattttggaatgcccttggctgagaggatgggtccattcagttggttgtgcaggggcggggggggcctataattttatttttggtttacaagacataccctgaagcaatagtaattaaaagtgtagtactgacatcaatatacactaatagacaatgtaacagaattgagagtcagaaatagccctgtgatatatgtgactgattttaactaaagttacaaatgtggtttaatagagaaagcatagtagtttcaagaaatggtggtaaaactattggaaatccttatgcaaaaacaaaccaaatttcca

SEQ ID NO: 33791 - DNA, 2300 bp, Homo sapien
aacataggagttaatcttcatgaccttggatttggcaatggattcttagataggacaccaaaaggaccagcaataaaagaaaaaaacagataaattggacttcgtcaaaatttaaaactttcgtgcacaaaggacattataaataaagtaaaatgacaacctatggaatgggaaaaatattttcaaactgtgtatctgataacaggttgaaatccagaatatacaaataactcttacaatgcaacaaaaacaacaacaatttttaaatgagcaaacatattttttcaaaaagtgaaaagatacttaacatcattttcatgatttgcattagagaaatgcaaatcaaaaccacaatgagataccacttcacaactactagaacggctttatgataatcacaaaacaaaatgggctgggtgaggtggctcatacctgtaatcccagcactttggaaggccaaggtgggtggatcatttgagcccaggagttcaagaccagactaggggccaggcacggtggctcatgcctgtaatcccagcactttgggaggccgaggtgggtggatcacctgaggtcaggagttcaagaccagcctggccaacatggtgaaaccccatctctactaaaaatacaaaaattagctgggtgtggtggcgggagcttgtaatcccagctacttgggaggctgaggcaagagaatggcgtgaacccaggaggcagagcttgcagtgagccgagattgcgccactgcactccagcctgggggacagagcgaggctccatctcaaaaaaaaaaaagaaagaaaaagaaaaaagaccagactaggcaacatagcaagaatctgtctctacaaaaaataaaaaattatccaggcacggtggtgcatgctggtagtctcagctactcaggaggctgaggcaggaggatcacctgagctcaagaggttgaggctgcagtgagccatgattgcaccacagcactccagcttgggcaatagagcaagacactgtctgaaaaacaacaatgaaaacaaaaacaggtcgggcactgtggctcatgcctgtaatcctagcacttcgggaggccaaggtggctggactgcctgagctcaggagttcgagaccggcttgggcaacatggcgaaaccccatctctactaaaaatacaaaagttagccaggtatggtggtgcacacctgtagtcccagctactcaggaggctgagacaggagaattgcttgaacccgagaggtggaggttgcagtgagccaagatctcgccactgcactccagcctgggtgacagaattagactctgtctccacaaaaacaaaaattaacaagtgctgaagaggatgtggagtaattggaacctttgtacatggatagtgggaatgtaagatggtgcagctactgtgcaagttcctcaaaaagttaaacatagaactaccatatgaatcagcaattctgcttctaggtatatacccaaaatgattaaaagcaagaacttaaaccgatacttataatgccagtgttcattgcagcattatttatgatagccagaaggtagaaacaacccaagtgtctctcagcagcagaatggataaacaaaatgtactatatacataccatggaatattagctataaaaaggatgaagttccttttcaaagttgatacataataattgtacatatttatggagtacatgtgaaggaatgaaattccaatataggctacaacatgatgtaccttgaacagtatgcaaagtgaaataagccagacaagtgataatgcttataaacaatatctagaagaggcaaattcatagagacagaaaatagaagagaagttatcaggggctggtgggagggaagatttttttttttttttttttttttgagacggagtctcactcggtagcccaagctggagtgcagtggcatgatctgggctcactgcaacctctgcctcccaggcttaagtgattctcatgcctcagcctcccgaatagctgggactacaggcgcatgccaccacgcccagctaattttttgtattttagtagagatgtggtttcaccatgttgcccagggtggtctcaaactcctgagctctggcgatccaccctcttcggcctcccaaagtgctgggattacaggcgtgagcccccgcgcccggcccaatttattgtttaattgggatgatgaaaaggttctggagatggatagtggtgatggttgtacaacatagtgaatgcttaatgccactgagttgtacacttaaaatgattaaaatgtaa

SEQ ID NO: 33792 - DNA, 2300 bp, Homo sapien
gagttcctatatattgccatacccaatttaccctaatgctaacatcttacactagcatatttgtcaaaatcatcagtgtaccaattcatatactgtacattactatttactaaaatccagagtttatttggatttcaccagtttttccactatgttgttttttgttccagaattcataaatagagggttttttttttcctatttttgattctttaagttcatttttgttggttgcatggaggagtgtcatatacgcactcattccaccaaattcccttgatatcctttaccattactttataaaccatttacatttctcttgcagagagccacaacctaagtgccttacctgatgacactgacagagagaatcactggaaatgatagttttatacttaattcttgtcactaaaactctaatagtgtttttaaaaacctaatacaaggccaggcctggcggctcacacctatcatcccagcactttgggatgcctagggaggagaattgctcaaggccagaagtttgaaaccagaacagcctgggcaacatagtgagaccctgtctctgaaaaaacaaaacaaacaacaacagcaacaacaacaacaaaaatacctaacacaaatacttaaatgcatacaactatttttataacttttaacttttacacttagttgtccatttctccaaaatatgaagtcctctgcggaagtgactccagaccttcagagccgtggtgaactttgtgaattactggtaatgaacaccgtcatcttgtctgttttaccagcacatgatcatataattgaaaactgttttgaacaggaatgtctcatcataaataagttaataaattctacaaacatctactaaacatctgttatgttctaggtacagattggggaaatcacaataaaccagtcgggcacaatacctagcttcatgaaatgtatagtcaatctcttctacttcaaggcccagactctcttagactttgttgattagcatccaggctaaatggatcctctctggatcttcatgtggagggcaataaggctggatttgctacttggcctttttaggggttgagaagatgttactttaacaaaagcaagtgcccaacaaaatcataaacccaggtaataggctgaccactttaagctgagaaatcctacctagttctctgggatctaagccactactaatttaatgcacacatataccaccttattttgaggctgtgtgttaggtatgttatgtttgtcatccccccacccccaacacacacaaaaaccaacttgctattcacgtgattcattttctatatgaattgaaaaatggcactaaagaaaaaagtttggggatatagaaatagcttattttttaaggaagaaacataacctttctaagtactggatgtgtaatattaaaaatgtagttaaccaaggacagaggctgcacctaatgacttttggaggaaccttcttgctcaagacactatgattctcgttacctggatagtatcacccatggattgtatcatatatgaaccactgaggaacacacattcctgcagatgtttgcagattattaattgctttatatttgaagcacccctcccttcaatcagcataaatatttgagggtgggctgtgtttagaagatgtttagtctccaatgattacaacatgatgcaccactctcctatacaaattttgatttaagaaaagattttatttttcaaaggaaaccacaagtgaaagcaatcttgaagattcaatagcagttggtcctatagtgccaggtaagaactttgaagtagcacgtgggattatatgtatttgtaaatatatttgtatacagggcagttgcaaaaaaaagagtatttataattgtccaaagagcttccaaagaggagcagcattgcaacagtgtcgtgtatgagcaaaagtcaagattcttgtggcttctccagagtgcaggcaggaccaaactgatagtaggcaacgtgtctcaggtacaagcaaaccagtccttagaagcaccaatcagtaaacttctttcctgagatttttatttttattcattttattttattttattttatttgagacagggtcttactttgtcacccaggctggaatgcaatggcaagatcatggctcactgcagcgtcgacctcccaggctcaagtgatcctcccatctcagcctccccagtagctgggaccacaagcatgtgccaccacacctggctaatttttgtattttttgtagagacagggttttgccatgttggccag

SEQ ID NO: 33793 - DNA, 2300 bp, Homo sapien
tctactgtgtcttcctcttgtcagccttccgcaagacccctctgaccagtgtgctccccctcttcctttccaatcctccaccactccacacaaatcctaatcatctctgactgttttcagatcttgcaagctctaggatctcatatttctgggaggctttcctctgccccagctttcccagagtggaaggaagatgagaaatgctctgtttctagtttgatccttttgcagagctaaataccaatttctttccaaagaaatataatttcacaaagagacttaatcctatttctggtgtaataaacatggcaataatgtggtaagaggcaattaattcttcatgcattcacttacataagggctgctagatttgctggtatttttttttccgtgagctctaaatatattctttctgattcattcattaaacgaatactaattgagtgccacatgagtgtcaagcacttttctaggttcatgtcattcattagtgagcaaaaacctctaccctcatagagcttatttttatttttattttttgagacagagtttcactcttgttgcccaggctggagtgcaatggcgttatcttggttcactgcaacctccgtctcctgggttcaagcgattcttgtgcctcagcctcctgagtagctggcattacaggcatgtgccaccatgcccagctaatttttgtatttttagtagagacagggtttcaccgtgttggccaggctggtctcagactcctgacctcaggagatccgctggccttggcctcccaaagtgctgggattacaggcatgagccactgcgcccagccccctcatggagcttcaattccagattctggttgccaatctgtttgttgatcaaaggagaatggggcagagggatggtgtgcatcaaagtgcatggtgtgtaggagcattcaatgactacttgccagttaccccattggtggacagagtcttatatagaaaattgcctcactggtaaccaacttctgactgtcacaaaacccaactggagactgaataggctttcactattacaggtctggtggttattatctgcatgttaatggacagatgcccatgccagtggcactgatcaagtttccttacttttaggtataaaggacatcgtccagtgcttttcctgtggagggtgtttagagaaatggcaggaaggtgatgacccattagacgatcacaccagatgttttcccaagtgagtggaatgaatgttaaccatctgcaactttggatgcacttcaacagtttttttctttttcctcatttcctgccttattttatctttagattgagtctttatccactcctcggattcaggctatgaaggatgagtcttcatgtctttcatccctttgctccatgacccccttcctgtactagccttcccctctttatagttatggcatagttttggctagattcatatattcacattacatgtttacattatcatgactatacaaatgctatgtggagctgaagcttgtggtaaatttttatttatttttcccttcctgtatatccttttatttttttaggaagtaataactgtcctgttggtatgttagcttatttttttttcctgaggtaaaattcaggtagtaaccattttatttatttatttattattttttgtgacaggttctctctcttgcccaggttggagtgcagtggtgcaatcatggctcactgcagccttgacctctctggctcaagcaatcttcctcgctcagcctcccaagtagctgggactacaggcacatgtcttcacacccagctaatttttttttctttttttaagagacagggtctctctatgttgcccaggctgctctcagacttctaggctcaagcagtcttcccatcctggcttcccaaagtgctgggattataggcgtgagccaccatgcacagcaattaaaccattttagagtacacaattctgtggcatttattatagtacattcacaatgttgtgcaaccaccccctctatctagttccaaaacactttcatcgcccccaaagaaaactctgtatccatcaagcaggcccccctcctctctccaccccactccatgcccagcccctgggatacaccaacctaattggtgtctatggatttatttgttctgactatttcctctaaatggaagcataccgtttgaccttttgcatttggattctttcacttggcatattgttttgaagtttatccatgttgtagcttgcataagtacttccttccttttgagaccaagtaa

SEQ ID NO: 33794 - DNA, 2300 bp, Homo sapien
gtagagtgacaactatattctgcttctctgtgttgctctatggtatttgtgacaactacttgatctctcagttaaagatctgcattaacctccactgtaacttatgcatgtgttcggtttgagcaagaccagcaaggtacctaggaacctttccctgatcatcttgtatttcaggcagagatttagctgacaggaaccagcccatcatttatagattgcagaggtgcttcctaatgaccagcagctaaagagaaaatgccacaatctggtggaaggctctacgtgtttaggaatcatgaaaattaatttcctgattttctcctgcaggcagaatgtggcaaagattgctatccatgttcctattatctcaaatccttccatactaatagaaatcccaatatttagctgggcacattgtcacccaggaaaaagattaggtttcccagctcctcttacagctaggtatggtcatctgactaataataataataataataataataataataataattattattattattattattattatttttgagacagagtttcactcttgttgcccaggctggagtgcaatagcatgatcttgactccccgcaacctccacgtcccaggttcaagcgattctcctgcctcagcctcccaagtagctgggattacaggcacccgccaccatgcctggctaattctttgtatttttagtagagacagagtttcaccatattggccaggctggtctcaaactcctgacctcaggtgatccacccacctcggcctcccaaagtgctgggattacaggcgtgagccaccatgcccggcccatccaactaagttctgattaaagaaatataagcagaagtgtcctgtgacagtttctaggagcactttgtcaggggacaagaggtgaggagagtaatgtgtagaaagaaaagacatgataattatcacaaatagaatacttgtattcattgttagtccagaccttaaggtttcaaatttgaaggtttaccacctaagggaggaatagaaaactgggagaggatttatgatgcaggaaagaaaagagatgtatgccaggtgcagtggctcacacctgtaatcccagcattttgggaggccaaggcaggaggattacttgagcccaggaggttgaggctgcagtgagccatgatctcgccactgccctccagcctggatgaccatgtctcaaaaaaaatagaaagaaaagaaaacgaatctataagaaatgctgaagagaggcctggcgcgatggctcacacctgtaatcccagcatttgggaggccaaggcgggcagatcacgagatcaggagatcaagagcattctgactagcatggtgaaaccctgtctctactaaaaatacaaaaaagtagctgggcgtggtggcaggcgcctgtggttccagctactccagaggctgaggaaggagaatctcttgaacccgggaggtggaggttgcagtgagccaagatctgcattccagcctgggcaactctgtctccaagggggaaaaaaaaagaaaagaaaaagaaacgctgaagctagtggacattgctgagtgtagctaaacgtaagcccaggagcataaagtctatgtgggaattaaaggtcaagcaagcaagtgggcacaacctactgactcacctgtgtagaaaagacctgctttggccagtgctgcaactcccacagctgattcccggggccagtccttaaaagagtccagccgtagttcttcgtaagcaaagatgctgtcattgcaataagcttgaataaaaagcacaaggtgagaccagcaggctttagtcttttttttttctatatctttattgctgctgcacaaattaaagagaccagtaggctttgatattgcaagtatcagcgttcaagttgtcccttcacagttacagatggaatgatgtctagagtttgcttcaaaataaacggggcggggcgggggggacgacaaaaagagatagggacaaaaaatcaaaagaagaaataaacaagcaaagcctttggaaaatgtttgagtttttacctgatgccataggtaattctctctggacccaggaattcacaaaatgttctccctgagggaaattaaaattcaagttgttgattatctgactttttttttttttttttttttgaggcagagtctcactctgttgcccaggctgaagtgcagtggcaggttctcgtctcactgcaacctccgcctcctgggttcaagtgattctcctgcctcagcctcccgagtagtacaggcatgtg

SEQ ID NO: 33795 - DNA, 2300 bp, Homo sapien
agcttctgagaaaactctgcttttagggcatagatagaagtggatgataattcacctgttcctctgctactaattgagctgctctctgtttccatggctggctcatgggatgagagaatatatctagttttttatgtttcaatttgtctctctatggcatttttgtgaaaataaggaagtgtggagacttatatatgtttctaaattgtaatagttcattaatgtaaagtacagacacagtcttcacttttccttcttagaccgtttaaatatggccacgaaacaagtagtctctggttggctgggcactgtggctcatgtccttaacaccaacactttgggaggccgaggcaggcaaatcacttgaggtcaggagttcgagaccagcctggccaatgtggcaaaaccccatctcttctaaaaatacaaaaattagctgagtgcggtggtgcacaccggtaatcccagttactcgagaagctgaggcaggagaatcacttgaacctggaaggcagagtttgcagtgagccaagaccgcaccactacactccagcctgggcaatagagcaagactccatctcaaaaaaaaaaaaaaaaagaaaaaagaaaatagtctctggttaaataacctctgaaagactccaccaaaaatttcatcttagcatttctccccaaacttcatgtaaaataaaatagagttgagagaaaaatagaaaggcaagggagtacctgttcactatttttattaaaccagtgttctactttattttaggtgtatcttttcttatttaaatgtcagctaaactttctttttaagatattgaatgaaagatgcccatccttcaggtttcgtttaagcaagaatccccattctcaaataatataatataaactttccaaattcttaagtagatcatctgagattgaaagctaagtttaactttctcaaagatattttagccgccatgacacctagacaaagtggtatattaaattctgattaatttggtcctaaagcacctaagaatcattcttactttcttatccacaggggttattaagttttcacattaaaaaaaatccaacagtgaataatactgcattggggttactgtaattgttaagtaaaataagaaatacaaatctttagttagatcacatggcacctgactactgcttagaaaatggtaagacttactacataaatcatgagtcactattgacatctactatatcatatcataggttaggtatctaattataaatagtcaaatcagctgactcaaggtggcatagctcaagcagaggaagataatacaagttgagtatggatttaacactctaaacctgtcagcactgtaggaaaagtaacttaaaactgcacaccccacttatgcataatcatcagatataaagagggtacattcctgtaatttattgttgctctagtgatcttaaagaattaagtccacattcataaagtccaaacttgtctccaaggatttgctttgactttgggagtatctggatcattaagtaatttccggaggtcagagtaaaagctttttatctctaaatattacttccctggaaaattagatgtagcagaagtcagtaacggagtgacctttgtcttaaacaattcatagattcactgaaattttcttcaactttaggaaaattaaatatattccacagtgctgtaagtcttaaatattgattttcctctgaaatcttgactcatcctacccaccaacattctccctttgtacactatgttctttgtaatgttcacgttacacaagtgaaaattagtaacattagtaaattttcattgcaggtttatttgttcatatttctggatatataatccattactgttaaacttcatatcaatgttccgatatttcttcatcttatgttttatgttacaaaacaggttatttcactatatgtatttttaattgattaattcttcccttttttggaaatgaaacagccctctcaattattgggacagaaaagttatttcatagggaatacttcaaacactgatatctacaacaggcagtaagattcgtcacaacaattggtatactgtcaatataccatacaaagttccatctggtcttgattaaaaattattttagttttctcaggaaaatgatacagagggagaattgcctagattatatgagagaaaaaaaagtagagagaaacataatgttttcttagattattacagcagtgaactatttccacctggtaagaagggtgcacttgagaatggggttcaagta

SEQ ID NO: 33796 - DNA, 2300 bp, Homo sapien; identical to SEQ ID NO: 33785

SEQ ID NO: 33797 - DNA, 2300 bp, Homo sapien
gatctccgtcaagtgcagtaaccagttcaagttggaagtgtgtcttttgaatgcagaaaacaaagtcgtggacaaccaggctgggacccagggccagctgaaggtgctgggtgccaacctctggtggccgtacctgatgcacgaacaccccgcctacctgtactcgtgggaggtaatggtggtttgggacttgcgtaagggaggtcttttgcccccatctggtagccctggcttcagcaggagcccaggacaggtgaacgggcaggtgtggtcctctgagctttctgatgtttcccacccttggtgggaggcccagattttttatttatttatttatttatttatttatttatttatttatttatttgtttttgtgatggtctcactctgtcacccaggctggaatgcaatggcctgatcacagctcactgcagctttgagctgcaatcctcctaccttggcctcctgagtagctgggactacaggcacatgccaccatgcctggctaattaaaaaaattttttttgtaggccgggcatggtggctcacacctgtaatcccagcacttcgggaggctgacgcgggcggatcactttaggccaggagttggagaccagcctggccaacatggtgaaaccccgtctctactaaaatatgaaaatttgcagggcatgatggtgcacgtctgtaatcccagctactcgggaggctgaggcaggggaattgcttgaacccaggaggcaggggctgcggtgaattgagatcatgccgcagcactctatcctgggtgacagagtgagactgtctcaaaaaaaaaaaaactcctttttatagagttggggtcttactaggttgcccaggctggtcttgaactcctggactcaggtgatcctcctgccttagcctcccaaagtgtagggattccaggcatgagccacctcgtctggtcaaggagaaggcctgattttgaagggcaggtcccagggtcagccagtgaagggcagagcctctggttgctgcttctctgcaggcccagtggcgacttctggggtgcatgcacgaggggtcttcctgctgtagggcaggccagatggggctcaggctgtcggggcgctcacacctggcgctttggctgtcgtaggtgcggctgactgcacagaagtcactggggcctttgacttctacacactccctgtggggctccgcactgtgcccgtcaccgagagccagtgggtgagagccagtttcatttgcggtagaggcagcagaggttgtagaaatgctccttgaggcagatgccacaccccaatttcatggagtgatttgggctgagccgagtctgcagcaggcagaaggctctgagatgttgtcctagcctgggcaaaggacagttcagagctcgggggaataggggtgtgctcagcacgactgggtggacaggccgtttgttgtgaatcgtacaggcttccaggagcgggtgcctgaggcttccagacaggctttgggaggtggccagaggagatgcctgtttccggggcaggaaatggagggagggcccaggctggagaggttcagccaggctgtcacaaggctttgaagcttcccatctgagagcctggctattggagagtgtgggtttggaacttgaggctaggaggttctattctgtcctgtgccagccacagccttcggatgggcagagcaatgatggggggaagatgtaaaagaaaagaactgaggaaagaagaagaaaaccagcttcaacaacggtctaggccggatgcggtgggtcacgcctgtaatcccagcagtttgggaggctgaggtgggtggatcacccgaggtcaggagttcgagaccagcctggtcaacaggtagtgaatcctgtctctactaaaaatacaaaaattagctgggcatggtggtggacgtctgtaatgccagctaccaggtaggctgaggcaggagaatcgcctcaggtgaaccaggaggcagagattgcaatgagctgagataatgccactgcattccagcctgggctacagaatgagactctgtatctcaacaaaacaaaacaaaacaaaaacacaacagtctgttctgtggaggccttgggcagatgctgggagctctgagcacggactggtccctctgttgggagcctcttcccttcatccctcctggttaacttgactcagcataaaggccatttcttctaagagcctgtccctgactctccaatcggggatgtgtctgttgtctcatagagtgcccaattcctgccaccacttgtcatttcc

SEQ ID NO: 33798 - DNA, 2300 bp, Homo sapien
tcccagctactcaggatgctgaggcaggagaatcgcctgaacccgggaggcagaggttgtagtgagccgagatcataccactgcactctccagcttaggtgacagagcgagactctgtctcaaaaaaaaaaaaaaaaatatttgaattttgtttaaatcgctaacacatactgggcatttaataacaaaaaaaaaggacatgagattgtgatccttatgaaggtttgagaggcatttcactagggttcaacatacagcagtctgaaacatactgtaataatttaatccaatggctcatctacagcacctaaaaagattacagcagattctcattattcagtgtagttacggtctagaaagttccatgaacaaataaaaagttaggtttcagcaagctactggtcacacttttgtaagcttaccaacacctacttttgttgtatgtgtgcttatttaatatatattgttggccaggcacagtggctaacgcctgtaatcccagcactttgggaagccaaggcgggcagatcatttgaggtctggagttcgagaccagcctggccaacgtggtgaaaccccgtctctactaaaactacaaaaaaaaaaaaaaaaaattagccaggcatggtggcgcatgcctgtagtcttagctacttgggaggcgaaggcaggggaatcgcttgaacccaggaggcagaggttgcagtgagccaagactgcaccactgcactccagcctgagcaacagagtgagactctatctcaaaaaaaataataataataattaattaaatgaagaataaataaataatatacattgttcattcattaacattgaactcacagccaacggcactacagcactcacgcctgaatggagtttatttaatgcatgtattttctctgtaagacacatcacagacttcttggacttgtgaatgctaagcagcacttcagcactatgcttgggggttaatttaaatggcaaaacaaccaacaaacagtacaaaaacaggaaaagcatggcattaaatagaccacaaaaaggatacctgactattgtatgagagctgaaaaagaaggcagaatatcatcctgttcaaactcaaattctttgacactctgcgcaaacacatgactatgaaagtgctgtgagtactgatttgggggttacaaaaaatagtaggtgagttcacaaatacaaaagctgaaaacaaggaggatcgactgtattttcgtagacaatctaatctcagaagatttcagttcagacaaaaatcatgataattactgtattacaaaagggcactagataggggggaaagagtaaaaatcacaattaaaacaaaggttcaaaattctgcagcaaccatatccagttacactttaatatgtttgcggcagactacattattgttcccaactcatcacccctccctatatctaaaacctttccccaagacaatgcagttcctcctgctagagatcaggtatatttatctatactatcaatgttagccatggacaaggtatgtgctttggctgactgaatgttagtggacatgagagaagcaatggcttaaaatgtacttccagaactggagtttccttgtgattctatcactgtgacagaaacacattctcaggtagtccactgatccaagggggaacaaacacacagaaaacatacctagactctatctgcagcttgcagcctcaccaagccaacaacagtcaactcacagatatgttagcaaaaataaatgtttttcgtaccttaagttttatataattattgacctgcagttaactgatatacaatatacattaatcttaaaatatcagtatcccattaaaaatatttacattaaaaactgagaccactttctttcctccttttttttttttttttttttttaaattaagagacagggtgtctcaatgttgcccaagctggagttcagtggctagtggctattcacaagaacgatcatcgcacactacctcaaactcctgggatcaagcaatcctcctgcctcagctttccaagtcgctgggactataagtgtgtaccacagcatgtcagctctctctctccttcttgacctaaagcctagcataaaattagctaagtagaatgtttccaaagatgcctgcatcagtatctcccatcccacataatttctgtttgattttgccattcacccataaaatggtgggatctacctcccctccttgcaaatttgagctggccctctgatcctgtctaagatctgaagccagatattaaggtacttcatt

SEQ ID NO: 33799 - DNA, 2300 bp, Homo sapien
tgcagcttgcagcctcaccaagccaacaacagtcaactcacagatatgttagcaaaaataaatgtttttcgtaccttaagttttatataattattgacctgcagttaactgatatacaatatacattaatcttaaaatatcagtatcccattaaaaatatttacattaaaaactgagaccactttctttcctccttttttttttttttttttttttaaattaagagacagggtgtctcaatgttgcccaagctggagttcagtggctagtggctattcacaagaacgatcatcgcacactacctcaaactcctgggatcaagcaatcctcctgcctcagctttccaagtcgctgggactataagtgtgtaccacagcatgtcagctctctctctccttcttgacctaaagcctagcataaaattagctaagtagaatgtttccaaagatgcctgcatcagtatctcccatcccacataatttctgtttgattttgccattcacccataaaatggtgggatctacctcccctccttgcaaatttgagctggccctctgatcctgtctaagatctgaagccagatattaaggtacttcattaatttccatgtttgtcctctatgcaacctagcaatcaagcaagaagtcaaaacatactgacatagtttggatgggtccccacccaaatctcaccttgcattgtaataattcccacgtgtcaagggtggggccgggtgcagataactgaatcatggggatggttccccccatactgttctcgcggtagtgactaagtctcatgagatctgatggttttataaatgggagctcccctgcacatgctctctcctgcctgccactatgtgagacatgcttttgcacctccttgccttccaccatgactgtgaggcctccccagccatgcagaactgtgagtcaattcaacctctttcctttataaattacccagtctcaggtatgtctttatttgcagtgtgagaacagactaatacaataagttgataccagtagagtggggtgctgctgtaaagatacccgaaaatgtggaagcaactttggaaatgggtaacagggagaggctggaacagtttggaaggctcagaagaggataggaaaatgtgggaaagtttggaacttcctagagacttgttgaatggctttgaccaaaatgttaatagtgatatggacaacaaggtccaggcggaggtggtctcagaggcagatgaggaatttgttgggaaatggagtaaagtcactcttactatgcaaagacactgcaggcattgtgcacctgtattagaaacgggcataagataggcgggaaagagggaaaataagaatttttttctagagttccctacagatctgtggaactttgaacttgagagagatgatttaaggtatctgacagaagaaatttctaagcagcaaagcattcgagaagaagcagagcataaaagttcagaaaatttgtagcctgatgatgcaacagaaaagaaaaatctattttctcaggagactgggttgtagaaatttgcataagtaatgaggagccaaatgttaatcaccaagacaatggggcaaatgtctccagggcatgttagagaccctcacagcagaccctcccatcacaggccaggaggcttagaaggaaaaatggttttgtgggtccagaaccccctgctgtgtgcagcctaggaacttggggccctgcatcccagctgctcctgccataggtaaaaggggccaaggtacacctcaggccatggcttcagagggtgcaagttccaagcctttcaggttctaggtggtgttaagcctgcagatgcaccgaagtcaagcattaacgttcatgaacctctgcctacatttcagaagatgtatgaaaatgcctggaaatccaggcaaaagtttgctgtgggggggaggggaggggagggggggccctcatggataacctctgctagggcagtgtcaaagggaaatatggggttggagcttccacacagagtccccactggggtactgccaagcagagctgtgagaaaagggccaccatcctccagaccccagaatggtagatccactgacagcttgcactgtgtgcctggaaaagctgcagacactcaatgcagccagaaggggggctgtaccctgcaaagccacaggggcggggctgcccaagaccctgggaacccacttcttgcatcacctagatgtgacacatggagtcaaaggaggtcattttggagctttaagatttgcctgctgggttttgga

SEQ ID NO: 33800 - DNA, 2300 bp, Homo sapien
taggccggatgcggtgggtcacgcctgtaatcccagcagtttgggaggctgaggtgggtggatcacccgaggtcaggagttcgagaccagcctggtcaacaggtagtgaatcctgtctctactaaaaatacaaaaattagctgggcatggtggtggacgtctgtaatgccagctaccaggtaggctgaggcaggagaatcgcctcaggtgaaccaggaggcagagattgcaatgagctgagataatgccactgcattccagcctgggctacagaatgagactctgtatctcaacaaaacaaaacaaaacaaaaacacaacagtctgttctgtggaggccttgggcagatgctgggagctctgagcacggactggtccctctgttgggagcctcttcccttcatccctcctggttaacttgactcagcataaaggccatttcttctaagagcctgtccctgactctccaatcggggatgtgtctgttgtctcatagagtgcccaattcctgccaccacttgtcatttccattcgcaacatttctttcattgtttgtttttcagagtcagggtctcactctgttgcccaggctggagtgcagtggtgcaatcatagctcgttgccatctcgacctcctgggcttaagcgatcctccccactcagcctcccaaatagctgggaccacagacgtgcgctgccttgccaggctaaattttaatatttttttttccccacgagtcagagtcttgctctgtctcccaggctggagagcagtgttgcggtcttggctcactgcgtcctctacctcctgggtacaaacagttctcctgcctcaccctcccgagtagctgggattacaggctcacgccaccatgcccagctagttttcttctttattttttgttgagatggggtttcaccatgttggccaggctggtctcgaactcttgagctcgtgatccacctgccttggcctcccaaagtgctcacaggcttgagccaccatgcccggccctaatttttaaatttgttgtagaaacaaggtcttgctatgttgtccaggctggtctcaagcgcctggtctcaagtaagcctcccaaagtgctggggttctaggcttgagccacctcgcctggcacttgcaccgtttttctgtgcatgcatctccactcccactgcccaggacctgtggacttagatttgagtcattactgagcacctagcacccagcctcatgcctacctcccacctcgcactacctgtttgcttgatgcattaataaatattccacctgaatccacagcccattcactcctgtgttcaagagctatttcaggaagtgaacctcatttctggcagtgttcagtccagtgacctcagctctgtgtacccggcagggtggctacgcctctgggggagttggattcaggggtgggggagaaagagtgttgttagagagctcggtctaggactagaggaacgtgcccttatgtaaaatacatctcaagttagggaagaaagcagcggctctgtgctttgttttttttttttttttttcttttctttctttttttttttttgtttgtttgtttgtttgtttgtttgttttggggcagggtcttgctctgtggcccaggctggagtgcagtagcgtgatttcggctcactgcaacctccacctcccgggttcaagcaattcttgtgcttcagcctcccgagtagctggagttacagatgcgtgccactaagcctggctaatttttgtatatttagtagaaatggggttttgccatgttggccaggctgttcttgaacccctgacctcagtgatctgcctgcctcagcctcctgaagtgctgggattacaggcgtgagccatcgtgcctggcccccagttgtgttctggcaggggaagatgggacggagaggatgggagggtgtctgagcctttcccggactgacggaacctgtgtcttctctcttttgtggacaggatggtgattgctcacaccaaagccttggacccctcccagcctgtgacctttgtgaccaactccacctacgcagcagacaagggggtgagcctgggggtccccaccccatttctccctgcctttgcctgggcttgtcctgaagcctgctcatgggaacagctggaaagaaccatgtgctgccagtctgagctttttattttgttttacttagaaagatagagacagggtcttgccatgttgcccaggctggtctcgaactcctgggctcaagtgatcctcctgcctcggccttccaaagggctggggt

SEQ ID NO: 33801 - DNA, 2300 bp, Homo sapien; identical to SEQ ID NO: 33797

SEQ ID NO: 33802 - DNA, 2300 bp, Homo sapien
tcccagctactcaggatgctgaggcaggagaatcgcctgaacccgggaggcagaggttgtagtgagccgagatcataccactgcactctccagcttaggtgacagagcgagactctgtctcaaaaaaaaaaaaaaaaatatttgaattttgtttaaatcgctaacacatactgggcatttaataacaaaaaaaaaggacatgagattgtgatccttatgaaggtttgagaggcatttcactagggttcaacatacagcagtctgaaacatactgtaataatttaatccaatggctcatctacagcacctaaaaagattacagcagattctcattattcagtgtagttacggtctagaaagttccatgaacaaataaaaagttaggtttcagcaagctactggtcacacttttgtaagcttaccaacacctacttttgttgtatgtgtgcttatttaatatatattgttggccaggcacagtggctaacgcctgtaatcccagcactttgggaagccaaggcgggcagatcatttgaggtctggagttcgagaccagcctggccaacgtggtgaaaccccgtctctactaaaactacaaaaaaaaaaaaaaaaaattagccaggcatggtggcgcatgcctgtagtcttagctacttgggaggcgaaggcaggggaatcgcttgaacccaggaggcagaggttgcagtgagccaagactgcaccactgcactccagcctgagcaacagagtgagactctatctcaaaaaaaataataataataattaattaaatgaagaataaataaataatatacattgttcattcattaacattgaactcacagccaacggcactacagcactcacgcctgaatggagtttatttaatgcatgtattttctctgtaagacacatcacagacttcttggacttgtgaatgctaagcagcacttcagcactatgcttgggggttaatttaaatggcaaaacaaccaacaaacagtacaaaaacaggaaaagcatggcattaaatagaccacaaaaaggatacctgactattgtatgagagctgaaaaagaaggcagaatatcatcctgttcaaactcaaattctttgacactctgcgcaaacacatgactatgaaagtgctgtgagtactgatttgggggttacaaaaaatagtaggtgagttcacaaatacaaaagctgaaaacaaggaggatcgactgtattttcgtagacaatctaatctcagaagatttcagttcagacaaaaatcatgataattactgtattacaaaagggcactagataggggggaaagagtaaaaatcacaattaaaacaaaggttcaaaattctgcagcaaccatatccagttacactttaatatgtttgcggcagactacattattgttcccaactcatcacccctccctatatctaaaacctttccccaagacaatgcagttcctcctgctagagatcaggtatatttatctatactatcaatgttagccatggacaaggtatgtgctttggctgactgaatgttagtggacatgagagaagcaatggcttaaaatgtacttccagaactggagtttccttgtgattctatcactgtgacagaaacacattctcaggtagtccactgatccaagggggaacaaacacacagaaaacatacctagactctatctgcagcttgcagcctcaccaagccaacaacagtcaactcacagatatgttagcaaaaataaatgtttttcgtaccttaagttttacataattattgacctgcagttaactgatatacaatatacattaatcttaaaatatcagtatcccattaaaaatatttacattaaaaactgagaccactttctttcctccttttttttttttttttttttttaaattaagagacagggtgtctcaatgttgcccaagctggagttcagtggctagtggctattcacaagaacgatcatcgcacactacctcaaactcctgggatcaagcaatcctcctgcctcagctttccaagtcgctgggactataagtgtgtaccacagcatgtcagctctctctctccttcttgacctaaagcctagcataaaattagctaagtagaatgtttccaaagatgcctgcatcagtatctcccatcccacataatttctgtttgattttgccattcacccataaaatggtgggatctacctcccctccttgcaaatttgagctggccctctgatcctgtctaagatctgaagccagatattaaggtacttcatt

SEQ ID NO: 33803 - DNA, 2300 bp, Homo sapien
tgcagcttgcagcctcaccaagccaacaacagtcaactcacagatatgttagcaaaaataaatgtttttcgtaccttaagttttacataattattgacctgcagttaactgatatacaatatacattaatcttaaaatatcagtatcccattaaaaatatttacattaaaaactgagaccactttctttcctccttttttttttttttttttttttaaattaagagacagggtgtctcaatgttgcccaagctggagttcagtggctagtggctattcacaagaacgatcatcgcacactacctcaaactcctgggatcaagcaatcctcctgcctcagctttccaagtcgctgggactataagtgtgtaccacagcatgtcagctctctctctccttcttgacctaaagcctagcataaaattagctaagtagaatgtttccaaagatgcctgcatcagtatctcccatcccacataatttctgtttgattttgccattcacccataaaatggtgggatctacctcccctccttgcaaatttgagctggccctctgatcctgtctaagatctgaagccagatattaaggtacttcattaatttccatgtttgtcctctatgcaacctagcaatcaagcaagaagtcaaaacatactgacatagtttggatgggtccccacccaaatctcaccttgcattgtaataattcccacgtgtcaagggtggggccgggtgcagataactgaatcatggggatggttccccccatactgttctcgcggtagtgactaagtctcatgagatctgatggttttataaatgggagctcccctgcacatgctctctcctgcctgccactatgtgagacatgcttttgcacctccttgccttccaccatgactgtgaggcctccccagccatgcagaactgtgagtcaattcaacctctttcctttataaattacccagtctcaggtatgtctttatttgcagtgtgagaacagactaatacaataagttgataccagtagagtggggtgctgctgtaaagatacccgaaaatgtggaagcaactttggaaatgggtaacagggagaggctggaacagtttggaaggctcagaagaggataggaaaatgtgggaaagtttggaacttcctagagacttgttgaatggctttgaccaaaatgttaatagtgatatggacaacaaggtccaggcggaggtggtctcagaggcagatgaggaatttgttgggaaatggagtaaagtcactcttactatgcaaagacactgcaggcattgtgcacctgtattagaaacgggcataagataggcgggaaagagggaaaataagaatttttttctagagttccctacagatctgtggaactttgaacttgagagagatgatttaaggtatctgacagaagaaatttctaagcagcaaagcattcgagaagaagcagagcataaaagttcagaaaatttgtagcctgatgatgcaacagaaaagaaaaatctattttctcaggagactgggttgtagaaatttgcataagtaatgaggagccaaatgttaatcaccaagacaatggggcaaatgtctccagggcatgttagagaccctcacagcagaccctcccatcacaggccaggaggcttagaaggaaaaatggttttgtgggtccagaaccccctgctgtgtgcagcctaggaacttggggccctgcatcccagctgctcctgccataggtaaaaggggccaaggtacacctcaggccatggcttcagagggtgcaagttccaagcctttcaggttctaggtggtgttaagcctgcagatgcaccgaagtcaagcattaacgttcatgaacctctgcctacatttcagaagatgtatgaaaatgcctggaaatccaggcaaaagtttgctgtgggggggaggggaggggagggggggccctcatggataacctctgctagggcagtgtcaaagggaaatatggggttggagcttccacacagagtccccactggggtactgccaagcagagctgtgagaaaagggccaccatcctccagaccccagaatggtagatccactgacagcttgcactgtgtgcctggaaaagctgcagacactcaatgcagccagaaggggggctgtaccctgcaaagccacaggggcggggctgcccaagaccctgggaacccacttcttgcatcacctagatgtgacacatggagtcaaaggaggtcattttggagctttaagatttgcctgctgggttttgga

SEQ ID NO: 33804 - DNA, 2300 bp, Homo sapien
gtgtgtgtgtgtgtatgctaactgaactcattatagattttattggatcagatatatgaagagacttggaagacttgggtttgtctggaactgggtgaaatagagaaggacgatcattgacatagaaagctgattactttgtcctttgagtataaatagtcttacaataaaatggcatctccactgtctaaaacacatttttacatttgctctccttctgaaattatttatgtgaaattaacaaatgtacttattaccttagaaacaaacgatccgtaatttatattatttattgtatatttgtagatccacttaaaattgatttgcaatataaggaaaaaatgcgttttataagttgtttgctttgtgtagtgcatcttgttaaccgtaggactactgttgcattgaaacaaaatagaattaatctgttcaggtaaatagaactggaagtgagatttgttgtcactccttctccttcaagtactgaccagtcttttaattcacacataactaacactctgtgcaataatatttttttgttctctgtcttttcaaacagaactcaagctccatgaggagatgtttcattgtcggtgagcacattcttgtcaattagttccttcttgtttcttactatagcccctgtgtctagaacctttccaggtattcagtagccatttaaaaattatttgttgaatgaattgttattttaaagaacatccacaagttttgcctgactgggcatgggaatacatgcccatctttggactgaatgtccatttttcccttctttgatttatcaaaatattggttaaatgatcaggactaccgtcagaaggaattttatatctaaaaatagtttaccttctatggatgtaaaaaatagttgtagtagttctggcttttatattattcgatgtttcaaagcggttttttttttccatcaccatattctacgttcttgaaaagtactcgttcatgtgactgctatcatttatgcttgtgcagcacgtagatacaggagagaagataaggaaaatgcttaccctgtgtctccttccctgtaacacagttttttttaccatattgattctccactttctactccctaagtaaaattttgcaacaggcatttgggaaactctggatacaagaaaaaaattttaatattgtacaaagagacaagaggtgacttcttttttatttttcatttagagtttatagtttaattaaagaaaatgcacatatatctaaagataatcatggataatacactcatgtaattactactttcagtggttgtaacaacagccaaagcacaaacagaaatgagaaagaattatcagcattatgcaagtacatatcctctttaagaattcctgttatagtgaaagcattaaaataattgaacacgtacagagaccatatactttgtgatctttttaaaaaagtattcaaaatatatttctgtgtgcaaaacattttcataatggtcttgtttaaatgaaagtatttagaatagcacattgtaaaattatgctgcagagcacaagtatttttctctttagaagacacataataaaatagaatcatcagtgttttttcataaacatgaatctttagagtgttacttgatcctgcataataagggtacttttttgcttaatgtaagcatagtatactaattcttttaaacttcagaaagcatatttacagtctaggcagatgggacatgaaggtcacacagcatgagcggtgaaatatctcatttacctagagttctagagagaattttaggaactcttatttattatcagtgcataaacaagagtaaactctacaaaactgtttgcaaaactctcctctttctactcagaaggctttccctagaataatcattatggagtctgtccatcctttactcattcactgcatggggacaggtgttagttatgagattggtgaatttagaaagctaaccaatttcatacctattttgggattctcaattcacaaacttttgtgcgtttcttaattatttcctttctttttcttgtagagagcagtcatgatggcctgcactccacacaatgcaacagagtgaaagagcaggttctgcttctttggtgtagtcctgaagcttcctaagaaacttcacatcaggtgatggataggagcaaccctgtaaaaccagccttagactatttttcaaacagtaagtaataaaggtgacgttttgatctttatctgcttaattacttctgctatgattctattgattctaacattgaaggagcagt

SEQ ID NO: 33805 - DNA, 2300 bp, Homo sapien
cttcacaaaattctgtgaggaatctattataacaggtattttgcttatttccacacaaacagaaggaaatgtgtattttctatgccctgaagaatttactcttttctgtaaatgacatatggtagttaattctttttggtaataaaatattcctgtttttaggccgaacagccttttcatttaaattcagggcaacatatcaaagctttgccgtaataatacagagtaatcgactaaagtaatatagaatttaaataacaaagagtttaaacaatttaatatgtcttctattaatttcaaactgaaattttacagaaattatttggaatatgctgccagagtacacacacacacacacacacacacacacatcacacgctcacatcacacactcacacccagctaaaggaaattaccacagctataatgatttcattaaatatctgaaattaaagtttcttttggattttcagctgaagctcatagtaaataaaagtaatatgatcattgttgcatactgtgaatcaacagcacccagaaaccttcgactttctatatttacacagcttaattatccgaactgaaacctgaggccatctgtgtcaacatgatttcacaattcattccagaaaattatttttcaggaaagtaaggctgcaaaccaataaataacttattgtttgcttcaggaaatttctgcaaatcaatttatgtcagtaagcaactctcctctgggccaacagattgctcacctgggcaggtagcagcttgtgtcaattaacagtttacttatgaagacttctgtcatggcccttaactcacagtgtcccccaatcctaaactctatgtcctgaacattacctattcttatcagtcattggtcttgaaaggccccgggcaaccatctgagcccagacttcaatactctatcaataccaccttatcatctacttttctaacatgacccctcaaggtggtgaccccacttacagtcgtcttttattgaatttagctttccctaatcaacatgctagtctattggatgcagtgtcagaggcaaaaatcacagaggttctgaaagcatcagcccatggttttctaaacatcatggttcaagacccttaacacgaaacagaaagtttccccgaggcgccgtaaacaacccatttgggcgcttccctgataattatagtgaaatctggcatctaattttttttggtggactctcaaattttatatttatgttttgattcctagaaataaaaaatgtttttataaggaattctttgatcgtttatgttttattcttgatagaaacctactactttataacttcgtttatgttttactcttgatagaaacctactactttataacttcgaacattattgatgttcttcctgtatttctgagaggtgacagcttgctggcatccctcgctggctctcggcgcctcctcggcctcagcccactctggccgcgcttgaggagcccttcagcccgcagctgcaccgtgggagcccctctctgtgctggctgaggcctgagcgggctccctctgctggcggggaggtgtggagggagaggcgcgggccggaacctgggctgcctgcggtgctcgcaggtccagcgcgacttccgggtgggcgcgggctcagcgcgacttccgggtgggcgcgggctcggcgcgccccgcactgttgagcggtcggctggcgccgccggccctgggcagtgagaggcttagcacccgggccagcagctgcggagggtgcactgggtcctccaacagtgatggcccgccggcgccgcgctcgaattttcgctgggcctcagccacctccccgcggggcaagggggcagggctcgggacctgcagcctgccatgctggagccctcaccctcctccccgcccccgtcccctgccccccgccccccgccccccgccccccaaccgcaggctcccgcgcgccaccccgaggggacgggcgccacctcctgctacgcggcacccggtcccgtcaaccgcccaacggctgaggagtgcggcagcgcgccagagactggcgggcagctccgcccgcggccgggatgcactaggcaaagccagctgggctcctgagttcggtgggtacttggagaacttactacgtctagctggaggattgtaaatgcaccaatcagcatgctgtgtctagctcaaggtatgtgaacgcactaatcagtgctctgtgtctagctaatctggtggggacttggagaacttttgtgtctagctaaaggattgtaaacagaccaag

SEQ ID NO: 33806 - DNA, 2300 bp, Homo sapien
tgttaatttccttggatataaaataatatcttgttcctttgattctcttacatataagtgtatttactcagatattactccaaatacaccagatatattcaaagttgaaaaaatatatactttggaatgtattatcaccttatttcacatgaagaaatcaaaatctctggcatccaagtgcattccagcctgaaaaaaattatgcaattgtgaatttaacagaaagcaaattgctcacatatggagtcaacgtgaagctatatcaatatttattaaaagtttatatattacttttgatcccctggagagaaatacaaaattcaaataattattctatttttatatcccaatttgtaattatgaaactctagcattttaatttttctctttcaagtttacctgaagcttcacaaaattctgtgaggaatctattataacaggtattttgcttatttccacacaaacagaaggaaatgtgtattttctatgccctgaagaatttactcttttctgtaaatgacatatggtagttaattctttttggtaataaaatattcctgtttttaggccgaacagccttttctttaaattcagggcaacatatcaaagctttgccgtaataatacagagtaatcgactaaagtaatatagaatttaaataacaaagagtttaaacaatttaatatgtcttctattaatttcaaactgaaattttacagaaattatttggaatatgctgccagagtacacacacacacacacacacacacacacacacacaatcacacgctcacatcacacactcacacccagctaaaggaaattaccacagctataatgatttcattaaatatctgaaattaaagtttcttttggattttcagctgaagctcatagtaaataaaagtaatatgatcattgttgcatactgtgaatcaacagcacccagaaaccttcgactttctatatttacacagcttaattatccgaactgaaacctgaggccatctgtgtcaacatgatttcacaattcattccagaaaattatttttcaggaaagtaaggctgcaaaccaataaataacttattgtttgcttcaggaaatttctgcaaatcaatttatgtcagtaagcaactctcctctgggccaacagattgctcacctgggcaggtagcagcttgtgtcaattaacagtttacttatgaagacttctgtcatggcccttaactcacagtgtcccccaatcctaaactctatgtcctgaacattacctattcttatcagtcattggtcttgaaaggccccgggcaaccatttgagcccagacttcaatactctatcaataccaccttatcatctacttttctaacatgacccctcaaggtggtgaccccacttacagtcgtcttttattgaatttagctttccctaatcaacatgctagtctattggatgcagtgtcggaggcaaaaatcacagaggttctgaaagcatcagcccatggttttctaaacatcatggttcaagacccttaacacgaaacagaaagtttccccgaggcgccgtaaacaacccatttgggcgcttccctgataattatagtgaaatctggcatctaattttttttggtggactctcaaattttatatttatgttttgattcctagaaataaaaaatgtttttataaggaattctttgatcgtttatgttttattcttgatagaaacctactactttataacttcgtttatgttttactcttgatagaaacctactactttataacttcgaacattattgatgttcttcctgtatttctgagaggtgacagcttgctggcatccctcgctggctctcggcacctcctcggcctcagcccactctggccgcgcttgaggagcccttcagcccgcagctgcaccgtgggagcccctctctgtgctggctgaggcctgagcgggctccctctgctggcggggaggtgtggagggagaggcgcgggccggaacctgggctgcctgcggggctcgccggtccagcgcgacttccgggtgggcgcgggctcggcgcgacttccgggtgggcgcgggctcggcgcaacttccgggtgggcgcgggctcggcgcgccccgcactcttgagcggtcggctggcgccgccggccctgggcagtgagaggcttagcacccgggccagcagctgcggagggtgcactgggtcctccaacagtgatggcccgccggcgccgcgctcgaattttcgctgggcctcagccacctccccgcggggcaagggggc

SEQ ID NO: 33807 - DNA, 2300 bp, Homo sapien
cagtctcctctcttcgcaaatatgctttatatttattggggagtcctctatctttttcctggttttccttaaagccttcccaggctgatggataacaaacatatgcaagaaacttggggcttgggattcctctaggctgtttgtcctagaggaatgcatcccgtcttgcaaataggatggtcaattaagatggaaggaagcaaaagtgtggataggaaggaagggcacaaaaggaaaagtgtggaatttgtgtgtgagtcctctaatgaggtcaaaggtgggagggaggcaagcatggaagcttcctggcactgcgatactaatttcccctcctctcccttttaaaatcctgtcttctgggaggaaatgagactgattatggagttcccactaagccctgcagggttggtggagacaaccccattttacacattagttcatagacttgggttgtgacttgcttgaggtcacccagccagtgtgtcagagcctgattttaaatccagggctgttctttccactgctatgcaagataccttctgtttatatttttgagggagacaacagagatgggaaaaatttttaacaataaaataaaggcagtggaggggatgagtatgctgatggggaaggaaagaggccctagcttctgcagttcctttgtgttattcctaacccttttctcatctgggggtgcactgcctctccatttctcaagtatgggaaatgccagtaattccacttgtgttaattggcagtcagacaacttgtccaaaactgaattgatcttacccaccccgccaacattttaataattgcaaccccaacctttcagttgctcagctaaagactatggaggtatccttgattcttttctcataacacacatccagtgtattggtaagatttagaattcagtcacttctcaccagctgctggtccaagccatcacaattcccccaaagttcttaacagtgctcacagcctctcctccccaccttacccttctgattgcagctgccaccactcatcccctgctcactcctgcagtcgtcaaagaccccaatgcacttctacctcagggcctttgcacttgcagctctctttgtctgaagagcttttcccctaggtatcagtagggttaacacccttcctcattcaggtcatggcttaactgtcttcccagcgaggactcctctggccaccctattttattttttgagatgaagtctctgtcacccaggctggagtgcaaggttggctcactgcaacctgtgcctcctggattcaagcgattctcctgcctcagcctcccgagtagctgggattacaggcgcctgccagcacgcccggctaatgtttttgtatttttagtagagacggaattcactatgttggccaggctggtctcgaactcctgccctccgatgatccacccccgctcggcctcccaaatcaccatgcctgggattacaggtgtgaaccatcgcacccggcctggccaccctattttaaactgcaaacttttccccttcagtgcttagtttttctccacagcattatcaccatttcatatagtatatgtttttcttcatactgactccccttggagaaggaaaactccacgagagcaaggatttttgacagtttttcattgttatttcttcagtgcttagacatgcatcaggctcaaagtagatgctcaatgtttgttgaatgaacagcaagagcaatggaggagtcctgaaatacacagcaagaagcaaggataattctggctttacttctgtggccagggtccttcatcccaaccttttagaagtagaaaaaccagatcgagctcctcagaacccaggtcgatggctgcagagccttcgaccttccgagagcgaatggcgatcactctttccggttctctgtgaattccagctggaacaccgtccctttccgcgccccaactcagcggaggccatgccctgcacctgagcgccccgctccggcagctgcactctgcagcatccggaacgtttcggcgtggccgcagggcgcggcggaatgacttccggggcgcccctaaagcggcggagaggagtgtcgggcggagtttccggctgagagtccttctagcggcgccggtgagtccgcgtgtggaagtctgtgaggcgcagaggtggggcaggccgtctggctagctaggcggctgggagcgttttcgtggcggggaacggaggttgaattgccctgcctgggctcatagggaaggaggatgtgaaggagcttgtgaaggcagaggaaggtaa

SEQ ID NO: 33808 - DNA, 2300 bp, Homo sapien
gtctgttaggtagagtgacaactatattctgcttctctgtgttgctctatggtatttgtgacaactacttgatctctcagttaaagatctgcattaacctccactgtaacttatgcatgtgttcggtttgagcaagaccagcaaggtacctaggaacctttccctgatcatcttgtatttcaggcagagatttagctgacaggaaccagcccatcatttatagattgcagaggtgcttcctaatgaccagcagctaaagagaaaatgccacaatctggtggaaggctctacgtgtttaggaatcatgaaaattaatttcctgattttctcctgcaggcagaatgtggcaaagattgctatccatgttcctattatctcaaatccttccatactaatagaaatcccaatatttagctgggcacattgtcacccaggaaaaagattaggtttcccagctcctcttacagctaggtatggtcatctgactaataataataataataataattattattattattattattattattattatttttgagacagagtttcactcttgttgcccaggctggagtgcaatagcatgatcttgactccccgcaacctccacgtcccaggttcaagcgattctcctgcctcagcctcccaagtagctgggattacaggcacccgccaccatgcctggctaattctttgtatttttagtagagacagagtttcaccatattggccaggctggtctcaaactcctgacctcaggtgatccacccacctcggcctcccaaagtgctgggattacaggcgtgagccaccatgcccggcccatccaactaagttctgattaaagaaatataagcagaagtgtcctgtgacagtttctaggagcactttgtcaggggacaagaggtgaggagagtaatgtgtagaaagaaaagacatgataattatcacaaatagaatacttgtattcattgttagtccagaccttaaggtttcaaatttgaaggtttaccacctaagggaggaatagaaaactgggagaggatttatgatgcaggaaagaaaagagatgtatgccaggtgcagtggctcacacctgtaatcccagcattttgggaggccaaggcaggaggattacttgagcccaggaggttgaggctgcagtgagccatgatctcgccactgccctccagcctggatgaccatgtctcaaaaaaaatagaaagaaaagaaaacgaatctataagaaatgctgaagagaggcctggcgcgatggctcacacctgtaatcccagcatttgggaggccaaggcgggcagatcacgagatcaggagatcaagagcattctgactagcatggtgaaaccctgtctctactaaaaatacaaaaaagtagctgggcgtggtggcaggcgcctgtggttccagctactccagaggctgaggaaggagaatctcttgaacccgggaggtggaggttgcagtgagccaagatctgcattccagcctgggcaactctgtctccaagggggaaaaaaaaagaaaagaaaaagaaacgctgaagctagtggacattgctgagtgtagctaaacgtaagcccaggagcataaagtctatgtgggaattaaaggtcaagcaagcaagtgggcacaacctactgactcacctgtgtagaaaagacctgctttggccagtgctgcaactcccacagctgattcccggggccagtccttaaaagagtccagccgtagttcttcgtaagcaaagatgctgtcattgcaataagcttgaataaaaagcacaaggtgagaccagcaggctttagtcttttttttttctatatctttattgctgctgcacaaattaaagagaccagtaggctttgatattgcaagtatcagcgttcaagttgtcccttcacagttacagatggaatgatgtctagagtttgcttcaaaataaacggggcggggcgggggggacgacaaaaagagatagggacaaaaaatcaaaagaagaaataaacaagcaaagcctttggaaaatgtttgagtttttacctgatgccataggtaattctctctggacccaggaattcacaaaatgttctccctgagggaaattaaaattcaagttgttgattatctgactttttttttttttttttttttgaggcagagtctcactctgttgcccaggctgaagtgcagtggcaggttctcgtctcactgcaacctccgcctcctgggttcaagtgattctcctgcctcagcctcccgagtagtacaggcatgtg

SEQ ID NO: 33809 - DNA, 2300 bp, Homo sapien
tactgtgtcttcctcttgtcagccttccgcaagacccctctgaccagtgtgctccccctcttcctttccaatcctccaccactccacacaaatcctaatcatctctgactgttttcagatcttgcaagctctaggatctcatatttctgggaggctttcctctgccccagctttcccagagtggaaggaagatgagaaatgctctgtttctagtttgatccttttgcagagctaaataccaatttctttccaaagaaatataatttcacaaagagacttaatcctatttctggtgtaataaacatggcaataatgtggtaagaggcaattaattcttcatgcattcacttacataagggctgctagatttgctggtatttttttttccgtgagctctaaatatattctttctgattcattcattaaacgaatactaattgagtgccacatgagtgtcaagcacttttctaggttcatgtcattcattagtgagcaaaaacctctaccctcatagagcttatttttatttttattttttgagacagagtttcactcttgttgcccaggctggagtgcaatggcgttatcttggttcactgcaacctccgtctcctgggttcaagcgattcttgtgcctcagcctcctgagtagctggcattacaggcatgtgccaccatgcccagctaatttttgtatttttagtagagacagggtttcaccgtgttggccaggctggtctcagactcctgacctcaggagatccgctggccttggcctcccaaagtgctgggattacaggcatgagccactgcgcccagccccctcatggagcttcaattccagattctggttgccaatctgtttgttgatcaaaggagaatggggcagagggatggtgtgcatcaaagtgcatggtgtgtaggagcattcaatgactacttgccagttaccccattggtggacagagtcttatatagaaaattgcctcactggtaaccaacttctgactgtcacaaaacccaactggagactgaataggctttcactattacaggtctggtggttattatctgcatgttaatggacagatgcccatgccagtggcactgatcaagtttccttacttttaggtataaaggacatcgtccagtgcttttcctgtggagggtgtttagagaaatggcaggaaggtgatgacccattagacgatcacaccagatgttttcccaagtgagtggaatgaatgttaaccatctgcaactttggatgcacttcaacagtttttttctttttcctcatttcctgccttattttatctttagattgagtctttatccactcctcggattcaggctatgaaggatgagtcttcatgtctttcatccctttgctccatgacccccttcctgtactagccttcccctctttatagttatggcatagttttggctagattcatatattcacattacatgtttacattatcatgactatacaaatgctatgtggagctgaagcttgtggtaaatttttatttatttttcccttcctgtatatccttttatttttttaggaagtaataactgtcctgttggtatgttagcttatttttttttcctgaggtaaaattcaggtagtaaccattttatttatttatttattattttttgtgacaggttctctctcttgcccaggttggagtgcagtggtgcaatcatggctcactgcagccttgacctctctggctcaagcaatcttcctcgctcagcctcccaagtagctgggactacaggcacatgtcttcacacccagctaatttttttttttttttttttaagagacagggtctctctatgttgcccaggctgctctcagacttctaggctcaagcagtcttcccatcctggcttcccaaagtgctgggattataggcgtgagccaccatgcacagcaattaaaccattttagagtacacaattctgtggcatttattatagtacattcacaatgttgtgcaaccaccccctctatctagttccaaaacactttcatcgcccccaaagaaaactctgtatccatcaagcaggcccccctcctctctccaccccactccatgcccagcccctgggatacaccaacctaattggtgtctatggatttatttgttctgactatttcctctaaatggaagcataccgtttgaccttttgcatttggattctttcacttggcatattgttttgaagtttatccatgttgtagcttgcataagtacttccttccttttgagaccaagtaa

SEQ ID NO: 33810 - DNA, 2300 bp, Homo sapien
tgcgggtgttcaactccactagataatgcaaagctttttcccaagtggttgcactgatttacattcccattggcctagatgcgtttctattgatttgcttcctcactaacttggtattgcccaaattttaatttttgtcagtgtaattactaataatgttaagcttattttcttcttctttttttctttctttttttttttttgagacgggagtttcactcttgttgcccaggctggagtgcaatggcacgatctcggctcaccacaacctccgcctcccaggttcaagtgattctcctgcctcagcctcccgagtagctgggattacaggcatgtgccaccacgcccagctaattttgtatttttagtagagatggggtttctccatgttggtcaggctggtctcggactcccaacctcaggtgatccacccacctcagcctcccaaagtgctgggattacaggtgtgagccaccgcgcctggcagttgagcttattttcatattttcctgcagaatagtcttgttctttctcttcaagagtgtgtcttagctatttttttgccctttggtctttcatattccagagaatatattaaatatcccaagcaggcatggtggttcacacctataatcccagcactttgggaggctgaggtgggaggagtgcacaaggcgaggagtttgagactagcctttgcaacatagctagactccatttctacaaaaaatttttaaaacaaacagggtgtggtagcatgcatctgtagtcccagctacctgggaggcagaggcaggagaatcgcttgagctcaggagtataggttgcaatgagctatgattgtgccactgtactgtggcctgggtgacagagtaaaactttgtctctaaaaaacagaaatatccctctttatccttgatagtattttttaggcctttattagttttttcatgttacatcttttagattattttctttttaatctatctgtgactatatttaaagtcaattcttgttttttccttttcctttttgtgggtaacggggtctcactatgttgcccaggcagatctcaaactcctgggctcaagctgtcctcccacctctgccaccctaagtgttgagattacaggcatgagccactgcacccagccttaaagtgaattgttataggcaacaacacagtggggtcttttattttattttttatttgtttatgagacagactcgctctgttgcctacgctggagtgcagtggtgcagtcttgactcactgcagcctggacttcccaggctcaagcaatcctcccacctcagactcctgagtagctgggactacaggcacatgccaccatgccaggctaattttttttttctgggcctagagatctgtggaactttgaacttgagagagatgatttaaggtatctgacagaagaaatttctaagcagcaaagcattcgagaagaagcagagcataaaatttcagaaaatttgtagcctgatgatgcaacagaaaagaaaaatctattttctcaggagactgggttgtagaaatttgcataagtaatgaggagccaaatgttaatcaccaagacaatggggcaaatgtctccagggcatgttagagaccctcacagcagaccctcccatcgcaggccaggaggcttagaaggaaaaatggttttgtgggtccagaaccccctgctgtgtgcagcctaggaacttggggccctgcatcccagctgctcctgccataggtaaaaggggccaaggtacacctcaggccatggcttcagagggtgcaagttccaagcctttcaggttctaggtggtgttaagcctgcagatgcaccgaagtcaagaattaacgttcatgaacctccgcctacatttcagaagatgtatgaaaatgcctggaaatccaggcaaaagtttgctgtgggggggaggggaggggggggccctcatggataacctctgctagggcagtgtcaaagggaaatatggggttggagctcccacacagagtccccactggggtactgccaagcagagctgtgagaaaagggccaccatcctccagaccccagaatggtagatccactgacagcttgcactgtgtgcctggaaaagctgcagacactcaatgcagccagaaggggggctgtaccctgcaaagccacaggggcggggctgcccaagaccctgggaacccacttcttgcatcacctagatgtgacacatggagtcaaaggaggtcattttggagctttaagatttgcctgctgggttttgga

SEQ ID NO: 33811 - DNA, 2300 bp, Homo sapien
tgattcctgtccccttgacagctgcaagcagggatgccggcatgagaagaacaaggtcggctcctgcagctgccgcagcagcccctcccccctccacattgaaccccacgtcggggtcactactcaatgcagtggatggaggcccctcacatttcttggcctcagccacagctgcagcacgtgtccagaggtcagaagtgagatataaccagagatcccagacctcccggaccagatcgtgcctcaaacgaaatgccagctccagctcccacagctctacggaaggcctcccgcaactaaagcggaggagggggccagcctcatcccactgccagctggcccacagttcctcaaacacagtgagtgaggatggacctcaggctgtctcttcgggtcaccgctgtgaaaacaaggcaggtacagcaccagggcagacacttgcccccaggggtggctcccccagatcccaggcctctaggccccacatcaacactgcactgcacgttgaggacaaggccatctcggactgcagaccctcacgaccttcccacactttgtcctcatttgcaacaggggcttcgggtgggcctcccgtttctaaagcacccactatggacgcacagcaggacagacccaagtcccaagactgcctgggcctagtggcccccctagcatctgctgcagaggtcccctctacagctcccgtgtctgggaagaagcacagaccaccaggacccctgttctcctcctcagatccccttcctgccacctcttcccactcccgggactcagcccaggtcacctcgctgattcctgccaccttcacagctgcaagcagggatgccggcatgagaagaacaaggtcggctcctgcagctgccgcagcagcccctcccccctccacattgaaccccacgtcggggtcactactcaatgcagtggatggaggcccctcacatttcttggcctcagccacagctgcagcacgtgcccagaggtcagaagtgagatataaccagagatcccagacctcccggaccagatcctgcctcaaacgaaatgccagctccagctccagctccagctcccacagctctacggaaggcctccaggaactaaagcggaggagggggccagcctcatcccactgccagctggcccacagttccccaaacacagtgagtgaggacggacctcaggctgtctcttcgggtcaccgctgtgaaaacaaggcaggtacagcaccagggcagacactcgcccccaggggtggctcccccagatcccaggcctctaggccccgcatcaacactgcactgcacgttgaggacaaggccatctcggactgcagaccctcacggccttcccacactttgtcctcacttgcaacaggggcttcgggtgggcctcccgtttctaaagcacccactatggatgcacagcagcacagacccaagtcccaagactgcctgggcctactggcccccctagcatctgctgcagaggtcccctctacagctcccgtgtctgggaagaagcacagaccaccaggacccctgttctcctcctcagatccccttcctgccacctcttaccactcacgggactcagcccaggtcacctcgctgattcccgcgcccttcacagctgcaagcagcgatgccggcatgagaagaacaaggcctggcacctcggctcctgcagctgcagcagcagcccctcccccctccacattgaaccccacgtcggggtcactactcaatgcagtggatggaagcccctcacatttcttggcctcagccacagctgcagcacgtgtccagaggtcagaagtgagatataaccagagatcccagacctcccggaccagatcctgcctccaaggaaatgccagctccagctcccacagctctacggaaggcctcccgcaactaaagcggaggagggggccagcctcatcccactgccagctggcccacagttcctcaaacacagtgagtgaggacggacctcaggctgtctcttcgggtcacacccgctgtgagaagaaggcaggtacagcaccagggcagacacttgcccccaggggtggctcccccagatcccaggcctctaggccccgcatcaacactgcactgcacgttgaggacaaggccatctcggactgcagaccctcacggccttcccacactttgtcctcacttgcaacaggggcttcgggtgggcctcccgtttctaaagcacccactatggatgcacagcaggacagacccaagtcccaagactgcctgggcctactg

SEQ ID NO: 33812 - DNA, 2300 bp, Homo sapien
tttacttgggagtaacagcagtaatagttaacggagccagaatgcttgagtcatataattgcaaagcagagttgggagcaacagatgctaaagagtagttgctgtagttcctctttgggtcgtaggagcagttgtcatattactatatagctactgcatgaagaagagttcttagtgaggcctgggtgaacagctcttcttagtattctgtgtgaccccatttgaccttttaacaaatccctaagtaaataaatagcccctcaggaaaactaagtttttctctgctgtttttttgcttgagagagctataactgtaatagacttatatttctgaacattttagtgcttgccaatatttggtaatatttatgtttcctatatttgtaatgaacattcttcttccggtacattttttgttaaattattgtttgatggataaaagttcaccttttattgtataaaattgactgagattaatttatacacattgacaatgggtaaatagaatttttcagattattaaaagctgaaggatgcccacgtaagcaaaaaaaaaaaagaaaaaaccaacaaaaataaacccaaacccctcaaacaatttcgaacacgaaacattcttctgatgccggcatccctgcttgcaggtgtgaagggggcaggaatcagcgaggtgtcctgggctgagtccccggagtgggaagaggtggcaggaaggggatctgaggaggagaacaggggtcctggtggtctgtgcttcttcccagacatgggagctgtagaggagacctctgcagcagatgctaggggggccagtaggcccaggcagtcttgggacttgggtctgtcctgctgtgcatccatagtgggtgctttagaaacgggaggcccacccgaagcccctgttgcaagtgaggacaaagtgtgggaaggccgtgagggtctgcagtccgagatggccttgtcctcaacgtgcagtgcagtgttgatgcggggcctagaggcctgggatctgggggagccacccctgggggcaagtgtctgccctggtgctgtacctgccttcttctcacagcgggtgtgacccgaagagacagcctgaggtccgtcctcactcactgtgtttgaggaactgtgggccagctggcagtgggatgaggctggccccctcctccgctttagttgcgggaggccttccgtagagctgtgggagctggagctggcatttccttggaggcaggatctggtccgggaggtctgggatctctggttatatctcacttctgacctctggacacgtgctgcagctgtggctgaggccaagaaatgtgaggggcttccatccactgcattgagtagtgaccccgacgtggggttcaatgtggaggggggaggggctgctgctgcagctgcaggagccgaggtgccaggccttgttcttctcatgccggcatcgctgcttgcagctgtgaagggcgcgggaatcagcgaggtgacctgggctgagtcccgtgagtggtaagaggtggcaggaaggggatctgaggaggagaacaggggtcctggtggtctgtgcttcttcccagacacgggagctgtagaggggacctctgcagcagatgctaggggggccagtaggcccaggcagtcttgggacttgggtctgtgctgctgtgcatccatagtgggtgctttagaaacgggaggcccacccgaagcccctgttgcaagtgaggacaaagtgtgggaaggccgtgagggtctgcagtccgagatggccttgtcctcaacgtgcagtgcagtgttgatgcggggcctagaggcctgggatctgggggagccacccctgggggcgagtgtctgccctggtgctgtacctgccttgttttcacagcggtgacccgaagagacagcctgaggtccgtcctcactcactgtgtttggggaactgtgggccagctggcagtgggatgaggctggccccctcctccgctttagttcctggaggccttccgtagagctgtgggagctggagctggagctggagctggcatttcgtttgaggcaggatctggtccgggaggtctgggatctctggttatatctcacttctgacctctgggcacgtgctgcagctgtggctgaggccaagaaatgtgaggggcctccatccactgcattgagtagtgaccccgacgtggggttcaatgtggaggggggaggggctgctgcggcagctgcaggagccgaccttgttcttctcatgccggcatccctgcttgcagctgtgaaggtggcaggaa

SEQ ID NO: 33813 - DNA, 2300 bp, Homo sapien
ccggatgcggtgggtcacgcctgtaatcccagcagtttgggaggctgaggtgggtggatcacccgaggtcaggagttcgagaccagcctggtcaacaggtagtgaatcctgtctctactaaaaatacaaaaattagctgggcatggtggtggacgtctgtaatcccagctaccaggtaggctgaggcaggagaatcgcctcaggtgaaccaggaggcagagattgcaatgagctgagataatgccactgcattccagcctgggctacagaatgagactctgtatctcaacaaaacaaaacaaaacaaaaacacaacagtctgttctgtggaggccttgggcagatgctgggagctctgagcacggactggtccctctgttgggagcctcttcccttcatccctcctggttaacttgactcagcataaaggccatttcttctaagagcctgtccctgactctccaatcggggatgtgtctgttgtctcatagagtgcccaattcctgccaccacttgtcatttccattcgcaacatttctttcattgtttgtttttcagagtcagggtctcactctgttgcccaggctggagtgcagtggtgcaatcatagctcgttgccatctcgacctcctgggcttaagcgatcctccccactcagcctcccaaatagctgagaccacagacgtgcgctgccttgccaggctaaattttaatatttttttttccccacgagtcagagtcttgctctgtctcccaggctggagagcagtgttgcgatcttggctcactgcatcctctacctcctgggtacaaacagttctcctgcctcaccctcccgagtagctgggattacaggctcacgccaccatgcccagctagttttcttctttattttttgttgagatggggtttcaccatgttggccaggctggtctcgaactcttgagctcgtgatccacctgccttggcctcccaaagtgctcacaggcttgagccaccatgcccggccctaatttttaaatttgttgtagaaacaaggtcttgctatgttgtccaggctggtctcaagcgcctggtctcaagtaagcctcccaaagtgctggggttctaggcttgagccacctcgcctggcacttgcaccgtttttctgtgcatgcatctccactcccactgcccaggacctgtggacttagatttgagtcattactgagcacctagcacccagcctcatgcctccctcccacctcgcactacctgtttgcttgatgcattaataaatattccacctgaatccacagcccattcactcctgtgttcaagagctatttcaggaagtgaacctcatttctggcagtgttcagtccagtgacctcagctctgtgtacccggcagggtggctacgcctctgggggagttggattcaggggtgggggagaaagagtgttgttagagagctcggtctaggactagaggaacgtgcccttatgtaaaatacatctcaagttagggaagaaagcagcggctctgtgctttgttttttttttttttttttcttttctttctttctttttttttgtttgtttgtttgtttgtttgtttgtttgttttggggcagggtcttgctctgtggcccaggctggagtgcagtagcgtgatttcggctcactgcaacctccacctcccgggttcaagcaattcttgtgcctcagcctcccgagtagctggagttacagatgcgtgccactaagcctggctaatttttgtatatttagtagaaatggggttttgccatgttggccaggctgttcttgaacccctgacctcagtgatctgcctgcctcagcctcctgaagtgctgggattacaggcgtgagccatcgtgcctggcccccagttgtgttctggcaggggaagatgggacagagaggatgggaggttgtctgagcctttcccggactgacggaacctgtgtcttctctcttttgtggacaggatggtgattgctcacaccaaagccttggacccctcccagcctgtgacctttgggaccaactccacctacgcagcagacaaggcggtgagcctgggggtccccaccccatttctccctgcctttgcctgggcttgtcctgaagcctgctcatgggaacagctggaaagaaccatgtgctgccagtctgagctttttattttgttttacttagaaagatagagacagggtcttgccatgttgcccaggctggtctcgaactcctgggctcaagtgatcctcctgcctcggccttccaaagggctggggt

SEQ ID NO: 33814 - DNA, 2300 bp, Homo sapien
cagatctccgtcaagtgcagtaaccagttcaagttggaagtgtgtcttttgaatgcagaaaacaaagtcgtggacaaccaggctgggacccagggccagctgaaggtgctggtgccaacctctggtggccgtacctgatgcacgaacaccccgcctacctgtactcgtgggaggtaatggtggtttgggacttgcgtaagggaggtcttttgcccccatctggtagccctggcttcagcaggagcccaggacaggtgaacgggcaggtgtggtcctctgagctttctgatgtttcccacccttggtgggaggcccagattttttatttatttatttatttatttatttatttatttatttgtttgtttgtttttgtgatggtctcactctgtcacccaggctggaatgcaatggcctgatcacagctcactgcagctttgagctgcaatcctcctaccttggcctcctgagtagctgggactacaggcacatgccaccatgcctggctaattaaaaaaattttttttgtaggccgggcatggtggctcacacctgtaatcccagcacttcgggaggctgacgcgggcggatcactttaggccaggagttggagaccagcctggccaacatggtgaaaccccgtctctactaaaatatgaaaatttgcagggcatgatggtgcacgtctgtaatcccagctactcgggaggctgaggcaggggaattgcttgaacccaggaggcaggggctgcggtgaattgagatcatgccgcagcactctatcctgggtgacagagtgagactgtctcaaaaaaaaaaaactcctttttatagagttggggtcttactaggttgcccaggctggtcttgaactcctggactcaggtgatcctcctgccttagcctcccaaagtgtagggattccaggcatgagccacctcgtctggtcaaggagaaggcctgattttgaagggcaggtcccagggtcagccagtgaagggcagagcctctggttgctgcttctctgcaggcccagtggcgacttctggggtgcatgcacgaggggtcttcctgctgtagggcaggccagatggggctcaggctgtcggggcgctcacacctggcgctttggctgtcgtaggtgcggttgactgcacagaagtcactggggcctttgacttctacacactccctgtggggctccgcactgtgcccgtcaccgagagccagtgggtgagagccagtttcatttgcggtagaggcagcagaggttgtagaaatgctccttgaggcagatgccacaccccaatttcatggagtgatttgggctgagccgagtctgcagcaggcagaaggctctgagatgttgtcctagcctgggcaaaggacaattcagagctcgggggaataggggtgtgctcagcacgactgggtggacaggccgtttgttgtgaatcgtacaggcttccaggagcgggtgcctgaggcttccagacaggctttgggaggtggccagaggagatgcctgtttccggggcaggaaatggagggagggcccaggctggagaggttcagccaggctgtcacaaggctttgaagcttcccatctgagagcctggctattggagagtgtgggtttggaacttgaggctaggaggttctattctgtcctgtgccagccacagccttcggatgggcagagcaatgatggggggaagatgtaaaagaaaagaactgaggaaagaagaagaaaaccagcttcaacaacggtctaggccggatgcggtgggtcacgcctgtaatcccagcagtttgggaggctgaggtgggtggatcacccgaggtcaggagttcgagaccagcctggtcaacaggtagtgaatcctgtctctactaaaaatacaaaaattagctgggcatggtggtggacgtctgtaatcccagctaccaggtaggctgaggcaggagaatcgcctcaggtgaaccaggaggcagagattgcaatgagctgagataatgccactgcattccagcctgggctacagaatgagactctgtatctcaacaaaacaaaacaaaacaaaaacacaacagtctgttctgtggaggccttgggcagatgctgggagctctgagcacggactggtccctctgttgggagcctcttcccttcatccctcctggttaacttgactcagcataaaggccatttcttctaagagcctgtccctgactctccaatcggggatgtgtctgttgtctcatagagtgcccaattcctgccaccacttgtcatttcc

SEQ ID NO: 33815 - DNA, 2300 bp, Homo sapien
gtaatcccagctactcaggatgctgaggcaggagaatcgcctgaacccgggaggcagaggttgtagtgagccgagatcataccactgcactctccagcttaggtgacagagcgagactctgtctcaaaaaaaaaaaaaaaaaaatatttgaattttgtttaaatcgctaacacatactgggcatttaataacaaaaaaaaaggacatgagattgtgatccttatgaaggtttgagaggcatttcactagggttcaacatacagcagtctgaaacatactgtaataatttaatccaatggctcatctacagcacctaaaaagattacagcagattctcattattcagtgtagttacggtctagaaagttccatgaacaaataaaaagttaggtttcagcaagctactggtcacacttttgtaagcttaccaacacctacttttgttgtatgtgtgcttatttaatatatattgttggccaggcacagtggctaacgcctgtaatcccagcactttgggaagccaaggcgggcagatcatttgaggtctggagttcgagaccagcctggccaacgtggtgaaaccccgtctctactaaaactacaaaaaaaaaaaaaaaaaattagccaggcatggtggcgcatgcctgtagtcttagctacttgggaggcgaaggcaggggaatcgcttgaacccaggaggcagaggttgcagtgagccaagactgcaccactgcactccagcctgagcaacagagtgagactctatctcaaaaaaaataataataataattaattaaatgaagaataaataaataatatacattgttcattcattaacattgaactcacagccaacggcactacagcactcacgcctgaatggagtttatttaatgcatgtattttctctgtaagacacatcacagacttcttggacttgtgaatgctaagcagcacttcagcactatgcttgggggttaatttaaatggcaaaacaaccaacaaacagtacaaaaacaggaaaagcatggcattaaatagaccacaaaaaggatacctgactattgtatgagagctgaaaaagaaggcagaatatcatcctgttcaaactcaaattctttgacactctgcgcaaacacatgactatgaaagtgctgtgagtactgatttgggggttacaaaaaatagtaggtgagttcacaaatacaaaagctgaaaacaaggaggatcgactgtattttcgtagacaatctaatctcagaagatttcagttcagacaaaaatcataattactgtattacaaaagggcactagataggggggaaagagtaaaaatcacaattaaaacaaaggttcaaaattctgcagcaaccatatccagttacactttaatatgtttgcggcagactacattattgttcccaactcatcacccctccctatatctaaaacctttccccaagacaatgcagttcctcctgctagagatcaggtatatttatctatactatcaatgttagccatggacaaggtatgtgctttggctgactgaatgttagtggacatgagagaagcaatggcttaaaatgtacttccagaactggagtttccttgtgattctatcactgtgacaaaaacacattctcaggtagtccactgatccaagggggaacaaacacacagaaaacatacctagactctatctgcagcttgcagcctcaccaagccaacaacagtcaactcacagatatgttagcaaaaataaatgtttttcgtaccttaagttttatataattattgacctgcagttaactgatatacaatatacattaatcttaaaatatcagtatcccattaaaaatatttacattaaaaactgagaccactttctttcctcctttttttttttttttttttaaattaagagacagggtgtctcaatgttgcccaagctggagttcggtggctagtggctattcacaagaacgatcatcgcacactacctcaaactcctgggatcaagcaatcctcctgcctcagctttccaagtcgctgggactataagtgtgtaccacagcatgtcagctctctctctccttcttgacctaaagcctagcataaaattagctaagtagaatgtttccaaagatgcctgcatcagtatctcccatcccacataatttctgtttgattttgccattcacccataaaatggtgggatctacctcccctccttgcaaatttgagctggccctctgatcctgtctaagatctgaagccagatattaaggtacttcatt

SEQ ID NO: 33816 - DNA, 2300 bp, Homo sapien
ctctatctgcagcttgcagcctcaccaagccaacaacagtcaactcacagatatgttagcaaaaataaatgtttttcgtaccttaagttttatataattattgacctgcagttaactgatatacaatatacattaatcttaaaatatcagtatcccattaaaaatatttacattaaaaactgagaccactttctttcctcctttttttttttttttttttaaattaagagacagggtgtctcaatgttgcccaagctggagttcggtggctagtggctattcacaagaacgatcatcgcacactacctcaaactcctgggatcaagcaatcctcctgcctcagctttccaagtcgctgggactataagtgtgtaccacagcatgtcagctctctctctccttcttgacctaaagcctagcataaaattagctaagtagaatgtttccaaagatgcctgcatcagtatctcccatcccacataatttctgtttgattttgccattcacccataaaatggtgggatctacctcccctccttgcaaatttgagctggccctctgatcctgtctaagatctgaagccagatattaaggtacttcattaatttccatgtttgtcctctatgcaacctagcaatcaagcaagaagtcaaaacatactgacatagtttggatgggtccccacccaaatctcaccttgcattgtaataattcccacgtgtcaagggtggggccgggtgcagataactgaatcatggggatggttccccccatactgttctcgcggtagtgactaagtctcatgagatctgatggttttataaatgggagctcccctgcacatgctctctcctgcctgccactatgtgagacatgcttttgcacctccttgccttccaccatgattgtgaggcctccccagccatgcagaactgtgagtcaattcaacctctttcctttataaattacccagtctcaggtatgtctttatttgcagtgtgagaacagactaatacaataagttgataccagtagagtggggtgctgctgtaaagatacccgaaaatgtggaagcaactttggaaatgggtaacagggagaggctggaacagtttggaaggctcagaagaggataggaaaatgtgggaaagtttggaacttcctagagacttgttgaatggctttgaccaaaatgttaatagtgatatggacaacaaggtccaggcggaggtggtctcagaggcagatgaggaatttgttgggaaatggagtaaagtcactcttactatgcaaagacactgcaggcattgtgcacctgtattagaaacgggcataagataggcgggaaagagggaaaataagaatttttttctagagttccctacagatctgtggaactttgaacttgagagagatgatttaaggtatctgacagaagaaatttctaagcagcaaagcattcgagaagaagcagagcataaaagttcagaaaatttgtagcctgatgatgcaacagaaaagaaaaatctattttctcaggagactgggttgtagaaatttgcataagtaatgaggagccaaatgttaatcaccaagacaatggggcaaatgtctccagggcatgttagagaccctcacagcagaccctcccatcgcaggccaggaggcttagaaggaaaaatggttttgtgggtccagaaccccctgctgtgtgcagcctaggaacttggggccctgcatcccagctgctcctgccataggtaaaaggggccaaggtacacctcaggccatggcttcagagggtgcaagttccaagcctttcaggttctaggtggtgttaagcctgcagatgcaccgaagtcaagaattaacggtcatgaacctccgccttcatttcagaagatgtatgaaaatgcctggaaatccaggcaaaagtttgctgtgggggggaggggaggggggggccctcatggataacctctgctagggcagtgtcaaagggaaatatggggttggagctcccacacagagtccccactggggtactgccaagcagagctgtgagaaaagggccaccatcctccagaccccagaatggtagatccactgacagcttgcactgtgtgcctggaaaagctgcagacactcaatgcagccagaaggggggctgtaccctgcaaagccacaggggcggggctgcccaagaccctgggaacccacttcttgcatcacctagatgtgacacatggagtcaaaggaggtcattttggagctttaagatttgcctgctgggttttgga

SEQ ID NO: 33817 - DNA, 2300 bp, Homo sapien
gttgatgtggggcctagaggcctgggatctgggggagccacccctgggggcgagtgtctgccctggtgctgtacctgccttgttttcacagcggtgacccgaagagacagcctgaggtccatcctcactcactgtgtttgaggaactgtgggccagctggcagtgggatgaggctggccccctcctccgctttacttcttggaggccttccgtagagctgtgggagctggagctggcatttcgtttgaggcacgatctggtccgggaggtctgggatctctggttatatctcacttctgacctctggacacgtgctgcagctgtggctgaggacaagaaatgtgaggggcctccatccactgcattgagtagtgaccccgacgtggggttcaatgtggaggggggaggggctgctgcggcaggtgcaggagccgaacttgttcttctcatgccggcatccctgcttgcagctgtcaagggggcaggaatcatcgaggtgacctgggctgagtcccgggagtgggaagagttggccggaaggggatctgaggaggagaacaggggtcctggtggtctgtgcttcttcccagacacgggagctgtagcggggacctctgcagcagatgctaggggggccactaggtccaggcagtcttgggacttgggtctgtcctgctgtgcatccatagtgtgtgctttagaaacgggaggcccacccgaagcccctgttgcaagtgaggacaaagtgtgggaaggctgtgagggtctgcagtccgggatggccttgtcctcaacgtgcagtgcactgttgatgcgctggaatgccgtctctttttccaggtgcaggtcttcagccgtgacccggtaccccagctctaagggaggtggcagcatcaaaggctcccctcgcctgcgtggcagcaggggaatcttgcgtctacggggcctagaatcctgggatctgggggagccacccgttggggcgattgtctgccctggtgatgtatctgcccccttttcacaccgtgtgtgacccgaagagacagcctgaggcctgtcctcactcactgtctttgagtaactgagggtcagctggcagcgggatgaggctggccccctcctctgctttagccccggcaagcctcccgtggagctgtaggagctggagatggcatttcgtttggtgctcgagctcgtccaggatgtctgggatgtgtggttatatctgatttctgagctctgggcgtggaggtctgtctgcagaggcccgggcctgggcacaaagggagaggggcctccattgtcccgcaggggccaaaatgcagaccgtgcatccccggtgacctcggggaccgttctctgatcatcaggattttcttggactctggggtccttgtcctgctcaggcatccctgccctgctctccttgagggccctcaacactatcttccctggacacaagtctggggacagccgggtgttgtggaccccaaaggggtgactacctgctcctgggccccacagagtccttgtgctcagtgtagtggctgggctgggggatgccctggaactcggagcacacagcactggcttactgtggtacctgtgcagtgaaattgaagacagaatcaccaggatggaacacaggtcttgcaggatcacggaaaaccttcttagagttgtcttgacaccactgatgtcgagtgtgcgggtgtttgtaggatggcctgccactcagtccaggggcaggagcaacggggagatcccacaagcaaagtgaactgggggatgggctgaaggggctccaggcaactgagccctactcgcaggtcctcggccttggcccaaacaggaatgaggggcacagagtgcccgggtaaccgctcctgggagcagtggggaactgtcggatacttgaactctcaagagctgggctctgagcgtcctcgtccagctgccaacttggccaaaggctaagccagcagattgttctgttgccgggcaacgcgacttctaaacctgagggagtgggcatgtgagcacataatggcaccagtgacagagcgaccataatggatgaataagcgcagccaggtacccgcgcaaggcacctgctggcaatggcaggaggcggacgtggggggccgtgcagtaggtactggagggagagacgtgggcacaaaggtcgcgggaggaacaggtgcccacaatggctgcatatttgcccgtggatcactgaagattcctgctctcctgctgaggtggagactgcagtgagctgagatcgcaccattgcactc

SEQ ID NO: 33818 - DNA, 2300 bp, Homo sapien
tcctgccattgccagcaggtgccttgcgcgggtacctggctgcgcttattcatccattatggtcgctctgtcactggtgccattatgtgctcacatgcccactccctcaggtttagaagtcgcgttgcccggcaacagaacaatctgctggcttagcctttggccaagttggcagctggacgaggacgctcagagcccagctcttgagagttcaagtatccgacagttccccactgctcccaggagcggttacccgggcactctgtgcccctcattcctgtttgggccaaggccgaggacctgcgagtagggctcagttgcctggagccccttcagcccatcccccagttcactttgcttgtgggatctccccgttgctcctgcccctggactgagtggcaggccatcctacaaacacccgcacactcgacatcagtggtgtcaagacaactctaagaaggttttccgtgatcctgcaagacctgtgttccatcctggtgattctgtcttcaatttcactgcacaggtaccacagtaagccagtgctgtgtgctccgagttccagggcatcccccagcccagccactacactgagcacaaggactctgtggggcccaggagcaggtagtcacccctttggggtccacaacacccggctgtccccagacttgtgtccagggaagatagtgttgagggccctcaaggagagcagggcagggatgcctgagcaggacaaggaccccagagtccaagaaaatcctgatgatcagagaacggtccccgaggtcaccggggatgcacggtctgcattttggcccctgcgggacaatggaggcccctctccctttgtgcccaggcccgggcctctgcagacagacctccacgcccagagctcagaaatcagatataaccacacatcccagacatcctggacgagctcgagcaccaaacgaaatgccatctccagctcctacagctccacgggaggcttgccggggctaaagcagaggagggggccagcctcatcccgctgccagctgaccctcagttactcaaagacagtgagtgaggacaggcctcaggctgtctcttcgggtcacacacggtgtgaaaagggggcagatacatcaccagggcagacaatcgccccaacgggtggctcccccagatcccaggattctaggccccgtagacgcaagattcccctgctgccacgcaggcgaggggagcctttgatgctgccacctcccttagagctggggtaccgggtcacggctgaagacctgcacctggaaaaagagacggcattccagcgcatcaacagtgcactgcacgttgaggacaaggccatcccggactgcagaccctcacagccttcccacactttgtcctcacttgcaacaggggcttcgggtgggcctcccgtttctaaagcacacactatggatgcacagcaggacagacccaagtcccaagactgcctggacctagtggcccccctagcatctgctgcagaggtccccgctacagctcccgtgtctgggaagaagcacagaccaccaggacccctgttctcctcctcagatccccttccggccaactcttcccactcccgggactcagcccaggtcacctcgatgattcctgcccccttgacagctgcaagcagggatgccggcatgagaagaacaagttcggctcctgcacctgccgcagcagcccctcccccctccacattgaaccccacgtcggggtcactactcaatgcagtggatggaggcccctcacatttcttgtcctcagccacagctgcagcacgtgtccagaggtcagaagtgagatataaccagagatcccagacctcccggaccagatcgtgcctcaaacgaaatgccagctccagctcccacagctctacggaaggcctccaagaagtaaagcggaggagggggccagcctcatcccactgccagctggcccacagttcctcaaacacagtgagtgaggatggacctcaggctgtctcttcgggtcaccgctgtgaaaacaaggcaggtacagcaccagggcagacactcgcccccaggggtggctcccccagatcccaggcctctaggccccacatcaacagtgcactgcacgttgaggacaaggccatctcggactgcagaccctcacggccttcccacactttgtcctcacttgcaacaggggcttcgggtgggcctcccgtttctaaagcacccactatggatgcacagcaggacagacccaagtcccaagactgcctgggcctagtg

SEQ ID NO: 33819 - DNA, 2300 bp, Homo sapien
gggggccagtaggcccaggcagtcttgggacttgggtctgtcctgctgtgcatccatagtgggtgctttagaaacgggaggcccacccgaagcccctgttgcaagtgaggacaaagtgtgggaaggccgtgagggtctgcagtccgagatggccttgtcctcaacgtgcagtgcagtgttgatgcggggcctagaggcctgggatctgggggagccacccctgggggcaagtgtctgccctggtgctgtacctgccttcttctcacagcgggtgtgacccgaagagacagcctgaggtccgtcctcactcactgtgtttgaggaactgtgggccagctggcagtgggatgaggctggccccctcctccgctttagttgcgggaggccttccgtagagctgtgggagctggagctggcatttccttggaggcaggatctggtccgggaggtctgggatctctggttatatctcacttctgacctctggacacgtgctgcagctgtggctgaggccaagaaatgtgaggggcctccatccactgcattgagtagtgaccccgacgtggggtgcaatgtggaggggggaggggctgctgctgcagctgcaggagccgaggtgccaggccttgttcttctcatgccggcatcgctgcttgcagctgtgaagggcgcgggaatcagcgaggtgacctgggctgagtcccgggagtgggaagaggtggcaggaaggggatctgaggaggagaacaggggtcctggtggtctgtgcttcttcccagacacgggagctgtagaggggacctctgcagcagatgctaggggggccagtaggaccaggcagtcttgggacttgggtctgtcctgctgtgcatccatagtgggtgctttagaaacgggaggcccaccggaagcccctgttgcaagtgaggacaaagtgtgggaaggccgtgagggtctgcagtccgagatggccttgtcctcaacgtgcagtgcagtgttgatgcggggcctagaggcctgggatctgggggagccacccctgggggcgagtgtctgccctggtgctgtacctgccttgttttcacagcggtgacccgaagagacagcctgaggtccgtcctcactcactgaggaactgtgggccagctggcagtgggatgaggctggccccctcctccgctttacttcgtggaggccttccgtagagctgtgggagctggagctggcatttcgtttgaggcacgatctggtccgggaggtctgggatctctggttatatctcacttctgacctctgggcacgtgctgcagctgtggctgagcccaagaaatgtgcggggcctccatccactgcattgagtagcgaccccgacgtggggttcaatgtggaggggggaggggctgctgcggcagctgcaggagccgaggtgccaggccttgttcttctcatgccggcatccctgcttgcagctgtgaaggtggcaggaatcagcgaggtgacctgggctgagtcccgggagtgggaagaggtggcaggaaggggatctgaggaggagaacaggggtcctggtggtctgtgcttcttcccagacacgggagctgtagaggggacctctgcagcagatgctaggggggccactaggcccaggcagtcttgggacttgggtctgtcctgctgtgcgtccatagtgggtgctttagaaacgggaggcccaccggaagcccctgttgcaagtgaggacaaagtgtgggaaggccgtgagggtctgcagtccgagatggccttgtcctcaacgtgcagtgcactgttgatgtggggcctagaggcctgggatctgggggagcctcccctgggggcgagtgtgtgccctggtgctgtacctgccttgttttcacagcggtgacccgaagagacagcctgaggtccgtcctcactcactgtgtttggggaactgtgggccagctggcagtaggatgaggctggccccctcctccgctttagttcctggaggccttccgtagagctgtgggagctggagctggagctggcatttcgtttgaggcaggatctggtccgggaggtctgggatctctggttatatctcacttctgacctctgggcacgtgctgcagctgtggctgaggccaagaaatgtgaggggcctccatccactgcattgagtagtgaccccgacgtgttgttcaatgtggatgggggaggggctgctgcggtagctgcaggagccgaccttgttcttctcatgccggcatccctgcttgcagctgtgaaggtggcaggaa

SEQ ID NO: 33820 - DNA, 2300 bp, Homo sapien
ggtgggtcacgcctgtaatcccagcagtttgggaggctgaggtgggtggatcacccgaggtcaggagttcgagaccagcctggtcaacaggtagtgaatcctgtctctactaaaaatacaaaaattagctgggcatggtggtggacgtctgtaatcccagctaccaggtaggctgaggcaggagaatcgcctcaggtgaaccaggaggcagagattgcaatgagctgagataatgccactgcattccagcctgggctacagaatgagactctgtatctcaacaaaacaaaacaaaacaaaaacacaacagtctgttctgtggaggccttgggcagatgctgggagctctgagcacggactggtccctctgttgggagcctcttcccttcatccctcctggttaacttgactcagcataaaggccatttcttctaagagcctgtccctgactctccaatcggggatgtgtctgttgtctcatagagtgcccaattcctgccaccacttgtcatttccattcgcaacatttctttcattgtttgtttttcagagtcagggtctcactctgttgcccaggctggagtgcagtggtgcaatcatagctcgttgccatctcgacctcctgggcttaagcgatcctccccactcagcctcccaaatagctgggaccacagacgtgcgctgccttgccaggctaaattttaatatttttttttccccacgagtcagagtcttgctctgtctcccaggctggagagcagtgttgcgatcttggctcactgcatcctctacctcctgggtacaaacagttctcctgcctcaccctcccgagtagctgggattacaggctcacgccaccatgcccagctagttttcttctttattttttgttgagatggggtttcaccatgttggccaggctggtctcgaactcttgagctcgtgatccacctgccttggcctcccaaagtgctcacaggcttgagccaccatgcccggccctaatttttaaatttgttgtagaaacaaggtcttgctatgttgtccaggctggtctcaagcgcctggtctcaagtaagcctcccaaagtgctggggttctaggcttgagccacctcgcctggcacttgcaccgtttttctgtgcatgcatctccactcccactgcccaggacctgtggacttagatttgagtcattactgagcacctagcacccagcctcatgcctccctcccacctcgcactacctgtttgcttgatgcattaataaatattccacctgaatccacagcccattcactcctgtgttcaagagctatttcaggaagtgaacctcatttctggcagtgttcagtccagtgacctcagctctgtgtacccggcagggtggctacgcctctgggggagttggattcaggggtgggggagaaagagtgttgttagagagctcggtctaggactagaggaacgtgcccttatgtaaaatacatctcaagttagggaagaaagcagcggctctgtgctttgttgtttttttttttttttcttttctttctttctttttttttgtttgtttgtttgtttgtttgtttgtttgtttgtttgttttggggcagggtcttgctctgtggcccaggctggagtgcagtagcgtgatttcggctcactgcaacctccacctcccgggttcaagcaattcttgtgcctcagcctcccgagtagctggagttacagatgcgtgccactaagcctggctaatttttgtatatttagtagaaatggggttttgccatgttggccaggctgttcttgaacccctgacctcagtgatctgcctgcctcagcctcctgaagtgctgggattacaggcgtgagccatcgtgcctggcccccagttgtgttctggcaggggaagatgggacagagaggatgggaggttgtctgagcctttcccggactgacggaacctgtgtcttctctcttttgtggacaggatggtgattgctcacaccaaagccttggacccctcccagcctgtgacctttgggaccaactccacctacgcagcagacaagggggtgagcctgggggtccccaccccatttctccctgcctttgcctgggcttgtcctgaagcctgctcatgggaacagctggaaagaaccatgtgctgccagtctgagctttttattttgttttacttagaaagatagagacagggtcttgccatgttgcccaggctggtctcgaactcctgggctcaagtgatcctcctgcctcggccttccaaagggctggggt

SEQ ID NO: 33821 - DNA, 2300 bp, Homo sapien
gaattaccagatctccgtcaagtgcagtaaccagttcaagttggaagtgtgtcttttgaatgcagaaaacaaagtcgtggacaaccaggctgggacccagggccagctgaaggtgctgggtgccaacctctggtggccgtacctgatgcacgaacaccccgcctacctgtactcgtgggaggtaatggtggtttgggacttgcgtaagggaggtcttttgcccccatctggtagccctggcttcagcaggagcccaggacaggtgaacgggcaggtgtggtcctctgagctttctgatgtttcccacccttggtgggaggcccagattttttatttatttatttatttatttatttatttgtttgtttgtttttgtgatggtctcactctgtcacccaggctggaatgcaatggcctgatcacagctcactgcagctttgagctgcaatcctcctaccttggcctcctgagtagctgggactacaggcacatgccaccatgcctggctaattaaaaaaattttttttgtaggccgggcatggtggctcacacctgtaatcccagcacttcgggaggctgacgcgggcggatcactttaggccaggagttggagaccagcctggccaacatggtgaaaccccgtctctactaaaatatgaaaatttgcagggcatgatggtgcacgtctgtaatcccagctactcgggaggctgaggcaggggaattgcttgaacccaggaggcaggggctgcggtgaattgagatcatgccgcagcactctatcctgggtgacagagtgagactgtctcaaaaaaaaaaaactcctttttatagagttggggtcttactaggttgcccaggctggtcttgaactcctggactcaggtgatcctcctgccttagcctcccaaagtgtagggattccaggcatgagccacctcgtctggtcaaggagaaggcctgattttgaagggcaggtcccagggtcagccagtgaagggcagagcctctggttgctgcttctctgcaggcccagtggcgacttctggggtgcatgcacgaggggtcttcctgctgtagggcaggccagatggggctcaggctgtcggggcgctcacacctggcgctttggctgtcgtaggtgcggctgactgcacagaagtcactggggcctttgacttctacacactccctgtggggctccgcactgtgcccgtcaccgagagccagtgggtgagagccagtttcatttgcggtagaggcagcagaggttgtagaaatgctccttgaggcagatgccacaccccaatttcatggagtgatttgggctgagccgagtctgcagcaggcagaaggctctgagatgttgtcctagcctgggcaaaggacaattcagagctcgggggaataggggtgtgctcagcacgactgggtggacaggccgtttgttgtgaatcgtacaggcttccaggagcgggtgcctgaggcttccagacaggctttgggaggtggccagaggagatgcctgtttccggggcaggaaatggagggagggcccaggctggagaggttcagccaggctgtcacaaggctttgaagcttcccatctgagagcctggctattggagagtgtgggtttggaacttgaggctaggaggttctattctgtcctgtgccagccacagccttcggatgggcagagcaatgatggggggaagatgtaaaagaaaagaactgaggaaagaagaagaaaaccagcttcaacaacggtctaggccggatgcggtgggtcacgcctgtaatcccagcagtttgggaggctgaggtgggtggatcacccgaggtcaggagttcgagaccagcctggtcaacaggtagtgaatcctgtctctactaaaaatacaaaaattagctgggcatggtggtggacgtctgtaatcccagctaccaggtaggctgaggcaggagaatcgcctcaggtgaaccaggaggcagagattgcaatgagctgagataatgccactgcattccagcctgggctacagaatgagactctgtatctcaacaaaacaaaacaaaacaaaaacacaacagtctgttctgtggaggccttgggcagatgctgggagctctgagcacggactggtccctctgttgggagcctcttcccttcatccctcctggttaacttgactcagcataaaggccatttcttctaagagcctgtccctgactctccaatcggggatgtgtctgttgtctcatagagtgcccaattcctgccaccacttgtcatttcc

SEQ ID NO: 33822 - DNA, 2300 bp, Homo sapien
tccagaccagcctggacaacctggcgaaaccccgtctctactaaaaatacaaaaattagcccagcgtggtggcgggtgcctgtaatcccagctactcaggatgctgaggcaggagaatcgcctgaacccgggaggcagaggttgtagtgagccgagatcataccactgcactctccagcttaggtgacagagcgagactctgtctcaaaaaaaaaaaaaaaaatatttgaattttgtttaaatcgctaacacatactgggcatttaataacaaaaaaaaaggacatgagattgtgatccttatgaaggtttgagaggcatttcactagggttcaacatacagcagtctgaaacatactgtaataatttaatccaatggctcatctacagcacctaaaaagattacagcagattctcattattcagtgtagttacggtctagaaagttccatgaacaaataaaaagttaggtttcagcaagctactggtcacacttttgtaagcttaccaacacctacttttgttgtatgtgtgcttatttaatatatattgttggccaggcacagtggctaacgcctgtaatcccagcactttgggaagccaaggcgggcagatcatttgaggtctggagttcgagaccagcctggccaacgtggtgaaaccccgtctctactaaaactacaaaaaaaaaaaaaaaaaattagccaggcatggtggcgcatgcctgtagtcttagctacttgggaggcgaaggcaggggaatcgcttgaacccaggaggcagaggttgcagtgagccaagactgcaccactgcactccagcctgagcaacagagtgagactctatctcaaaaaaaaaataataataattaattaaatgaagaataaataaataatatacattgttcattcattaacattgaactcacagccaacggcactacagcactcacgcctgaatggagtttatttaatgcatgtattttctctgtaagacacatcacagacttcttggacttgtgaatgctaagcagcacttcagcactatgcttgggggttaatttaaatggcaaaacaaccaacaaacagtacaaaaacaggaaaagcatggcattaaatagaccacaaaaaggatacctgactattgtatgagagctgaaaaagaaggcagaatatcatcctgttcaaactcaaattctttgacactctgcgcaaacacatgactatgaaagtgctgtgagtactgatttgggggttacaaaaaatagtaggtgagttcacaaatacaaaagctgaaaacaaggaggatcgactgtattttcgtagacaatctaatctcagaagatttcagttcagacaaaaatcatgataattactgtattacaaaagggcactagataggggggaaagagtaaaaatcacaattaaaacaaaggttcaaaattctgcagcaaccatatccagttacactttaatatgtttgcggcagactacattattgttcccaactcatcacccctccctatatctaaaacctttccccaagacaatgcagttcctcctgctagagatcaggtatatttatctatactatcaatgttagccatggacaaggtatgtgctttggctgactgaatgttagtggacatgagagaagcaatggcttaaaatgtacttccagaactggagtttccttgtgattctatcactgtgacagaaacacattctcaggtagtccactgatccaagggggaacaaacacacagaaaacatacctagactctatctgcagcttgcagcctcaccaagccaacaacagtcaactcacagatatgttagcaaaaataaatgtttttcgtaccttaagttttatataattattgacctgcagttaactgatatacaatatacattaatcttaaaatatcagtatcccattaaaaatatttacattaaaaactgagaccactttctttcctcctttttttttttttttttttttttaaattaagagacagggtgtctcaatgttgcccaagctggagttcagtggctagtggctattcacaagaacgatcatcgcacactacctcaaactcctgggatcaagcaatcctcctgcctcagctttccaagtcgctgggactataagtgtgtaccacagcatgtcagctctctctctccttcttgacctaaagcctagcataaaattagctaagtagaatgtttccaatgatggctgcatcagtatctcccatcccacataatttctgtttgattttgccattcacccataaaatgg

SEQ ID NO: 33823 - DNA, 2300 bp, Homo sapien
gcagcttgcagcctcaccaagccaacaacagtcaactcacagatatgttagcaaaaataaatgtttttcgtaccttaagttttatataattattgacctgcagttaactgatatacaatatacattaatcttaaaatatcagtatcccattaaaaatatttacattaaaaactgagaccactttctttcctcctttttttttttttttttttttttaaattaagagacagggtgtctcaatgttgcccaagctggagttcagtggctagtggctattcacaagaacgatcatcgcacactacctcaaactcctgggatcaagcaatcctcctgcctcagctttccaagtcgctgggactataagtgtgtaccacagcatgtcagctctctctctccttcttgacctaaagcctagcataaaattagctaagtagaatgtttccaatgatggctgcatcagtatctcccatcccacataatttctgtttgattttgccattcacccataaaatggtgggatctacctcccctccttgcaaatttgagctggccctctgatcctgtctaagatctgaagccagatattaaggtacttcattaatttccatgtttgtcctctatgcaacctagcaatcaagcaagaagtcaaaacatactgacatagtttggatgggtccccacccaaatctcaccttgcattgtaataattcccacgtgtcaagggtggggccgggtgcagataactgaatcatggggatggttccccccatactgttctcgcggtagtgactaagtctcatgagatctgatggttttataaatgggagctcccctgcacatgctctctcctgcctgccactatgtgagacatgcttttgcacctccttgccttccaccatgattgtgaggcctccccagccatgcagaactgtgagtcaattcaacctctttcctttataaattacccagtctcaggtatgtctttatttgcagtgtgagaacagactaatacaataagttgataccagtagagtggggtgctgctgtaaagatacccgaaaatgtggaagcaactttggaaatgggtaacagggagaggctggaacagtttggaaggctcagaagaggataggaaaatgtgggaaagtttggaacttcctagagacttgttgaatggctttgaccaaaatgttaatagtgatatggacaacaaggtccaggcggaggtggtctcagaggcagatgaggaatttgttgggaaatggagtaaagtcactcttactatgcaaagacactgcaggcattgtgcacctgtattagaaacgggcataagataggcgggaaagagggaaaataagaatttttttctagagttccctacagatctgtggaactttgaacttgagagagatgatttaaggtatctgacacaagaaatttctaagcagcaaagcattcgagaagaagcagagcataaaagttcagaaaatttgtaccctgatgatgcaacagaaaagaaaaatctattttctcaggagactgggttgtagaaatttgcataagtaatgaggagccaaatgttaatcaccaagacaatggggcaaatgtctccagggcatgttagagaccctcacagcagaccctcccatcacaggccaggaggcttagaaggaaaaatggttttgtgggtccagaaccccctgctgtgtgcagcctaggaacttggggccctgcatcccagctgctcctgccataggtaaaaggggccaaggtacacctcaggccatggcttcagagggtgcaagttccaagcctttcaggttctaggtggtgttaagcctgcagatgcaccgaagtcaagaattaacgttcatgaacctccgcctacatttcagaagatgtatgaaaatgcctggaaatccaggcaaaagtttgctgtgggggggaggggaggggagggggggccctcatggataacctctgctagggcagtgtcaaagggaaatatggggttggagcttccacacagagtccccactggggtactgccaagcagagctgtgagaaaagggccaccatcctccagaccccagaatggtagatccactgacagcttgcactgtgtgcctggaaaagctgcagacactcaatgcagccagaaggggggctgtaccctgcaaagccacaggggcggggctgcccaagaccctgggaacccacttcttgcatcacctagatgtgacacatggagtcaaaggaggtcattttggagctttaagatttgcctgctgggttttgga

SEQ ID NO: 33824 - DNA, 2300 bp, Homo sapien
gctttttaaatatttaacagtatcaataatttttcaggttctgtgagaattttataatttataatttgcagacttaatgtataatctattttgtcctaacaattacaaatatattttttatttcagattgtatatattcctaccagatggagataattacagctttaaaaatttttattttttcattttatttcacacattgacattaaatttttatggacacataataactgtacatatatatggggtagaatgtgatgttttaatacatgtactcaatgtgtaatgatcaaatcagggtaatttgcataatgatttttctgtagggagaaaattcaaaatctactcttctggctattttcaaatatataatatgttattgttaactatactcatcctactatgcaataggacaccagaacttattcctgggttctacatccgttaaggcaaccaaggattggaaatattggaaaaaaaaattgcgtctgtactgaacatgtacagacttttttcttgtccttattccttacacaatatagtacaataactatttgcatgacatttacatcggatattatgagtgatctagagttgatatgaagtatatgggaggatgtgcaaaggtgatgtgcaaatactatgtcattttatatcagggacttgagtatcctttgttaccctcaggagatcctgaaaccagtcccccatggatactgagggctgactgtatagtcctatcctcacggaactttcattctaatgggggaagactgactataaacaaaatgtatgtaataggtggtggtaagtaccgtggagaagtaacaaacggggcaaagtgagttatacagctccattcttagaaaccttggagtacttttcttagtttatactcgtggtggtttccttttgtctcctttattacatgggactctgacatgtgcccatagctagggtgacagtaggatctacccgatagtagggtggcagtaggatctacccaaaaagcatcctgctgatacaggaccaaagcatcctgttgttctcgagcctataaaaagagctaatggtcttgcttctcttaactgtggcctcctacactgtgttttggatgattggtgatgtcttggatattctgtttctttggaactttgaatatacaacactttactagggaattagcaatggaagcagagcaaagatgtacagaggaaacaatgcgtaactctgatggaattgaagtcatgaggcagcagagagcttaaattacagctttaaaaatttttattttttagagggaatttacttgggagtaacagcagtaatagttaacggagccagaatgcttgagtcatataattgcaaagcagagttgggagcaacagatgctaaagagtagttgctgtagttcctctgtgggtcgtaggagcagttgtcatattactatatagctactgcatgaagaagagttcttagtgaggcctgggtgaacagctcttcttagtattctgtgtgaccccatttgaccttttaacaaatccctaagtaaataaatagcccctcaggaaaactaagtttttctctgctgtttttttgcttgagagagctataactgtaatagacttatatttctgaacattttagtgcttgccaatatttggtaatatttatgtttcctatatttgtaatgaacattcttcttccggtacattttttgttaaattattgtttgatggataaaagttcaccttttattgtataaaattgactgagattaatttatacacattgacaatgggtaaatagaatttttcagattattaaaagctgaaggatgcccacgtaagcaaaaaaaaaaaaagaaaaaaccaacaaaaataaacccaaacccctcaaacaatttcgaacacgaaacattcttctgatgccggcatccctgcttgcaggtgtgaagggggcaggaatcagcgaggtgtcctgggctgagtccccggagtgggaagaggtggcaggaaggggatctgaggaggagaacaggggtcctggtggtctgtgcttcttcccagacacgggagctgtagaggagacctctgcagcagatgctaggggggccagtaggcccaggcagtcttgggacttgggtctgtcctgctgtgcatccatagtgggtgctttagaaacgggaggcccacccgaagcccctgttgcaagtgaggacaaagtgtgggaaggccgtgagggtctgcagtccgggatggccttgtcctcaacgtgcagtgcactgttgatgcgctgga

SEQ ID NO: 33825 - DNA, 2300 bp, Homo sapien
gaagtaatgcaatacgtatttatgttctaagtgttaatttccttggatataaaataatatcttgttcctttgattctcttacatataagtgtatttactcagatattactccaaatacaccagatatattcaaagttgaaaaaatatatactttggaatgtattatcaccttatttcacatgaagaaatcaaaatctctggcatccaagtgcattccagcctgaaaaaaattatgcaattgtgaatttaacagaaagcaaattgctcacatatggagtcaacgtgaagctatatcaatatttattaaaagtttatatattacttttgatcccctggagagaaatacaaaattcaaataattattctatttttatatcccaatttgtaattatgaaactctagcattttaatttttctctttcaagtttacctgaagcttcacaaaattctgtgaggaatctattataacaggtattttgcttatttccacacaaacagaaggaaatgtgtattttctatgccctgaagaatttactcttttctgtaaatgacatatggtagttaattctttttggtaataaaatattcctgtttttaggccgaacagccttttctttaaattcagggcaacatatcaaagctttgccgtaataatacagagtaatcgactaaagtaatatagaatttaaataacaaagagtttaaacaatttaatatgtcttctattaatttcaaactgaaattttacagaaattatttggaatatgctgccagagtacacacacacacacacacacacacacacacaatcacacgctcacatcacacactcacacccagctaaaggaaattaccacagctataatgatttcattaaatatctgaaattaaagtttcttttggattttcagctgaagctcatagtaaataaaagtaatatgatcattgttgcatactgtgaatcaacagcacccagaaaccttcgactttctatatttacacagcttaattatccgaactgaaacctgaggccatctgtgtcaacatgatttcacaattcattccagaaaattatttttcaggaaagtaaggctgcaaaccaataaataacttattgtttgcttcaggaaatttctgcaaatcaatttatgtcagtaagcaactctcctctgggccaacagattgctcacctgggcaggtagcagcttgtgtcaattaacagtttacttatgaagacttctgtcatggcccttaactcacagtgtcccccaatcctaaactctatgtcctgaacattacctattcttatcagtcattggtcttgaaaggccccgggcaaccatttgagcccagacttcaatactctatcaataccaccttatcatctacttttctaacatgacccctcaaggtggtgaccccacctacagtcgtcttttattgaatttagctttccctaatcaacatgctagtctattggatgcagtgtcggaggcaaaaatcacagaggttctgaaagcatcagcccatggttttctaaacatcatggttcaagacccttaacacgaaacagaaagtttccccgaggcgccgtaaacaacccatttgggcgcttccctgataattatagtgaaatctggcatctaattttttttggtggactctcaaattttatatttatgttttgattcctagaaataaaaaatgtttttataaggaattctttgatcgtttatgttttattcttgatagaaacctactactttataacttcgtttatgttttactcttgatagaaacctactactttataacttcgaacattattgatgttcttcctgtatttctgagaggtgacagcttgctggcatccctcgctggctctcggcacctcctcggcctcagcccactctggccgcgcttgaggagcccttcagcccgcagctgcaccgtgggagcccctctctgtgctggctgaggcctgagcgggctccctctgctggcggggaggtgtggagggagaggcgcgggccggaacctgggctgcctgcggggctcgcaggtccagcgcgacttccgggtgggcgcgggctcggcgcgacttccgggtgggcgcgggctcggcgcgccccgcactcttgagcggtcggctggcgccgccggccctgggcagtgagaggcttagcacccgggccagcagctgcggagggtgcactgggtcctccaacagtgatggcccgccggcgccgcgctcgaattttcgctgggcctcagccacctccccgcggggcaagggggca

SEQ ID NO: 33826 - DNA, 2300 bp, Homo sapien
taatatgaagtaatgcaatacgtatttatgttctaagtgttaatttccttggatataaaataatatcttgttcctttgattctcttacatataagtgtatttactcagatattactccaaatacaccagatatattcaaagttgaaaaaatatatactttggaatgtattatcatcttatgtcacatgaagaaatcaaaatctctggcatccaagtgcattccagcctgaaaaaaattatgcaattgtgaatttaacagaaagcaaattgctcacatatggagtcaacgtgaagctatatcaatatttattaaaagtttatatattacttttgatcccctggagagaaatacaaaattcaaataattattctatttttatatcccaatttgtaattatgaaactctagcattttaatttttctctttcaagtttacctgaagcttcacaaaattctgtgaggaatctattataacaggtattttgcttatttccacacaaacagaaggaaatgtgtattttctatgccctgaagaatttactcttttctgtaaatgacatatggtagttaattctttttggtaataaaatattcctgtttttaggccgaacagccttttcatttaaattcagggcaacatatcaaagctttgccgtaataatacagagtaatcgactaaagtaatatagaatttaaataacaaagagtttaaacaatttaatatgtcttctattaatttcaaactgaaattttacagaaattatttggaatatgctgccagagtacacacacacacacacacacacacatcacacgctcacatcacacactcacacccagctaaaggaaattaccacagctataatgatttcattaaatatctgaaattaaagtttcttttggattttcagctgaagctcatagtaaataaaagtaatatgatcattgttgcatactgtgaatcaacagcacccagaaaccttcgactttctatatttacacagcttaattatccgaactgaaacctgaggccatctgtgtcaacatgatttcacaattcattccagaaaattatttttcaggaaagtaaggctgcaaaccaataaataacttattgtttgcttcaggaaatttctgcaaatcaatttatgtcagtaagcaactctcctctgggccaacagattgctcacctgggcaggtagcagcttgtgtcaattaacagtttacttatgaagacttctgtcatggcccttaactcacagtgtcccccaatcctaaactctatgtcctgaacattacctattcttatcagtcattggtcttgaaaggccccgggcaaccatttgagcccagacttcaatactctatcaataccaccttatcatctacttttctaacatgacccctcaaggtggtgaccccacttacagtcgtcttttattgaatttagctttccctaatcaacatgctagtctattggatgcagtgtcagaggcaaaaatcacagaggttctgaaagcatcagcccatggttttctaaacatcatggttcaagacccttaacacgaaacagaaagtttccccgaggcgccgtaaacaacccatttgggcgcttccctgataattatagtgaaatctggcatctaattttttttggtggactctcaaattttatatttatgttttgattcctagaaataaaaaatgtttttataaggaattctttgatcgtttatgttttattcttgatagaaacctactactttataacttcgtttatgttttactcttgatagaaacctactactttataacttcgaacattattgatgttcttcctgtatttctgagaggtgacagcttgctggcatccctcgctggctctcggcgcctcctcggcctcagcccactctggccgcgcttgaggagcccttcagcccgcagctgcaccgtgggagcccctctctgtgctggctgaggcctgagcgggctccctctgctggcggggaggtgtggagggagaggcgcgggccggaacctgggctgcctgcggtgctcgcaggtccagcgcgacttccgggtgggcgcgggctcagcgcgacttccgggtgggcgcgggctcggcgcgccccgcactgttgagcggtcggctggcgccgccggccctgggcagtgagaggcttagcacccgggccagcagctgcggagggtgcactgggtcctccaacagtgatggcccgccggcgccgcgctcgaattttcgctgggcctcagccacctccccgcggggcaagggggca

SEQ ID NO: 33827 - DNA, 2300 bp, Homo sapien
agactctatctgcagcttgcagcctcaccaagccaagaacagtcaactcacagatatgttagcaaaaataaatgtttttcataccttaagttttatataattattgacctacagttaactgatatacaatatacattaatcttaaaatatcattatcccattaaaaatacttacattaaaaactgagaccactttctttcctttttttttttttttttttaaattaagagacagggtgtctcaatgttgcccaagctggagttcagtggctagtggctattcacaagaacgatcatcgcacactacctcaaactcctgggatcaagcaatcctcctgcctcagctttccaagtcgctgggactataagtgtgtaccacagcatgtcagctctctctctccttcttgacctaaagcctagcataaaattagctaagtagaatgtttccaaagatgcctgcatcagtatctcccatcccacataatttctgtttgattttgccattcacccataaaatggtgggatctacctcccctccttgcaaatttgagctggccctctgatcctgtctaagatctgaagccagatattaaggtacttcattaatttccatgtttgtcctctatgcaacctagcaatcaagcaagaagtcaaaacatactgacatagtttggatgggtccccacccaaatctcaccttgcattgtaataattcccacgtgtcaagggtggggccgggtgcagataactgaatcatggggatggttccccccatactgttctcgcggtagtgactaagtctcatgagatctgatggttttataaatgggagctcccctgcacatgctctctcctgcctgccactatgtgagacatgcttttgcacctccttgccttccaccatgattgtgaggcctccccagccatgcagaactgtgagtcaattcaacctctttcctttataaattacccagtctcaggtatgtctttatttgcggtgtgagaacagactaatacaataagttgataccagtagagtggggtgctgctgtaaagatacccgaaaatgtggaagcaactttggaaatgggtaacagggagaggctggaacagtttggaaggctcagaagaggataggaaaatgtgggaaagtttggaacttcctagagacttgttgaatggctttgaccaaaatgttaatagtgatatggacaacaaggtccaggcggaggtggtctcagagggagatgaggaatttgttgggaaatggagtaaagtcactcttactatgcaaagacactgcaggcattgtgcacctgtattagaaacgggcataagataggcgggaaagagggaaaataagaatttctttctagagttccctacagatctgtggaactttgaacttgagagagatgatttaaggtatctgacagaagaaatttctaagcagcaaagcattcgagaagaagcagagcataaaagttcagaaaatttgtagcctgatgatgcaacagaaaagaaaaatctattttctcaggagactgggttgtagaaatttgcataagtaatgaggagccaaatgttaatcaccaagacaatggggcaaatgtctccagggcatgttagagaccctcacagcagaccctcccatcacaggccaggaggcttagaaggaaaaatggttttgtgggtccagaaccccctgctgtgtgcagcctaggaacttggggccctgcatcccagctgctcctgccataggtaaaaggggccaaggtacacctcaggccatggcttcagagggtgcaagttccaagcctttcaggttctaggtggtgttaagcctgcagatgcaccaaagtcaagaattaacgttcatgaacctccgcctacatttcagaagatgtatgaaaatgcctggaaatccaggcaaaagtttgctgtgggggggaggggaggggggggccctcatggataacctctgctagggcagtgtcaaagagaaatatggggttggagctcccacacagagtccccactggggtactgccaagcagagctgtgagaaaagggccaccatcctccagaccccagaatggtagatccactgacagcttgcactgtgtgcctggaaaagctgcagacactcaatgcagccagaaggggggctgtaccctgcaaagccacaggggcggggctgcccaagaccctgggaacccacttcttgcatcacctagatgtgacacatggagtcaaaggaggtcattttggagctttaagatttgcctgctgggttttgga

SEQ ID NO: 33828 - DNA, 2300 bp, Homo sapien
atcccagctactcaggatgctgaggcaggagaatcgcctgaacccgggaggcagaggttgtagtgagccgagatcataccactgcactctccagcttaggtgacagagcgagactctgtctcaaaaaaaaaaaaaaatatttgaattttgtttaaatcgctaacacatactgggcatttaataacaaaaaaaaaaggacatgagattgtgatccttatgaaggtttgagaggcatttcactagggttcaacatacagcagtctgaaacatactgtaataatttaatccaatggctcatctacagcacctaaaaagattacagcagattctcattattcagtgtagttacgatctacaaagttccatgaacaaataaaaagttaggtttcagcaagctactggtcacacttttgtaagcttaccaacacctacttttgttgtatgtgtgcttatttaatatatattgttggccaggcacagtggctaacgcctgtaatcccagcactttgggaagccaaggcgggcagatcatttgaggtctggagttcgagaccagcctggccaacgtggtgaaaccccgtctctactaaaactacaaaaaaaaaaaaaaaaaaaaaaaattagccaggcatggtggcgcatgcctgtagtcttagctacttgggaggctaaggcaggggaatcgcttgaacccaggaggcagaggttgcagtgagccaagactgcaccactgcactccagcctgagcaacagagtgagactctatctcaaaaaaaataataataataattaattaaatgaagaataaataaataatatacattgttcattcattaacattgaactcacagccaacggcactacagcactcacgcctgaatggagtttatttaatgcatgtattttctctgtaagacacatcacagacttcttggacttgtgaatgctaagcagcacttcagcactatgcttgggggttaatttaaatggcaaaacaaccaacaaacagtacaaaaacaggaaaagcatggcattaaacagaccacaaaaaggatacctgactattgtatgagagctgaaaaagaaggcagaatatcatcctgttcaaactcaaattctttgacactctgcgcaaacacatgactatgaaagtgctgtgagtactgatttgggggttacaaaaaatagtaggtgagttcacaaatacaaaagctgaaaacaaggaggatcgactgtattttcgtagacaatctaatctcagaagatttcagttcagacaaaaatcatgataattactgtattacaaaagggcactagatagggggaaaagagtaaaaatcacaattaaaacaaaggttcaaaattctgcagcaaccatatccagttacactttaatatgtttgtggcagactacattattgttcccaactcatcacccctccctatatctaaaacctttccccaagacaatgcagttcctcctgctagagatcaggtatatttatctatactatcaatgttagccatggacaaggtatgtgctttggctgactgaatgttagtggacatgagagaagcaatggcttaaaatgtacttccagaactggagtttccttgtgattctatcactgtgacaaaaacacattctcaggtagtccactgatccaagggggaacaaacacacagaaaacatacctagactctatctgcagcttgcagcctcaccaagccaagaacagtcaactcacagatatgttagcaaaaataaatgtttttcataccttaagttttatataattattgacctacagttaactgatatacaatatacattaatcttaaaatatcattatcccattaaaaatacttacattaaaaactgagaccactttctttcctttttttttttttttttttaaattaagagacagggtgtctcaatgttgcccaagctggagttcagtggctagtggctattcacaagaacgatcatcgcacactacctcaaactcctgggatcaagcaatcctcctgcctcagctttccaagtcgctgggactataagtgtgtaccacagcatgtcagctctctctctccttcttgacctaaagcctagcataaaattagctaagtagaatgtttccaaagatgcctgcatcagtatctcccatcccacataatttctgtttgattttgccattcacccataaaatggtgggatctacctcccctccttgcaaatttgagctggccctctgatcctgtctaagatctgaagccagatattaaggtacttcatt

SEQ ID NO: 33829 - DNA, 2300 bp, Homo sapien
gcgatccacctgccttggcctcccaaagtgctggaattacaggcatgagccaccatacccagccccagttctgaattcttaagaaactcgagagggtctaggtgagcattgatagaacctctgcagtgctgggtgtgctggctcacacctggaatgctagccctttgggagaccgaggtcagaggatctcttgagcccaggagtttgagaccagtctgcacaacatggaccccatctctacaaaatatttaagatgagttgtggctgggtgcagtggctgacgcctgtaatcccagcactttgggaggctgaggtgggtggatcacgaggccaagagttcaagtccagcctgaccaagatggtgaaaccccgtctctactaagaaaacacagaaattagctgggtgtggtggcatgcacctgtaatcccagctactcaggaggctaaagcaggagaatcgcttgaactggggaggtggaggttgcagtgagccgagattgtgccactgcactccagcctgggcgacagagcaagagtccgtctcaaaaaaaaaaaaaaaaaatagttgggtatggtcgtgcttgcctctagtcccagctacttgggaggctgaggtaggaggactgtttgagcccagtaggtcaaggctgcagtccgccataattgcaccactgtactcccacctgggtgacagagtgagaccttgtttcaaaaaagaacctttgcaatgatggaaatgccccatgtctgcactgtctgaaatggtagccactagctacatgtggctattgaggtcttgatatatgactaggataactgaatttatttggtttaattaaaaaaaatttttttttgagacagccttactctgttgcccaggctggagtgcagtggcgtaatcacagctcactgctcaacctcctgggctcaagtgatccttcctcctcggccccccaagtagctggagccacagtcatgcgccactacacctagcgaatatttagcctttttatagagactgggttttactgtgttgcctaggctgatcttgaactcctgagctcaagtgatcctcctgcctcgacctcccaaagtgctgggattacagacctgagctaccatgcccagcctggtttagtttaatttcattttacattcattcattcattcatgagatagggtcttgttctgtcacccaggctggagtgtagtggtgcaaaccacagctttgacctccgggactgaagcagtcctcccacctcagcctcccaagtagctgggaccacaggtgtgtgcctccatgcttggctaacttttgtactttttgtaggctagtcttgaactcctaggctcaagcagtcctcccacctcggtctcccaaagtgcttggatgacagacatgagccagcgcgcctgacctaaagacatatttttccttctagtgtagttcagccttaagactgtatcagcagacagagacggaaaagtaagaaaaattgagtatcaggttatatttataaataaagcagttgctaattgatggtttttttttaaacctcctttttaattctgggttacatcattccctggctgtcgtttctttttttgtatttttttattattattattatactttaagttttagcgtacatgtgcacattgtgcaggttagttacatacgtatacatgtgccatgctggtgtgctgcacccactaactcgtcatctagcattaggtatatctcccaatgctatccctcccccctccccccaccccacaacagtccccagagtgtgatgttccccttcctgtgtctatgtgatctcatcgttcaattcccacctatgagtgagaatatgcggtgtttgtttttttgttcttgcgatagtttactgagaatgatgatttccaatttctccctggctgtctttaccctagcatcagtgagtcctgcagtccctacagcccccagtgaggacagatattttggtcaccatcaagtggatctttatttttatctaacatttacaattctgccagttcttactcttaattctctttgccttgaatcccaggatccacctctgatgttcagtgaagaggaccggaaaagtctgctagagcagtaccatctgggtctggatcaaaaacgcagaaaatacgtggttggagagctcatctggaattttgccgatttcatgactaaccagtgtaagtggcagtttagcgcatgggataatgtacccgtcctcattttttcaggttgccttgcccattctggacattttggctgtaagaat

SEQ ID NO: 33830 - DNA, 2300 bp, Homo sapien
tctgaaaaaactctgcttttagggcatagatagaagtggatgataattcacctgttcctctgctactaattgagctgctctctgtttccatggctggctcatgggatgagagaatatatctagttttttatgtttcaatttgtctctctatggcatttttgtgaaaataaggaagtgtggagacttatatatgtttctaaattataatagttcattaatgtaaagtacagacacagtcttcacttttccttcttagaccgtttaaatatggccacgaaacaagtagtctctggttggctgggcactgtggctcatgtccttaacaccaacactttgggaggccgaggcaggcaaatcacttgagatcaggagttcgagaccagcctggccaatgtggcaaaaccccatctcttctaaaaatacaaaaattagttgagtgcggtggtgcacaccggtaatcccagttactcgagaagctgaggcaggagaatcacttgaacctggaaggcagaggttgcagtgagccaagaccgcaccactacactccagcctgggcaatagagcaagactccatctcaaaaaaaaaaaaaagaaaaagaaaaaagaaaatagtctctggttaaataacctctgaaagactccaccaaaaatttcatcttagcatttctccccaaacttcaggtaaaataaaatagagttgagagaaaaatagaaaggcaagggagtacctgttcactatttttattaaaccagtgttctactttattttaggtgtatcttttcttatttaaatgtcagctaaactttctttttaagatattgaatgaaagatgcccgtccttcaggtttcgtttaagcaagaatccccattctcaaataatataatataaactttccaaattcttaagtagatcatctgagattgaaagctaagtttaactttctcaaagatattttagccgccatgacacctagacaaagtggtatattaaattctgattaatttggtcctaaagcacctaagaatcattcttactttcttatccacagcggttattaagttttcacattaaaaaaaatccaacagtgaataatactgcattggggttactgtaattgttaagtaaaataagaaatacaaatctttagttagatcacatggcacctgactactgcttagaaaatggtaagacttactacataaatcatgagtcactattgacatctactatatcatatcataggttaggtatctaattataaatagtcaaatcagctgactcaaggtggcatagctcaagcagaggaagataatacaagttgagtatggatttaacactctaaacctgtcagcactgtaggaaaagtaacttaaaactgcacaccccacttatgcataatcatcagatataaagagggtacattcctgtaatttattgttgctctagtgatcttaaagaattaagtccacattcataaagtccaaacttgtctccaaggatttgctttgactttgggagtatctggatcattaagtaatttccggaggtcagagtaaaagctttttatctctaaatattacttccctggaatattagatgtagcagaagtcagtaacggagtgacctttctcttaaacaattcatagattcactgaaattttcttcaactttaggaaaattaaatatattccacagtgctgtaagtcttaaatattgattttcctctgaaatcttgactcatcctacccaccaacattctccctttgtacactatgttctttgtaatgttcatgttacacaagtgaaaattagtaacattagtaaattttcattgcaggtttatttgttcatatttctggatatataatccattactgttaaacttcatatcaatgttccgatatttcttcatcttatgttttatgttacaaaacaggttatttcactatatgtatgtttaattgattaattcttccctttttttggaaatgaaacagcactctcaattattgggacagaaaagttatttcatagggaatacttcaaacactgatatctacaacaggcagtaagattcgtcacaacaattggtatactgtcaatataccatacaaagttccatctggtcttgattaaaaattattttagttttctcaggaaaatgatacagagggagaattgcctagattatatgagagaaaaaaaagtagagagaaacataatgttttcttagattattacagcagtgaactatttccacctggtaagaagggtgcacttgagaatggggttcaagta

SEQ ID NO: 33831 - DNA, 2300 bp, Homo sapien; identical to SEQ ID NO: 33787

SEQ ID NO: 33832 - DNA, 2300 bp, Homo sapien
acttgaacccgggaggcagaggttgcagtgagccactgcactccagtctgggtggcagagcgagactccgtctcaaaaagaaaaaaattaaaaaacaaaaagaaacctggttctatattttgtttaaatttatttttttaaccatcatgtaatatgtccacgtaatttgtttaaattttgacatcaaatgcaattgtgagaatttttatgattcagaaaaatctaagcaagctttataaaaacatacttttttttttacttttttttttttttctgagacacagcctcactctgtcgcccaggctggagtgcaggttttcatgtttatctgtgagatgtacctttggcacattactttcctgacatgagatttaaaatttttttttttatcttgtgacaatttaacttttttgacacataaaaattgtacatatttatttgtttgagatggagtcgcactctgtcactcaggctggagtgcagtggcgtgatcttggctcactgcaacctccgcctcccgagttcaagagattctcctgcctcagcctcccaagcagctgtcattacaggcctgcaccaccacacccggctgatttttgtatttttaggagaaacagggtttcaccatgttggccaggctggtcttgaactcctgacctcaagtgatccacccaccttggcctcccaaagtgctgggattataggcatgagccaccgtaccagacccctaaaaattgtatatatttaaggtgtaccatttgatgtttagatatacattgtgaaatgattacattccacatattacctctacggagttaccatttttgtacacttggtcaacatcatcccattctccccttcctccacagatatttcttgtatactatatagaagccaagggtattttgggggaagagctcaaagttcctttcgtggagttaaaaatatatatatactatgtacatataagccatttagcaaccctagatgcttaataaagaatactggaggcccggtgtggtggctcacacctgtaatcccagcactttgggaggccgaggcggtcggattacgaggtcaggagttcaagaccagcctggccaacatggtgaaaccccatctttactaaaaatacaaaaattagccgggtgtggtggtgggcgcctgtaatcccagctactcggggggctgaggcaggagaattgcttgaacctgggaggcagaggttgcagtgagctgagatcacgccactgcattccagcctgggtgacagagcaatactctgtcgcaaaaaaaaaaaagaatactggaggctgggcgaggtggctcacacctgtaatcccagcattttgggatgccagaggcgggcggaatatcttgagctcaggagttcgagaccagcctacacaatatgctccaaacgccgcctctacaaaacatacagaaactagccgggtgtggtggcgtgcccctgtggtcctagctacttgggaggttgaggcgggaggatcgcttgagctcgggaggtcgaggctgcaatgagccgagatggtgccactgcactctgacgacagagcgagactccgtctcaaaacaaacaacaaataaggttgggggatcaaatatcttctagtgtttaaggatctgccgccttccttcctgcccccatgtttgtctttccttgtttgtctttatatagatcaagcaggttttaaattcctagtaggagcttacatttacttttccaagggggagggggaataaatatctacacacacacacacacacacacacacacacacacacacactggagttcgagacgaggcctaagcaacatgccgaaaccccgtctctactaaatacaaaaaatagctgagcgtggtggcgcacgcctatagtcctagctactggggaggctgaggtgggaggatcgcttgagcccaagaagtcgaggctgcagtgagccgagatcgcgccgctgcactccagcctgagcgacagggcgaggctctgtctcaaaacaaacaaacaaaaaaaaaaggaaaggaaatataacacagtgaaatgaaaggattgagagaaatgaaaaatatacacgccacaaatgtgggagggcgataaccactcgtagaaagcgtgagaagttactacaagcggtcctcccggccaccgtactgttccgctcccagaagccccgggcggcggaagtcgtcactcttaagaagggacggggccccacgctgcgcacccgcgggtttgctatggcgatgagcagcggcggcagtggtggcggcgtcc

SEQ ID NO: 33833 - DNA, 2300 bp, Homo sapien; identical to SEQ ID NO: 33790

SEQ ID NO: 33834 - DNA, 2300 bp, Homo sapien
acataggagttaatcttcatgaccttggatttggcaatggattcttagataggacaccaaaaggaccagcaataaaagaaaaaaacagataaattggacttcgtcaaaatttaaaactttcgtgcacaaaggacattataaataaagtaaaatgacaacctatggaatgggaaaaatattttcaaactgtgtatctgataacaggttgaaatccagaatatacaaataactcttacaatgcaacaaaaacaacaacaatttttaaatgagcaaacatattttttcaaaaagtgaaaagatacttaacatcattttcatgatttgcattagagaaatgcaaatcaaaaccacaatgagataccacttcacaactactagaatggctttatgataatcacaaaacaaaatgggctgggtgaggtggctcatacctgtaatcccagcactttggaaggccaaggtgggtggatcatttgagcccaggagttcaagaccagactaggggccaggcacggtggctcatgcctgtaatcccagcactttgggaggccgaggtgggtggatcacctgaggtcaggagttcaagaccagcctggccaacatggtgaaaccccatctctactaaaaatacaaaaattagctgggtgtggtggcgggagcttgtaatcccagctacttgggaggctgaggcaagagaatggcgtgaacccaggaggcagagcttgcagtgagccgagattgcgccactgcactccagcctgggggacagagcgaggctccatctcaaaaaaaaaaaagaaagaaaaagaaaaaagaccagactaggcaacatagcaagaatctgtctctacaaaaaataaaaaattatccaggcacggtggtgcatgctggtagtctcagctactcaggaggctgaggcaggaggatcacctgagctcaagaggttgaggctgcagtgagccatgattgcaccacagcactccagcttgggcaatagagcaagacactgtctgaaaaacaacaatgaaaacaaaaacaggtcgggcactgtggctcatgcctgtaatcctagcacttcgggaggccaaggtggctggactgcctgagctcaggagttcgagaccggcttgggcaacatggcgaaaccccatctctactaaaaatacaaaagttagccaggtatggtggtgcacacctgtagtcccagctactcaggaggctgagacaggagaattgcttgaacccgagaggtggaggttgcagtgagccaagatctcgccactgcactccagcctgggtgacagaattagactctgtctccacaaaaacaaaaattaacaagtgctgaagaggatgtggagtaattggaacctttgtacatggatagtgggaatgtaagatggtgcagctactgtgcaagttcctcaaaaagttaaacatagaactaccatatgaatcagcaattctgcttctaggtatatacccaaaatgattaaaagcaagaacttaaaccgatacttataatgccagtgttcattgcagcattatttatgatagccagaaggtagaaacaacccaagtgtctctcagcagcagaatggataaacaaaatgtactatatacataccatggaatattagctataaaaaggatgaagttccttttcaaagttgatacataataattgtacatatttatggagtacatgtgaaggaatgaaattccaatataggctacaacatgatgtaccttgaacagtatgcaaagtgaaataagccagacaagtgataatgcttataaacaatatctagaagaggcaaattcatagagacagaaaatagaagagaagttatcaggggctggtgggagggaagattttttttttttttttttttttttgagacggagtctcactcggtagcccaagctggagtgcagtggcatgatctgggctcactgcaacctctgcctcccaggcttaagtgattctcatgcctcagcctcccgaatagctgggactacaggcgcatgccaccacgcccagctaattttttgtattttagtagagatgtggtttcaccatgttgcccagggtggtctcaaactcctgagctctggcgatccaccctcttcggcctcccaaagtgctgggattacaggcgtgagcccccgcgcccggcccaatttattgtttaattgggatgatgaaaaggttctggagatggatagtggtgatggttgtacaacatagtgaatgcttaatgccactgagttgtacacttaaaatgattaaaatgtaa

SEQ ID NO: 33835 - DNA, 2300 bp, Homo sapien
gagttcctatatattgccatacccaatttaccctaatgctaacatcttacactagcatatttgtcaaaatcatcagtgtaccaattcatatactgtacattactatttactaaaatccagagtttatttggatttcaccagtttttccactatgttgttttttgttccagaattcataaatagagggttttttttttcctatttttgattctttaagttcatttttgttggttgcatggaggagtgtcatatacgcactcattccaccaaattcccttgatatcctttaccgttactttataaaccatttacatttctcttgcagagagccacaacctaagtgccttacctgatgacactgacagagagaatcactggaaatgatagttttatacttaattcttgtcactaaaactctaatagtgtttttaaaaacctaatacaaggccaggcctggcggctcacacctatcatcccagcactttgggatgcctagggaggagaattgctcaaggccagaagtttgaaaccagaacagcctgggcaacatagtgagaccctgtctctgaaaaaacaaaacaaacaacaacagcaacaacaacaacaaaaatacctaacacaaatacttaaatgcatacaactatttttataacttttaacttttacacttagttgtccatttctccaaaatatgaagtcctctgcggaagtgactccagaccttcagagccgtggtgaactttgtgaattactggtaatgaacaccgtcatcttgtctgttttaccagcacatgatcatataattgaaaactgttttgaacaggaatgtctcatcataaataagttaataaattctacaaacatctactaaacatctgttatgttctaggtacagattggggaaatcacaataaaccagtcgggcacaatacctagcttcatgaaatgtatagtcaatctcttctacttcaaggcccagactctcttagactttgttgattagcatccaggctaaatggatcctctctggatcttcatgtggagggcaataaggctggatttgctacttggcctttttaggggttgagaagatgttactttaacaaaagcaagtgcccaacaaaatcataaacccaggtaataggctgaccactttaagctgagaaatcctacctagttctctgggatataagccactactaatttaatgcacacatataccaccttattttgaggctgtgtgttaggtatgttatgtttgtcatccccccacccccaacacacacaaaaaccaacttgctattcacgtgattcattttctatatgaattgaaaaatggcactaaagaaaaaagtttggggatatagaaatagcttattttttaaggaagaaacataacctttctaagtactggatgtgtaatattaaaaatgtagttaaccaaggacagaggctgcacctaatgacttttggaggaaccttcttgctcaagacactatgattctcgttacctggatagtatcacccatggattgtatcatatatgaaccactgaggaacacacattcctgcagatgtttgcagattattaattgctttatatttggagcacccctcccttcaatcagcataaatatttgagggtgggctgtgtttagaagatgtttagtctccaatgattacaacatgatgcaccactctcctatacaaattttgatttaagaaaagattttatttttcaaaggaaaccacaagtgaaagcaatcttgaagattcaatagcagttggtcctatagtgccaggtaagaactttgaagtagcacgtgggattatatgtatttgtaaatatatttgtatacagggcagttgcaaaaaaaagagtatttataattgtccaaagagcttccaaagaggagcagcattgcaacagtgtcgtgtatgagcaaaagtcaagattcttgtggcttctccagagtgcaggcaggaccaaactgatagtaggcaacgtgtctcaggtacaagcaaaccagtccttagaagcaccaatcagtaaacttctttcctgagatttttatttttattcattttattttattttattttatttgagacagggtcttactttgtcacccaggctggaatgcaatggcaagatcatggctcactgcagcgtcgacctcccaggctcaagtgatcctcccatctcagcctccccagtagctgggaccacaagcatgtgccaccacacctggctaatttttgtattttttgtagagacagggttttgccatgttggccag

SEQ ID NO: 33836 - DNA, 2300 bp, Homo sapien
ctactgtgtcttcctcttgtcagccttccgcaagacccctctgaccagtgtgctccccctcttcctttccaatcctccaccactccacacaaatcctaatcatctctgactgttttcagatcttgcaagctctaggatctcatatttctgggaggctttcctctgccccagctttcccagagtggaaggaagatgagaaatgctctgtttctagtttgatccttttgcagagctaaataccaatttctttccaaagaaatataatttcacaaagagacttaatcctatttctggtgtaataaacatggcaataatgtggtaagaggcaattaattcttcatgcattcacttacataagggctgctagatttgctggtattttttttccgtgagctctaaatatattctttctgattcattcattaaacgaatactaattgagtgccacatgagtgtcaagcacttttctaggttcatgtcattcattagtgagcaaaaacctctaccctcatagagcttatttttatttttattttttgagacagagtttcactcttgttgcccaggctggagtgcaatggcgttatcttggttcactgcaacctccgtctcctgggttcaagcgattcttgtgcctcagcctcctgagtagctggcattacaggcatgtgccaccatgcccagctaatttttgtatttttagtagagacagggtttcaccgtgttggccaggctggtctcagactcctgacctcaggagatccgctggccttggcctcccaaagtgctgggattacaggcatgagccactgcgcccagccccctcatggagcttcaattccagattctggttgccaatctgtttgttgatcaaaggagaatggggcagagggatggtgtgcatcaaagtgcatggtgtgtaggagcattcaatgactacttgccagttaccccattggtggacagagtcttatatagaaaattgcctcactggtaaccaacttctgactgtcacaaaacccaactggagactgaataggctttcactattacaggtctggtggttattatctgcatgttaatggacagatgcccatgccagtggcactgatcaagtttccttacttttaggtataaaggacatcgtccagtgcttttcctgtggagggtgtttagagaaatggcaggaaggtgatgacccattagacgatcacaccagatgttttcccaagtgagtggaatgaatgttaaccatctgcaactttggatgcacttcaacagtttttttctttttcctcatttcctgccttattttatctttagattgagtctttatccactcctcggattcaggctatgaaggatgagtcttcatgtctttcatccctttgctccatgacccccttcctgtactagccttcccctctttatagttatggcatagttttggctagattcatatattcacattacatgtttacattatcatgactatacaaatgctatgtggagctgaagcttgtggtaaatttttatttatttttcccttcctgtatatccttttatttttttaggaagtaataactgtcctgttggtatgttagcttatttttttttcctgaggtaaaattcaggtagtaaccattttatttatttatttattattttttgtgacaggttctctctcttgcccaggttggagtgcagtggtgcaatcatggctcactgcagccttgacctctctggctcaagcaatcttcctcgctcagcctcccaagtagctgggactacaggcacatgtcttcacacccagctaatttttttttttttttttttaagagacagggtctctctatgttgcccaggctgctctcagacttctaggctcaagcagtcttcccatcctggcttcccaaagtgctgggattataggcgtgagccaccatgcacagcaattaaaccattttagagtacacaattctgtggcatttattatagtacattcacaatgttgtgcaaccaccccctctatctagttccaaaacactttcatcgcccccaaagaaaactctgtatccatcaagcaggcccccctcctctctccaccccactccatgcccagcccctgggatacaccaacctaattggtgtctatggatttatttgttctgactatttcctctaaatggaagcataccgtttgaccttttgcatttggattctttcacttggcatattgttttgaagtttatccatgttgtagcttgcataagtacttccttccttttgagaccaagtaa

SEQ ID NO: 33837 - DNA, 2300 bp, Homo sapien
gcacatgtctgttaggtagagtgacaactatattctgcttctctgtgttgctctatggtatttgtgacaactacttgatctctcagttaaagatctgcattaacctccactgtaacttatgcatgtgttcggtttgagcaagaccagcaaggtacctaggaacctttccctgatcatcttgtatttcaggcagagatttagctgacaggaaccagcccatcatttatagattgcagaggtgcttcctaatgaccagcagctaaagagaaaatgccacaatctggtggaaggctctacatgtttaggaatcatgaaaattaatttcctgattttctcctgcaggcagaatgtggcaaagattgctatccatgttcctattatctcaaatccttccatactaatagaaatcccaatatttagctgggcacattgtcacccaggaaaaagattaggtttcccagctcctcttacagctaggtatggtcatctgactaataataataataataataataataattattattattattattatttttgagacagagtttcactcttgttgcccaggctggagtgcaatagcatgatcttgactccccgcaacctccacgtcccaggttcaagcgattctcctgcctcagcctcccaagtagctgggattacaggcacccgccaccatgcctggctaattctttgtatttttagtagagacagagtttcaccatattggccaggctggtctcaaactcctgacctcaggtgatccacccacctcggcctcccaaagtgctgggattacaggcgtgagccaccatgcccggcccatccaactaagttctgattaaagaaatataagcagaagtgtcctgtgacagtttctaggagcactttgtcaggggacaagaggtgaggagagtaatgtgtagaaagaaaagacatgataattatcacaaatagaatatttgtattcattgttagtccagaccttaaggtttcaaatttgaaggtttaccacctaagggaggaatagaaaactgggagaggatttatgatgcaggaaagaaaagagatgtatgccaggtgcagtggctcacacctgtaatcccagcattttgggaggccaaggcaggaggattacttgagcccaggaggttgaggctgcagtgagccatgatctcgccactgccctccagcctggatgaccatgtctcaaaaaaaatagaaagaaaagaaaacgaatctataagaaatgctgaagagaggcctggcgcgatggctcacacctgtaatcccagcatttgggaggccaaggcgggcagatcacgagatcaggagatcaagagcattctgactagcatggtgaaaccctgtctctactaaaaatacaaaaaagtagctgggcgtggtggcaggcgcctgtggttccagctactccagaggctgaggaaggagaatctcttgaacccgggaggtggaggttgcagtgagccaagatctgcattccagcctgggcaactctgtctccaagggggaaaaaaaaagaaaagaaaaagaaacgctgaagctagtggacattgctgagtgtagctaaacgtaagcccaggagcataaagtctatgtgggaattaaaggtcaagcaagcaagtgggcacaacctactgactcacctgtgtagaaaagacctgctttggccagtgctgcaactcccacagctgattcccggggccagtccttaaaagagtccagccgtagttcttcgtaagcaaagatgctgtcattgcaataagcttgaataaaaagcacaaggtgagaccagcaggctttagtcttttttttttctatatctttattgctgctgcacaaattaaagagaccagtaggctttgatattgcaagtatcagcgttcaagttgtcccttcacagttacagatggaatgatgtctagagtttgcttcaaaataaacggggcggggcgggggggacgacaaaaagagatagggacaaaaaatcaaaagaagaaataaacaagcaaagcctttggaaaatgtttgagtttttacctgatgccataggtaattctctctggacccaggaattcacaaaatgttctccctgagggaaattaaaattcaagttgttgattatctgacttttttttttttttttttttttttttgaggcagagtctcactctgttgcccaggctgaagtgcagtggcaggttctcgtctcactgcaacctccgcctcctgggttcaagtgattctcctgcctcagcctcccgagcagtacaggc

SEQ ID NO: 33838 - DNA, 2300 bp, Homo sapien
actttagagtagatagtgatttcttaggacacaaaaactatcaatcataacaaaaattaaaattggacttcatcaaaattaaaaacttctttttgaaagacaccattaagaaaatgaaaagatggttaacagactgagagaatatatgtgcaatgtaaatatctaacaaaggactagtatgcaaaatatataaagaatccttataatttagtaataaaaaggaaaacacgcaatttttaaatgggtcaagaatttaattacggccaggtgcagtggctcacacctgtaatctcagcactttgggaggccgaggtgggtggatcacgaggtcaggggttcgagaccagcctggctaacatggtgaaaccctgtctctactaaaaatacaaaaattagctgggcgtggtggtgggcgcctgtaatcccagctactcgggaggctgaggcaggggaatcgcttgaacccaggaggcggaggttgcagtgagctgagattgtgccactgcactccagcctgggcggcagagcgagactctgtcttttaaaaaaaaagaaaaatatttaattaccttaccaaagaagatacatgaatgaccaataagccattaaattaaaacttcagtgagtatacacatatgccctgaagtagctaaactttaaaacactgccctatgtgtgtgtactttttagctaaaaaagtgtttgaaaacagtattattttgaaactcaaaattccaaatcctctcttcaaattaggtagtagtgtcactggaagtaaaagagaagttactttaactgctaaagagtatccactaagaatctacatcaaacatcatgtttaatgctcaaactttagaagaatttataccaaaagtcaagaataagataggatatctatcttcattattaagcaacattatattagaggacctaatcaatgcaacaaggcaataaataaaagacaaaactgtcataatcagatactacaaacatctaagaaaattcagggggatttacagtcatatattaaacagtccagaaggagtcctatacatcatcaatgaatattgagaataaaaaatagtttttaaaacccctccaatttataagggcaacaaaatgtacaaggtactaaaataaatgtaatgtgtatttgggtataaatacagcaacataatgaaaaggtttattggggaaaaaattacagggagaagggtcaacaacgtgaagaggttcccctgccatctggacttctggaaaaagacctgctggtctaggcacagctggatgcaccatggaaagtggttccaataaacactggcactgtaacaattgtgtatgttgatacaaaaagagggagccaatgaatacttggtcgattatttaacaattgcttctctgctgaagaaatggccttgttggactagagcttaactgtggttcacatactaatgctgctataacagctagaagccttactaagaaatttgctaaaccaccaaaaagaggaaatgaaccttctaggatatctggattgccttttcttaaaaatctagtcttggctgggtgctgtggttcacgcctgtaatcccagcatttggtgaggccgaagtgggcggatcacgaggtcaagagatcgagaccatcctggtcaacatggtgaaaccctgtctctactgaaaatacaaaaattagctgggcgaggtggcatgtgcctgtagtcccagctgctggggaggctgaggaaggagaatcacttgaacccaggaggctgggtttgcagtgagctgagatcacgccattgcactccagcctggcaacagagcaagactcagtctaaaaaaaaaaaaaatatatctagtctgtatggcagcacaacatcaggtaaaagtacagactagccagatcactggttaaccttaacccctatgtgcttgagtttccttatctgtaatatggagatgatatagcaatagctgattttggactgttaaaggaattaagtggacacatgtaaagtgcttagaattgtgcctggcaagtagtaggctgcaatattgtgatataataaatatatatatttgatcttcatccagttcctggcacagatctccagaaacccttgtaatttcctgagtgacaggggtgatagaaacatcttttattagaatacttggtcttggttcctgacacaagagcttctaagacctttggaatctccaagtgataagagtgtatgacagtgagctaactggtggctgggatcctttagacaacttcaggatgggggctatcccctg

SEQ ID NO: 33839 - DNA, 2300 bp, Homo sapien
cagtctcctctcttcgcaaatatgctttatatttattggggagtcctctatctttttcctggttttccttaaagccttcccaggctgatggataacaaacatatgcaagaaacttggggcttgggattcctctaggctgtttgtcctagaggaatgcatcccgtcttgcaaataggatggtcaattaagatggaaggaagcaaaagtgtggataggaaggaagggcacaaaaggaaaagtgtggaatttgtgtgtgagtcctctaatgaggtcaaaggtgggagggaggcaagcatggaagcttcctggcactgcgatactaatttcccctcctctcccttttaaaatcctgtcttctgggaggaaatgagactgattatggagttcccactaagccctgcagggttggtggagacaaccccattttacacattagttcatagacttgggttgtgacttgcttgaggtcacccagccagtgtgtcagagcctgattttaaatccagggctgttctttccactgctatgcaagataccttctgtttatatttttgagggagacaacagagatgggaaaaatttttaacaataaaataaaggcaatggaggggatgagtatgctgatggggaaggaaagaggccctagcttctgcagttcctttgtgttattcctaacccttttctcatctgggggtgcactgcctctccatttctcaagtatgggaaatgccagtaattccacttgtgttaattggcagtcagacaacttgtccaaaactgaattgatcttacccaccccgccaacattttaataattgcaaccccaacctttcagttgctcagctaaagactatggaggtatccttgattcttttctcataacacacatccagtgtattggtaagatttagaattcagtcacttctcaccagctgctggtccaagccatcacaattcccccaaagttcttaacagtgctcacagcctctcctccccaccttacccttctgattgcagctgccaccactcatcccctgctcactcctgcagtcgtcaaagaccccaatgcacttctacctcagggcctttgcacttgcagctctctttgtctgaagagcttttcccctaggtatcagtagggttaacacccttcctcattcaggtcatggcttaactgtcttcccagcgaggactcctctggccaccctattttattttttgagatgaagtctctgtcacccaggctggagtgcaaggttggctcactgcaacctgtgcctcctggattcaagcgattctcctgcctcagcctcccgagtagctgggattacaggcgcctgccagcacgcccggctaatgtttttgtatttttagtagagacggaattcactatgttggccaggctggtctcgaactcctgccctccgatgatccacccccgctcggcctcccaaatcaccatgcctgggattacaggtgtgaaccatcgcacccggcctggccaccctattttaaactgcaaacttttccccttcagtgcttagtttttctccacagcattatcaccatttcatatagtatatgtttttcttcatactgactccccttggagaaggaaaactccacgagagcaaggatttttgacagtttttcattgttatttcttcagtgcttagacatgcatcaggctcaaagtagatgctcaatgtttgttgaatgaacagcaagagcaatggaggagtcctgaaatacacagcaagaagcaaggataattctggctttacttctgtggccagggtccttcatcccaaccttttagaagtagaaaaaccagatcgagctcctcagaacccaggtcgatggctgcagagccttcgaccttccgagagcgaatggcgatcactctttccggttctctgtgaattccagctggaacaccgtccctttccgcgccccaactcagcggaggccatgccctgcacctgagcgccccgctccggcagctgcactctgcagcatccggaacgtttcggcgtggccgcagggcgcggcggaatgacttccggggcgcccctaaagcggcggagaggagtgtcgggcggagtttccggctgagagtccttctagcggcgccggtgagtccgcgtgtggaagtctgtgaggcgcagaggtggggcaggccgtctggctagctaggcggctgggagcgttttcgtggcggggaacggaggttgaattgccctgcctgggctcatagggaaggaggatgtgaaggagcttgtgaaggcagaggaaggtaa

SEQ ID NO: 33840 - DNA, 2300 bp, Homo sapien
ggttggttagttttttgtttgtttgtttgtttgtttttgagacagagtttcactcctgttgcccaggctagagtgcaatggtgcgatctcggcttacttcaacttctgcctcttgggttcaagcaattctcctgcctcagcctcccaagtcgctgggattacaggcgtccgccacaacgcccggctaatttttgtatttttagtagaggtgaggtttcaccatgttggtcaggttggtctcaaactcctgacctcaagtgatccacccgcctcagcctcccgaactgctgggattacaggcgtgagccaccatgcctggccttgtttgttttttgttttgttttgagacagagtctcactccattgcccagactagagtgcagtggcacaatctcagctcactgcaacctccgcctcccaggttcaagcgattcttgtgccccagcctcctaagtagctaggactacaggtgtgcgccaccactgcctggttaattttggaattttctttttaatagagacagggttttgccatgttggccaggctggtctcaaacttctggcctcaagtgatctgcccgcctcggcctcccaaagtgctgggattttgggtgtgaaccaccgcactcacagagtttttttctttttttaataaatttttatttgaaattatttagatttgcagaaagtgcaaagtaatacaaagagttcctatatattgccatacccaatttaccctaatgctaacatcttacactagcatatttgtcaaaatcatcagtgtaccaattcatatactgtacattactatttactaaaatccagagtttatttggatttcaccagtttttccactatgttgttttttgttccagaattcataaatagagggttttttttttcctatttttgattctttaagttcatttttgttggttgcatggaggagtgtcatatacgcactcattccaccaaattcccttgatatcctttaccgttactttataaaccatttacatttctcttgcagagagccacaacctaagtgccttacctgatgacactgacagagagaatcactggaaatgatagttttatacttaattcttgtcactaaaactctaatagtgtttttaaaaacctaatacaaggccaggcctggcggctcacacctatcatcccagcactttgggatgcctagggaggagaattgctcaaggccagaagtttgaaaccagaacagcctgggcaacatagtgagaccctgtctctgaaaaaacaaaacaaacaacaacagcaacaacaacaacaaaaatacctaacacaaatacttaaatgcatacaactatttttataacttttaacttttacacttagttgtccatttctccaaaatatgaagtcctctgcggaagtgactccagaccttcagagccgtggtgaactttgtgaattactggtaatgaacaccgtcatcttgtctgttttaccagcacatgatcatataattgaaaactgttttgaacaggaatgtctcatcataaataagttaataaattctacaaacatctactaaacatctgttatgttctaggtacagattggggaaatcacaataaaccagtcgggcacaatacctagcttcatgaaatgtatagtcaatctcttctacttcaaggcccagactctcttagactttgttgattagcatccaggctaaatggatcctctctggatcttcatgtggagggcaataaggctggatttgctacttggcctttttaggggttgagaagatgttactttaacaaaagcaagtgcccaacaaaatcataaacccaggtaataggctgaccactttaagctgagaaatcctacctagttctctgggatataagccactactaatttaatgcacacatataccaccttattttgaggctgtgtgttaggtatgttatgtttgtcatccccccacccccaacacacacaaaaaccaacttgctattcacgtgattcattttctatatgaattgaaaaatggcactaaagaaaaaagtttggggatatagaaatagcttattttttaaggaagaaacataacctttctaagtactggatgtgtaatattaaaaatgtagttaaccaaggacagaggctgcacctaatgacttttggaggaaccttcttgctcaagacactatgattctcgttacctggatagtatcacccatggattgtatcatatatgaaccactgaggaacacacattcctgcagatgtttgcagattattaattgc

SEQ ID NO: 33841 - DNA, 2300 bp, Homo sapien; identical to SEQ ID NO: 33809

SEQ ID NO: 33842 - DNA, 2300 bp, Homo sapien
catgtctgttaggtagagtgacaactatattctgcttctctgtgttgctctatggtatttgtgacaactacttgatctctcagttaaagatctgcattaacctccactgtaacttatgcatgtgttcggtttgagcaagaccagcaaggtacctaggaacctttccctgatcatcttgtatttcaggcagagatttagctgacaggaaccagcccatcatttatagattgcagaggtgcttcctaatgaccagcagctaaagagaaaatgccacaatctggtggaaggctctacgtgtttaggaatcatgaaaattaatttcctgattttctcctgcaggcagaatgtggcaaagattgctatccatgttcctattatctcaaatccttccatactaatagaaatcccaatatttagctgggcacattgtcacccaggaaaaagattaggtttcccagctcctcttacagctaggtatggtcatctgactaataataataataataataataataattattattattattattattatttttgagacagagtttcactcttgttgcccaggctggagtgcaatagcatgatcttgactccccgcaacctccacgtcccaggttcaagcgattctcctgcctcagcctcccaagtagctgggattacaggcacccgccaccatgcctggctaattctttgtatttttagtagagacagagtttcaccatattggccaggctggtctcaaactcctgacctcaggtgatccacccacctcggcctcccaaagtgctgggattacaggcgtgagccaccatgcccggcccatccaactaagttctgattaaagaaatataagcagaagtgtcctgtgacagtttctaggagcactttgtcaggggacaagaggtgaggagagtaatgtgtagaaagaaaagacatgataattatcacaaatagaatatttgtattcattgttagtccagaccttaaggtttcaaatttgaaggtttaccacctaagggaggaatagaaaactgggagaggatttatgatgcaggaaagaaaagagatgtatgccaggtgcagtggctcacacctgtaatcccagcattttgggaggccaaggcaggaggattacttgagcccaggaggttgaggctgcagtgagccatgatctcgccactgccctccagcctggatgaccatgtctcaaaaaaaatagaaagaaaagaaaacgaatctataagaaatgctgaagagaggcctggcgcgatggctcacacctgtaatcccagcatttgggaggccaaggcgggcagatcacgagatcaggagatcaagagcattctgactagcatggtgaaaccctgtctctactaaaaatacaaaaaagtagctgggcgtggtggcaggcgcctgtggttccagctactccagaggctgaggaaggagaatctcttgaacccgggaggtggaggttgcagtgagccaagatctgcattccagcctgggcaactctgtctccaagggggaaaaaaaaagaaaagaaaaagaaacgctgaagctagtggacattgctgagtgtagctaaacgtaagcccaggagcataaagtctatgtgggaattaaaggtcaagcaagcaagtgggcacaacctactgactcacctgtgtagaaaagacctgctttggccagtgctgcaactcccacagctgattcccggggccagtccttaaaagagtccagccgtagttcttcgtaagcaaagatgctgtcattgcaataagcttgaataaaaagcacaaggtgagaccagcaggctttagtcttttttttttctatatctttattgctgctgcacaaattaaagagaccagtaggctttgatattgcaagtatcagcgttcaagttgtcccttcacagttacagatggaatgatgtctagagtttgcttcaaaataaacggggcggggcgggggggaagacaaaaagagatagggacaaaaaatcaaaagaagaaataaacaagcaaagcctttggaaaatgtttgagtttttacctgatgccataggtaattctctctggacccaggaattcacaaaatgttctccctgagggaaattaaaattcaagttgttgattatctgactttttttttttttttttttttttttgaggcagagtctcactctgttgcccaggctgaagtgcagtggcaggttctcgtctcactgcaacctccgcctcctgggttcaagtgattctcctgcctcagcctcccgagcagtacaggca

SEQ ID NO: 33843 - DNA, 2300 bp, Homo sapien
taccagatctccgtcaagtgcagtaaccagttcaagttggaagtgtgtcttttgaatgcagaaaacaaagtcgtggacaaccaggctgggacccagggccagctgaaggtgctgggtgccaacctctggtggccgtacctgatgcacgaacaccccgcctacctgtactcgtgggaggtaatggtggtttgggacttgcgtaagggaggtcttttgcccccatctggtagccctggcttcagcaggagcccaggacaggtgaacgggcaggtgtggtcctctgagctttctgatgtttcccacccttggtgggaggcccagattttttatttatttatttatttatttatttatttatttgtttgtttgtttttgtgatggtctcactctgtcacccaggctggaatgcaatggcctgatcacagctcactgcagctttgagctgcaatcctcctaccttggcctcctgagtagctgggactacaggcacatgccaccatgcctggctaattaaaaaaattttttttgtaggccgggcatggtggctcacacctgtaatcccagcacttcgggaggctgacgcgggcggatcactttaggccaggagttggagaccagcctggccaacatggtgaaaccccgtctctactaaaatatgaaaatttgcagggcatgatggtgcacgtctgtaatcccagctactcgggaggctgaggcaggggaattgcttgaacccaggaggcaggggctgcggtgaattgagatcatgccgcagcactctatcctgggtgacagagtgagactgtctcaaaaaaaaaaaactcctttttatagagttggggtcttactaggttgcccaggctggtcttgaactcctggactcaggtgatcctcctgccttagcctcccaaagtgtagggattccaggcatgagccacctcgtctggtcaaggagaaggcctgattttgaagggcaggtcccagggtcagccagtgaagggcagagcctctggttgctgcttctctgcaggcccagtggcgacttctggggtgcatgcacgaggggtcttcctgctgtagggcaggccagatggggctcaggctgtcggggcgctcacacctggcgctttggctgtcgtaggtgcggctgactgcacagaagtcactggggcctttgacttctacacactccctgtggggctccgcactgtgcccgtcaccgagagccagtgggtgagagccagtttcatttgcggtagaggcagcagaggttgtagaaatgctccttgaggcagatgccacaccccaatttcatggagtgatttgggctgagccgagtctgcagcaggcagaaggctctgagatgttgtcctagcctgggcaaaggacaattcagagctcgggggaataggggtgtgctcagcacgactgggtggacaggccgtttgttgtgaatcgtacaggcttccaggagcgggtgcctgaggcttccagacaggctttgggaggtggccagaggagatgcctgtttccggggcaggaaatggagggagggcccaggctggagaggttcagccaggctgtcacaaggctttgaagcttcccatctgagagcctggctattggagagtgtgggtttggaacttgaggctaggaggttctattctgtcctgtgccagccacagccttcggatgggcagagcaatgatggggggaagatgtaaaagaaaagaactgaggaaagaagaagaaaaccagcttcaacaacggtctaggccggatgcggtgggtcacgcctgtaatcccagcagtttgggaggctgaggtgggtggatcacccgaggtcaggagttcgagaccagcctggtcaacaggtagtgaatcctgtctctactaaaaatacaaaaattagctgggcatggtggtggacgtctgtaatcccagctaccaggtaggctgaggcaggagaatcgcctcaggtgaaccaggaggcagagattgcaatgagctgagataatgccactgcattccagcctgggctacagaatgagactctgtatctcaacaaaacaaaacaaaacaaaaacacaacagtctgttctgtggaggccttgggcagatgctgggagctctgagcacggactggtccctctgttgggagcctcttcccttcatccctcctggttaacttgactcagcataaaggccatttcttctaagagcctgtccctgactctccaatcggggatgtgtctgttgtctcatagagtgcccaattcctgccaccacttgtcatttcc

SEQ ID NO: 33844 - DNA, 2300 bp, Homo sapien
gagttccagaccagcctggacaacctggcgaaaccccgtctctactaaaaatacaaaaattagcccagcgtggtggcgggtgcctgtaatcccagctactcaggatgctgaggcaggagaatcgcctgaacccgggaggcagaggttgtagtgagccgagatcataccactgcactctccagcttaggtgacagagcgagactctgtctcaaaaaaaaaaaaaaaatatttgaattttgtttaaatcgctaacacatactgggcatttaataacaaaaaaaaaggacatgagattgtgatccttatgaaggtttgagaggcatttcactagggttcaacatacagcagtctgaaacatactgtaataatttaatccaatggctcatctacagcacctaaaaagattacagcagattctcattattcagtgtagttacggtctagaaagttccatgaacaaataaaaagttaggtttcagcaagctactggtcacacttttgtaagcttaccaacacctacttttgttgtatgtgtgcttatttaatatatattgttggccaggcacagtggctaacgcctgtaatcccagcactttgggaagccaaggcgggcagatcatttgaggtctggagttcgagaccagcctggccaacgtggtgaaaccccgtctctactaaaactacaaaaaaaaaaaaaaaaaattagccaggcatggtggcgcatgcctgtagtcttagctacttgggaggcgaaggcaggggaatcgcttgaacccaggaggcagaggttgcagtgagccaagactgcaccactgcactccagcctgagcaacagagtgagactctatctcaaaaaaaaaaataataataattaattaaatgaagaataaataaataatatacattgttcattcattaacattgaactcacagccaacggcactacagcactcacgcctgaatggagtttatttaatgcatgtattttctctgtaagacacatcacagacttcttggacttgtgaatgctaagcagcacttcagcactatgcttgggggttaatttaaatggcaaaacaaccaacaaacagtacaaaaacaggaaaagcatggcattaaatagaccacaaaaaggatacctgactattgtatgagagctgaaaaagaaggcagaatatcatcctgttcaaactcaaattctttgacactctgcgcaaacacatgactatgaaagtgctgtgagtactgatttgggggttacaaaaaatagtaggtgagttcacaaatacaaaagctgaaaacaaggaggatcgactgtattttcgtagacaatctaatctcagaagatttcagttcagacaaaaatcatgataattactgtattacaaaagggcactagataggggggaaagagtaaaaatcacaattaaaacaaaggttcaaaattctgcagcaaccatatccagttacactttaatatgtttgcggcagactacattattgttcccaactcatcacccctccctatatctaaaacctttccccaagacaatgcagttcctcctgctagagatcaggtatatttatctatactatcaatgttagccatggacaaggtatgtgctttggctgactgaatgttagtggacatgagagaagcaatggcttaaaatgtacttccagaactggagtttccttgtgattctatcactgtgacagaaacacattctcaggtagtccactgatccaagggggaacaaacacacagaaaacatacctagactctatctgcagcttgcagcctcaccaagccaacaacagtcaactcacagatatgttagcaaaaataaatgtttttcgtaccttaagttttatataattattgacctgcagttaactgatatacaatatacattaatcttaaaatatcagtatcccattaaaaatatttacattaaaaactgagaccactttctttcctcctttttttttttttttttttaaattaagagacagggtgtctcaatgttgcccaagctggagttcggtggctagtggctattcacaagaacgatcatcgcacactacctcaaactcctgggatcaagcaatcctcctgcctcagctttccaagtcgctgggactataagtgtgtaccacagcatgtcagctctctctctccttcttgacctaaagcctagcataaaattagctaagtagaatgtttccaaagatggctgcatcagtatctcccatcccacataatttctgtttgattttgccattcacccataaaatgg

SEQ ID NO: 33845 - DNA, 2300 bp, Homo sapien
atctgcagcttgcagcctcaccaagccaacaacagtcaactcacagatatgttagcaaaaataaatgtttttcgtaccttaagttttatataattattgacctgcagttaactgatatacaatatacattaatcttaaaatatcagtatcccattaaaaatatttacattaaaaactgagaccactttctttcctcctttttttttttttttttttaaattaagagacagggtgtctcaatgttgcccaagctggagttcggtggctagtggctattcacaagaacgatcatcgcacactacctcaaactcctgggatcaagcaatcctcctgcctcagctttccaagtcgctgggactataagtgtgtaccacagcatgtcagctctctctctccttcttgacctaaagcctagcataaaattagctaagtagaatgtttccaaagatggctgcatcagtatctcccatcccacataatttctgtttgattttgccattcacccataaaatggtgggatctacctcccctccttgcaaatttgagctggccctctgatcctgtctaagatctgaagccagatattaaggtacttcattaatttccatgtttgtcctctatgcaacctagcaatcaagcaagaagtcaaaacatactgacatagtttggatgggtccccacccaaatctcaccttgcattgtaataattcccacgtgtcaagggtggggccgggtgcagataactgaatcatggggatggttccccccatactgttctcgcggtagtgactaagtctcatgagatctgatggttttataaatgggagctcccctgcacatgctctctcctgcctgccactatgtgagacatgcttttgcacctccttgccttccaccatgactgtgaggcctccccagccatgcagaactgtgagtcaattcaacctctttcctttataaattacccagtctcaggtatgtctttatttgcagtgtgagaacagactaatacaataagttgataccagtagagtggggtgctgctgtaaagatacccgaaaatgtggaagcaactttggaaatgggtaacagggagaggctggaacagtttggaaggctcagaagaggataggaaaatgtgggaaagtttggaacttcctagagacttgttgaatggctttgaccaaaatgttaatagtgatatggacaacaaggtccaggcggaggtggtctcagaggcagatgaggaatttgttgggaaatggagtaaagtcactcttactatgcaaagacactgcaggcattgtgcacctgtattagaaacgggcataagataggcgggaaagagggaaaataagaatttttttctagagttccctacagatctgtggaactttgaacttgagagagatgatttaaggtatctgacacaagaaatttctaagcagcaaagcattcgagaagaagcagagcataaaagttcagaaaatttgtagcctgatgatgcaacagaaaagaaaaatctattttctcaggagactgggttgtagaaatttgcataagtaatgaggagccaaatgttaatcaccaagacaatggggcaaatgtctccagggcatgttagagaccctcacagcagaccctcccatcacaggccaggaggcttagaaggaaaaatggttttgtgggtccagaaccccctgctgtgtgcagcctaggaacttggggccctgcatcccagctgctcctgccataggtaaaaggggccaaggtacacctcaggccatggcttcagagggtgcaagttccaagcctttcaggttctaggtggtgttaagcctgcagatgcaccgaagtcaagaattaacgttcatgaacctccgcctacatttcagaagatgtatgaaaatgcctggaaatccaggcaaaagtttgctgtgggggggaggggaggggagggggggccctcatggataacctctgctagggcagtgtcaaagggaaatatggggttggagcttccacacagagtccccactggggtactgccaagcagagctgtgagaaaagggccaccatcctccagaccccagaatggtagatccactgacagcttgcactgtgtgcctggaaaagctgcagacactcaatgcagccagaaggggggctgtaccctgcaaagccacaggggcggggctgcccaagaccctgggaacccacttcttgcatcacctagatgtgacacatggagtcaaaggaggtcattttggagctttaagatttgcctgctgggttttgga

SEQ ID NO: 33846 - DNA, 2300 bp, Homo sapien
gtgaggcctgggtgaacagctcttcttagtattctgtgtgaccccatttgaccttttaacaaatccctaagtaaataaatagcccctcaggaaaactaagtttttctctgctgtttttttgcttgagagagctataactgtaatagacttatatttctgaacattttagtgcttgccaatatttggtaatatttatgtttcctatatttgtaatgaacattcttcttccggtacattttttgttaaattattgtttgatggataaaagttcaccttttattgtataaaattgactgagattaatttatacacattgacaatgggtaaatagaatttttcagattattaaaagctgaaggatgcccacgtaagcaaaaaaaaaaaagaaaaaaccaacaaaaataaacccaaacccctcaaacaatttcgaacacgaaacattcttctgatgccggcatccctgcttgcaggtgtgaagggggcaggaatcagcgaggtgtcctgggctgagtccccggagtgggaagaggtggcaggaaggggatctgaggaggagaacaggggtcctggtggtctgtgcttcttcccagacacgggagctgtagaggagacctctgcagcagatgctaggggggccagtaggcccaggcagtcttgggacttgggtctgtcctgctgtgcatccatagtgggtgctttagaaacgggaggcccacccgaagcccctgttgcaagtgaggacaaagtgtgggaaggccgtgagggtctgcagtccgggatggccttgtcctcaacgtgcagtgcactgttgatgcgctggaatgccgtctctttttccaggtgcaggtcttcagccgtgacccggtaccccagctctaagggaggtggcagcatcaaaggctcccctcgcctgcgtggcagcaggggaatcttgcgtctacggggcctagagtcctgggatctgggggagccacccgttggggcgattgtctgccctggtgctgtatctgcccccttttcacaccgtgtgtgacccgaagagacagcctgaggcctgtcctcactcactgtctttgagtaactgagggtcagctggcagcgggatgaggctggccccctcctctgctttagccccggcaagcctcccgtggagctgtaggagctggagatggcatttcgtttggtgctcgagctcgtccaggatgtctgggatgtgtggttatatctgatttctgagctctgggcatggaggtctgtctgcagaggcccgggcctgggcacaaagggagaggggcctccattgtcccgcaggggccaaaatgcagaccgtgcatccccggtgacctcggggaccgttctctgatcatcaggattttcttggactctggggtccttgtcctgctcaggcatccctgccccgctctccttgagggccctcaacactatcttccctggacacaagtctggggacagccgggtgttgtggaccccaaaggggtgactacctgctcctgggccccacagagtccttgtgctcagtgtagtggctgagctgggggatgccctggaactcggagcacacagcactggcttactgtggtacctgtgcagtgaaattgaagacagaatcaccaggatggaacacaggtcttgcaggatcacttgaaaccttcttagagttgtcttgacaccagtgatgtcgagtgtccgggtgtttgtaggatggcctgccactcagtccaggggcaggagcaacggggagatcccacaagcaaagtgaactgggggatgggctgaaggggctccaggcaactgagccctactcgcaggtcctcggccttggcccaaacaggaatgaggggcacagagtgcccgggtaaccgctcctgggagcagtggggaactgtcggatacttgaactctcaagagctgggctctgagcgtcctcgtccagctgccaacttggccaaaggctaagccagcagattgttctgttgccgggcaacgcgacttctaaacctgagggagtgggcatgtgagcacataatggcaccagtgacagagcgaccataatggatgaataagcgcagccaggtacccgcgcaaggcacctgctggcaatggcaggaggcggacgtggggggtcgtgcagtaggtactggagggagagacgtgggcacaaaggtcgcgggaggaacaggtgcccacaatggctgcatatttgcccgtggatcactgaagattcctgctctcctgctgaggtggagactgcagtgagctgagatcgcaccattgcactc

SEQ ID NO: 33847 - DNA, 2300 bp, Homo sapien
agctttttaaatatttaacagtatcaataatttttcaggttctgtgagaattttataatttataatttgcagacttaatgtataatctattttgtcctaacaattacaaatatattttttatttcagattgtatatattcctaccagatggagataattacagctttaaaaatttttattttttcattttatttcacacattgacattaaatttttatggacacataataactgtacatatatatggggtagaatgtgatgttttaatacatgtactcaatgtgtaatgatcaaatcagggtaatttgcataatgatttttctgtagggagaaaattcaaaatctactcttctggctattttcaaatatataatatgttattgttaactatactcatcctactatgcaataggacaccagaacttattcctgggttctacatccgttaaggcaaccaaggattggaaatattggaaaaaaaaattgcgtctgtactgaacatgtacagacttttttcttgtccttattccttacacaatatagtacaataactatttgcatgacatttacatcggatattatgagtgatctagagttgatatgaagtatatgggaggatgtgcaaaggtgatgtgcaaatactatgtcattttatatcagggacttgagtatcctttgttaccctcaggagatcctgaaaccagtcccccatggatactgagggctgactgtatagtcctatcctcacggaactttcattctaatgggggaagactgactataaacaaaatatatgtaataggtggtggtaagtaccgtggagaagtaacaaacggggcaaagtgagttatacagctccattcttagaaaccttggagtacttttcttagtttatactcgtggtggtttccttttgtctcctttattacatgggactctgacatgtgcccatagctagggtgacagtaggatctacccgatagtagggtggcagtaggatctacccaaaaagcgtcctgctgatacaggaccaaagcatcctgttgttctcgagcctataaaaagagctaatggtcttgcttctcttaactgtggcctcctacactgtgttttggatgattggtgatgtcttggatattctgtttctttggaactttgaatatacaacactttactagggaattagcaatggaagcagagcaaagatgtacagaggaaacaatgcgtaactctgatggaattgaagtcatgaggcagcagagagcttaaattacagctttaaaaatttttattttttagagggaatttacttgggagtaacagcagtaatagttaacggagccagaatgcttgagtcatataattgcaaagcagagttgggagcaacagatgctaaagagtagttgctgtagttcctctttgggtcgtaggagcagttgtcatattactatatagctactgcatgaagaagagttcttagtgaggcctgggtgaacagctcttcttagtattctgtgtgaccccatttgaccttttaacaaatccctaagtaaataaatagcccctcaggaaaactaagtttttctctgctgtttttttgcttgagagagctataactgtaatagacttatatttctgaacattttagtgcttgccaatatttggtaatatttatgtttcctatatttgtaatgaacattcttcttccggtacattttttgttaaattattgtttgatggataaaagttcaccttttattgtataaaattgactgagattaatttatacacattgacaatgggtaaatagaatttttcagattattaaaagctgaaggatgcccacgtaagcaaaaaaaaaaaagaaaaaaccaacaaaaataaacccaaacccctcaaacaatttcgaacacgaaacattcttctgatgccggcatccctgcttgcaggtgtgaagggggcaggaatcagcgaggtgtcctgggctgagtccccggagtgggaagaggtggcaggaaggggatctgaggaggagaacaggggtcctggtggtctgtgcttcttcccagacacgggagctgtagaggagacctctgcagcagatgctaggggggccagtaggcccaggcagtcttgggacttgggtctgtcctgctgtgcatccatagtgggtgctttagaaacgggaggcccacccgaagcccctgttgcaagtgaggacaaagtgtgggaaggccgtgagggtctgcagtccgggatggccttgtcctcaacgtgcagtgcactgttgatgcgctgga

SEQ ID NO: 33848 - DNA, 2300 bp, Homo sapien
cggatgcggtgggtcacgcctgtaatcccagcagtttgggaggctgaggtgggtggatcacccgaggtcaggagttcgagaccagcctggtcaacaggtagtgaatcctgtctctactaaaaatacaaaaattagctgggcatggtggtggacgtctgtaatcccagctaccaggtaggctgaggcaggagaatcgcctcaggtgaaccaggaggcagagattgcaatgagctgagataatgccactgcattccagcctgggctacagaatgagactctgtatctcaacaaaacaaaacaaaacaaaaacacaacagtctgttctgtggaggccttgggcagatgctgggagctctgagcacggactggtccctctgttgggagcctcttcccttcatccctcctggttaacttgactcagcataaaggccatttcttctaagagcctgtccctgactctccaatcggggatgtgtctgttgtctcatagagtgcccaattcctgccaccacttgtcatttccattcgcaacatttctttcattgtttgtttttcagagtcagggtctcactctgttgcccaggctggagtgcagtggtgcaatcatagctcgttgccatctcgacctcctgggcttaagcgatcctccccactcagcctcccaaatagctgggaccacagacgtgcgctgccttgccaggctaaattttaatatttttttttccccacgagtcagagtcttgctctgtctcccaggctggagagcagtgttgcgatcttggctcactgcatcctctacctcctgggtacaaacagttctcctgcctcaccctcccgagtagctgggattacaggctcacgccaccatgcccagctagttttcttctttattttttgttgagatggggtttcaccatgttggccaggctggtctcgaactcttgagctcgtgatccacctgccttggcctcccaaagtgctcacaggcttgagccaccatgcccggccctaatttttaaatttgttgtagaaacaaggtcttgctatgttgtccaggctggtctcaagcgcctggtctcaagtaagcctcccaaagtgctggggttctaggcttgagccacctcgcctggcacttgcaccgtttttctgtgcatgcatctccactcccactgcccaggacctgtggacttagatttgagtcattactgagcacctagcacccagcctcatgcctacctcccacctcgcactacctgtttgcttgatgcattaataaatattccacctgaatccacagcccattcactcctgtgttcaagagctatttcaggaagtgaacctcatttctggcagtgttcagtccagtgacctcagctctgtgtacccggcagggtggctacgcctctgggggagttggattcaggggtgggggagaaagagtgttgttagagagctcggtctaggactagaggaacgtgcccttatgtaaaatacatctcaagttagggaagaaagcagcggctctgtgctttgtttttttttttttttttttcttttctttctttctttttgtttgtttgtttgtttgtttgtttgtttgtttgttttggggcagggtcttgctctgtggcccaggctggagtgcagtagcgtgatttcggctcactgcaacctccacctcccgggttcaagcaattcttgtgcctcagcctcccgagtagctggagttacagatgcgtgccactaagcctggctaatttttgtatatttagtagaaatggggttttgccatgttggccaggctgttcttgaacccctgacctcagtgatctgcctgcctcagcctcctgaagtgctgggattacaggcgtgagccatcgtgcctggccaccagttgtgttctggcaggggaagatgggacagagaggatgggagggtgtctgagcctttcccggactgacggaacctgtgtcttctctcttttgtggacaggatggtgattgctcacaccaaagccttggacccctcccagcctgtgacctttgggaccaactccacctacgcagcagacaagggggtgagcctgggggtccccaccccatttctccctgcctttgcctgggcttgtcctgaagcctgctcatgggaacagctggaaagaaccatgtgctgccagtctgagctttttattttgttttacttagaaagatagagacagggtcttgccatgttgcccaggctggtctcgaactcctgggctcaagtgatcctcctgcctcggccttccaaagggctggggt

SEQ ID NO: 33849 - DNA, 2300 bp, Homo sapien
tgaattaccagatctccgtcaagtgcagtaaccagttcaagttggaagtgtgtcttttgaatgcagaaaacaaagtcgtggacaaccaggctgggacccagggccagctgaaggtgctgggtgccaacctctggtggccgtacctgatgcacgaacaccccgcctacctgtactcgtgggaggtaatggtggtttgggacttgcgtaagggaggtcttttgcccccatctggtagccctggcttcagcaggagcccaggacaggtgaacgggcaggtgtggtcctctgagctttctgatgtttcccacccttggtgggaggcccagattatttatttatttatttatttgtttgtttgtttgtttgtttgtttttgtgatggtctcactctgtcacccaggctggaatgcaatggcctgatcacagctcactgcagctttgagctgcaatcctcctaccttggcctcctgagtagctgggactacaggcacatgccaccatgcctggctaattaaaaaaattttttttgtaggccgggcatggtggctcacacctgtaatcccagcacttcgggaggctgacgcgggcagatcactttaggccaggagttggagaccagcctggccaacatggtgaaaccccgtctctactaaaatatgaaaatttgcagggcatgatggtgcacgtctgtaatcccagctactcgggaggctgaggcaggggaattgcttgaacccaggaggcaggggccgcggtgaattgagatcatgccgcagcactctatcctgggtgacagagtgagactgtctcaaaaaaaaaaactcctttttatagagttggggtcttactaggttgcccaggctggtcttgaactcctggactcaggtgatcctcctgccttagcctcccaaggtgtagggattccaggcatgagccacctcgtctggtcaaggagaaggcctgattttgaagggcaggtcccagggtcagccagtgaagggcagagcctctgattgctgcttctctgcaggcccagtggcgacttctggggtgcatgcacgaggggtcttcctgctgtagggcaggccagatggggctcaggctgtcggggcgctcacacctggcgctttggctgtcgtaggtgcggctgactgcacagaagtcactggggcctttgacttctacacactccctgtggggctccgcactgtgcccgtcaccgagagccagtgggtgagagccagtttcatttgcggtagaggcagcagaggttgtagaaatgctccttgaggcagatgccacaccccaatttcatggagtgatttgggctgagccgagtctgcagcaggcagaaggctctgagatgttgtcctagcctgggcaaaggacaattcagagctcgggggattaggggtgtgctcagcacgactgggtggacaggccgtttgttgtgaatcgtacaggcttccaggagcgggtgcctgaggcttccagacaggctttgggaggtggccagaggagatgcctgtttccggggcaggaaatggagggagggcccaggctggagaggttcagccaggctgtcacaaggctttgaagcttcccatctgagagcctggctattggagagtgtgggtttggaacttgaggctaggaggttctattctgtcctgtgccagccacagccttcggatgggcagagcaatgatggggggaagatgtaaaagaaaagaactgaggaaagaagaagaaaaccagcttcaacaacggtctaggccggatgcggtgggtcacgcctgtaatcccagcagtttgggaggctgaggtgggtggatcacccgaggtcaggagttcgagaccagcctggtcaacaggtagtgaatcctgtctctactaaaaatacaaaaattagctgggcatggtggtggacgtctgtaatcccagctaccaggtaggctgaggcaggagaatcgcctcaggtgaaccaggaggcagagattgcaatgagctgagataatgccactgcattccagcctgggctacagaatgagactctgtatctcaacaaaacaaaacaaaacaaaaacacaacagtctgttctgtggaggccttgggcagatgctgggagctctgagcacggactggtccctctgttgggagcctcttcccttcatccctcctggttaacttgactcagcataaaggccatttcttctaagagcctgtccctgactctccaatcggggatgtgtctgttgtctcatagagtgcccaattcctgccaccacttgtcatttcc

SEQ ID NO: 33850 - DNA, 2300 bp, Homo sapien
agttccagaccagcctggacaacctggcgaaaccccgtctctactaaaaatacaaaaattagcccagcgtggtggcgggtgcctgtaatcccagctactcaggatgctgaggcaggagaatcgcctgaacccgggaggcagaggttgtagtgagccgagatcataccactgcactctccagcttaggtgacagagcgagactctgtctcaaaaaaaaaaaaaaaatatttgaattttgtttaaatcgctaacacatactgggcatttaataacaaaaaaaaaggacatgagattgtgatccttatgaaggtttgagaggcatttcactagggttcaacatacagcagtctgaaacatactgtaataatttaatccaatggctcatctacagcacctaaaaagattacagcagattctcattattcagtgtagttacggtctagaaagttccatgaacaaataaaaagttaggtttcagcaagctactggtcacacttttgtaagcttaccaacacctacttttgttgtatgtgtgcttatttaatatatattgttggccaggcacagtggctaacgcctgtaatcccagcactttgggaagccaaggcgggcagatcatttgaggtctggagttcgagaccagcctggccaacgtggtgaaaccccgtctctactaaaactacaaaaaaaaaaaaaaaaaaattagccaggcatggtggcgcatgcctgtagtcttagctacttgggaggcgaaggcaggggaatcgcttgaacccaggaggcagaggttgcagtgagccaagactgcaccactgcactccagcctgagcaacagagtgagactctatctcaaaaaaaaaaataataataattaattaaatgaagaataaataaataatatacattgttcattcattaacattgaactcacagccaacggcactacagcactcacgcctgaatggagtttatttaatgcatgtattttctctgtaagacacatcacagacttcttggacttgtgaatgctaagcagcacttcagcactatgcttgggggttaatttaaatggcaaaacaaccaacaaacagtacaaaaacaggaaaagcatggcattaaatagaccacaaaaaggatacctgactattgtatgagagctgaaaaagaaggcagaatatcatcctgttcaaactcaaattctttgacactctgcgcaaacacatgactatgaaagtgctgtgagtactgatttgggggttacaaaaaatagtaggtgagttcacaaatacaaaagctgaaaacaaggaggatcgactgtattttcgtagacaatctaatctcagaagatttcagttcagacaaaaatcatgataattactgtattacaaaagggcactagataggggggaaagagtaaaaatcacaattaaaacaaaggttcaaaattctgcagcaaccatatccagttacactttaatatgtttgcggcagactacattattgttcccaactcatcacccctccctatatctaaaacctttccccaagacaatgcagttcctcctgctagagatcaggtatatttatctatactatcaatgttagccatggacaaggtatgtgctttggctgactgaatgttagtggacatgagagaagcaatggcttaaaatgtacttccagaactggagtttccttgtgattctatcactgtgacagaaacacattctcaggtagtccactgatccaagggggaacaaacacacagaaaacatacctagactctatctgcagcttgcagcctcaccaagccaacaacagtcaactcacagatatgttagcaaaaataaatgtttttcgtaccttaagttttatataattattgacctgcagttaactgatatacaatatacattaatcttaaaatatcagtatcccattaaaaatatttacattaaaaactgagaccactttctttcctcctttttttttttttttttttaaattaagagacagggtgtctcaatgttgcccaagctggagttcggtggctagtggctattcacaagaacgatcatcgcacactacctcaaactcctgggatcaagcaatcctcctgcctcagctttccaagtcgctgggactataagtgtgtaccacagcatgtcagctctctctctccttcttgacctaaagcctagcataaaattagctaagtagaatgtttccaaagatggctgcatcagtatctcccatcccacataatttctgtttgattttgccattcacccataaaatgg

SEQ ID NO: 33851 - DNA, 2300 bp, Homo sapien
actctatctgcagcttgcagcctcaccaagccaacaacagtcaactcacagatatgttagcaaaaataaatgtttttcgtaccttaagttttatataattattgacctgcagttaactgatatacaatatacattaatcttaaaatatcagtatcccattaaaaatatttacattaaaaactgagaccactttctttcctcctttttttttttttttttttaaattaagagacagggtgtctcaatgttgcccaagctggagttcggtggctagtggctattcacaagaacgatcatcgcacactacctcaaactcctgggatcaagcaatcctcctgcctcagctttccaagtcgctgggactataagtgtgtaccacagcatgtcagctctctctctccttcttgacctaaagcctagcataaaattagctaagtagaatgtttccaaagatggctgcatcagtatctcccatcccacataatttctgtttgattttgccattcacccataaaatggtgggatctacctcccctccttgcaaatttgagctggccctctgatcctgtctaagatctgaagccagatattaaggtacttcattaatttccatgtttgtcctctatgcaacctagcaatcaagcaagaagtcaaaacatactgacatagtttggatgggtccccacccaaatctcaccttgcattgtaataattcccacgtgtcaagggtggggccgggtgcagataactgaatcatggggatggttccccccatactgttctcgcggtagtgactaagtctcatgagatctgatggttttataaatgggagctcccctgcacatgctctctcctgcctgccactatgtgagacatgcttttgcacctccttgccttccaccatgattgtgaggcctccccagccatgcagaactgtgagtcaattcaacctctttcctttataaattacccagtctcaggtatgtctttatttgcagtgtgagaacagactaatacaataagttgataccagtagagtggggtgctgctgtaaagatacccgaaaatgtggaagcaactttggaaatgggtaacagggagaggctggaacagtttggaaggctcagaagaggataggaaaatgtgggaaagtttggaacttcctcgagacttgttgaatggctttgaccaaaatgttaatagtgatatggacaacaaggtccaggcggaggtggtctcagagggagatgaggaatttgttgggaaatggagtaaagtcactcttactatgcaaagacactgcaggcattgtgcacctgtattagaaacgggcatcagataggcgggaaagagggaaaataagaatttttttctagagttccctacagatctgtggaactttgaacttgagagagatgatttaaggtatctgacacaagaaatttctaagcagcaaagcattcgagaagaagcagagcatacaatttcagaaaatttgtagcctgatgatgcaacagaaaagaaaaatctattttctcaggagactgggttgtagaaatttgcataagtaatgaggagccaaatgttaatcaccaagacaatggggcaaatgtctccagggcatgttagagaccctcacagcagaccctcccatcgcaggccaggaggcttagaaggaaaaatggttttgtgggtccagaaccccctgctgtgtgcagcctaggaacttgaggccctgcatcccagctgctcctgccataggtaaaaggggccaaggtacacctcaggccatggcttcagagggtgcaagttccaagcctttcaggttctaggtggtgttaagcctgcagatgcaccgaagtcaagaattaacgttcatgaacctccgcctacatttcagaagatgtatgaaaatgcctggaaatccaggcaaaagtttgctgtgggggggaggggagggggggccctcatggataacctctgctagggcagtgtcaaagggaaatatggggttggagctcccacacagagtccccactggggtactgccaagcagagctgtgagaaaagggccaccatcctccagaccccagaatggtagatccactgacagcttgcactgtgtgcctggaaaagctgcagacactcaatgcagccagaaggggggctgtaccctgcaaagccacaggggcggggctgcccaagaccctgggaacccacttcttgcatcacctagatgtgacacatggagtcaaaggaggtcattttggagctttaagatttgcctgctgggttttgga

SEQ ID NO: 33852 - DNA, 2300 bp, Homo sapien
agctttttaaatatttaacagtatcaataatttttcaggttctgtgagaattttataatttataatttgcagacttaatgtataatctattttgtcctaacaattacaaatatattttttatttcagattgtatatattcctaccagatggagataattacagctttaaaaatttttattttttcattttatttcacacattgacattaaatttttatggacacataataactgtacatatatatggggtagaatgtgatgttttaatacatgtactcaatgtgtaatgatcaaatcagggtaatttgcataatgatttttctgtagggagaaaattcaaaatctactcttctggctattttcaaatatataatatgttattgttaactatactcatcctactatgcaataggacaccagaacttattcctgggttctacatccgttaaggcaaccaaggattggaaatattggaaaaaaaaattgcgtctgtactgaacatgtacagacttttttcttgtccttattccttacacaatatagtacaataactatttgcatgacatttacatcggatattatgagtgatctagagttgatatgaagtatatgggaggatgtgcaaaggtgatgtgcaaatactatgtcattttatatcagggacttgagtatcctttgttaccctcaggagatcctgaaaccagtcccccatggatactgagggctgactgtatagtcctatcctcacggaactttcattctaatgggggaagactgactataaacaaaatatatgtaataggtggtggtaagtaccgtggagaagtaacaaacggggcaaagtgagttatacagctccattcttagaaaccttggagtacttttcttagtttatactcgtggtggtttccttttgtctcctttattacatgggactctgacatgtgcccatagctagggtgacagtaggatctacccgatagtagggtggcagtaggatctacccaaaaagcatcctgctgatacaggaccaaagcatcctgttgttctcgagcctataaaaagagctaatggtcttgcttctcttaactgtggcctcctacactgtgttttggatgattggtgatgtcttggatattctgtttctttggaactttgaatatacaacactttactagggaattagcaatggaagcagagcaaagatgtacagaggaaacaatgcgtaactctgatggaattgaagtcatgaggcagcagagagcttaaattacagctttaaaaatttttattttttagagggaatttacttgggagtaacagcagtaatagttaacggagccagaatgcttgagtcatataattgcaaagcagagttgggagcaacagatgctaaagagtagttgctgtagttcctctgtgggtcgtaggagcagttgtcatattactatatagctactgcatgaagaagagttcttagtgaggcctgggtgaacagctcttcttagtattctgtgtgaccccatttgaccttttaacaaatccctaagtaaataaatagcccctcaggaaaactaagtttttctctgctgtttttttgcttgagagagctataactgtaatagacttatatttctgaacattttagtgcttgccaatatttggtaatatttatgtttcctatatttgtaatgaacattcttcttccggtacattttttgttaaattattgtttgatggataaaagttcaccttttattgtataaaattgactgagattaatttatacacattgacaatgggtaaatagaatttttcagattattaaaagctgaaggatgcccacgtaagcaaaaaaaaaaaagaaaaaaccaacaaaaataaacccaaacccctcaaacaatttcgaacacgaaacattcttctgatgccggcatccctgcttgcaggtgtgaagggggcaggaatcagcgaggtgtcctgggctgagtccccggagtgggaagaggtggcaggaaggggatctgaggaggagaacaggggtcctggtggtctgtgcttcttcccagacacgggagctgtagaggagacctctgcagcagatgctaggggggccagtaggcccaggcagtcttgggacttgggtctgtcctgctgtgcatccatagtgggtgctttagaaacgggaggcccacccgaagcccctgttgcaagtgaggacaaagtgtgggaaggccgtgagggtctgcagtccgggatggccttgtcctcaacgtgcagtgcactgttgatgcgctgga

SEQ ID NO: 33853 - DNA, 2300 bp, Homo sapien
attctgtcatccaggctggagtacagtggtgcgatcatggctcactgcaacctccgcctcccaggttcaagcaattctcccacctcagcctcccaagtagctcagactacaggcgtgcaccaccacgcccagctaattttcgtagagacaaggttttgccatgctgcccaggctagtctcaaactcctgagctcaagttatccacctgcctcggcctcccaaagtgttaggaatacaggcataagccaccacgcctggtcaaaatatctactgtttaagctacctaatttatggtattctgttttagcagctgaagcagactaagataccatccttataagctacagaccagcactatccaatagaactttatatgacgagcaaatgttttatatctgtgctatcccttatgttagccactagccacatgtatccatcaagtatttgaaatatggctagtgcaactaaagaacttaatttttaattttctttttttttttgagatggagtctcgctctgtcccccaggctggagtgcagtggcgccatctcggctcactgcaaactctgcctcccaggttcacgccattctcctgcctcagcctcctgagtagctgggactgcaggcgcccgccaccacgcccggctaattttttgtatttttaatagagatgggggttcaccgtcttagtaaggatggtctcgatctcctgacctaatgatctgcccgcctcggcctcccaaagtgctgggattaccggcgtgacccaccacgcccggccaatttttattttatcttatttaaataaccacatgtggctagtggctaatgtattgaacactacagctgtagacaatacgaaataaatataaagcagtctccactttggaaaaacagaagactcttactgcctcataatatagatgaaaaatgaaatactaagataagtaaaacgttctttaaagaacaaaaacaaaagaaaacctaatgaaagctataaaagtccatgggataataatgctaccagtactaaggaagtacagcccctaagagtgatttgcagtcacaaatataaaaatgactattcaagtgaactcctaaggtgaaaatttcttattcaccatgctccaaaatggtctgtaatattcttcagagatggcatggtaaagtacgataaaagggtaatattaacagtatgctgtcacaggtgccattctcttaaaaaagaaatccaaaaataaatataaatggaaagcaaataattaatggagttttgacggtcaatcaatggtaaatattattggcattagatttttctattaattatagtttacctatgatcatgtatttttccatttaaaaattaccctaaaacttaatggcttaaaataacaaatatgtatgacacaattcatagaagtcagggaaatgatggatttgggtaggtggttctgactcaaagtctctcatgagtaaaggttgctgtcatgttgttgacccaggcagcatcccctgaagcctttaacttgtgttggaaggtccgtgtcttagtttgtttgcactgtcgctacagaataccatagacagggtagcttataaacaacagaaacgtttctaatggtaccggaggctggatggtgcaaaatcaaggtgcttgcagatttggtgtctggtcagagcccattttttagttcatagtttactgtcctctagctcacatggcagaaggggcaaggacgctttttggggtctcttttataagggcactaatccccggctgggcaaggtggctcacatctgtaatcccagtactttgggaggctgaggcaggcagatcacgaggtcaggagttccagaccagcctggccagtatggtgaaaccccgtctctactaaaaatacaaaaattagccaggtgtggtggtgcgtacctgtagtctcagctactcagctactcaggaggctgaggcagaagaaacacttgaacccaggaggcagacgttgcagtgagctgacatggcaccactgcactccagcctgggtaacagagcaaaactctgtctcaaaaataaataaataaataaataaaaataaaaataaaaacaaaaaataataatcaaggcactaatccccaacatgaagacagactatcatctaccaaaagctccacctcctactatcattacactgggggttaggatttcacaaattcagtgcatcatagtctgcttctagaatgtttaatcatttggctggatatcagataggatgcctcggttcttcatgtgagctttctagaaa

SEQ ID NO: 33854 - DNA, 2300 bp, Homo sapien
tttaatatgaagtaatgcaatacgtatttatgttctaagtgttaatttccttggatataaaataatatcttgttcctttgattctcttacatataagtgtatttactcagatattactccaaatacaccagatatattcaaagttgaaaaaaaatatactttggaatgtattatcaccttatttcacatgaagaaatcaaaatctctggcatccaagtgcattccagcctgaaaaaaattatgcaattgtgaatttaacagaaagcaaattgctcacatatggagtcaacgtgaagctatatcaatatttattaaaagtttatatattacttttgatcccctggagagaaatacaaaattcaaataattattctatttttatatcccaatttgtaattatgaaactctagcattttaatttttctctttcaagtttacctgaagcttcacaaaattctgtgaggaatctattataacaggtattttgcttatttccacacaaacagaaggaaatgtgtattttctatgccctgaagaatttactcttttctgtaaatgacatatggtagttaattctttttggtaataaaatattcctgtttttaggccgaacagccttttctttaaattcagggcaacatatcaaagctttgccgtaataatacagagtaatcgactaaagtaatatagaatttaaataacaaagagtttaaacaatttaatatgtcttctattaatttcaaactgaaattttacagaaattatttggaatatgctgccagagtacacacacacacacacacacacacacacacacacacaccacacgctcacatcacacactcacacccagctaaaggaaattaccacagctataatgatttcattaaatatctgaaattaaagtttcttttggattttcagctgaagctcatagtaaataaaagtaatatgatcattgttgcatactgtgaatcaacagcacccagaaaccttcgactttctatatttacacagcttaattatccgaactgaaacctgaggccatctgtgtcaacatgatttcacaattcatttttcaggaaagtaaggctgcaaaccaataaataacttattgtttgcttcaggaaatttctgcaaatcaatttatgtcagtaagcaactctcctctgggccaacagattgctcacctgggcaggtagcagcttgtgtcaattaacagtttacttatgaagacttctgtcatggcccttaactcacagtgtcccccaatcctaaactctatgtcctgaacattacctattcttatcagtcattggtcttgaaaggccccgggcaaccatttgagcccagacttcaatactctatcaataccaccttatcatctacttttctaacatgacccctcaaggtggtgaccccacttacagtcgtcttttattgaatttagctttccctaatcaacatgctagtctattggatgcagtgtcggaggcaaaaatcacagaggttctgaaagcatcagcccatggttttctaaacatcatggttcaagacccttaacacgaaacagaaagtttccccgaggcgccgtaaacaacccatttgggcgcttccctgataattatagtgaaatctggcatctaattttttttggtggactctcaaattttatatttatgttttgattcctagaaataaaaaatgtttttataaggaattctttgatcgtttatgttttattcttgatagaaacctactactttataacttcgtttatgttttactcttgatagaaacctactactttataacttcgaacattattgatgttcttcctgtatttctgagaggtgacagcttgctggcatccctcgctggctctcggcgcctcctcggcctcagcccactctggccgcgcttgaggagcccttcagcccgcagctgcaccgtgggagcccctctctgtgctggctgaggcctgagcgggctccctctgctggcggggaggtgtggagggagaggcgcgggccggaacctgggctgcctgcggtgctcgcaggtccagcgcgacttccgggtgggcgcgggctcagcgcgacttccgggtgggcgcgggctcggcgcgccccgcactcttgagcggtcggctggcgccgccggccctgggcagtgagaggcttagcacccgggccagcagctgcggagggtgcactgggtcctccaacagtgatggcccgccggcgccgcgctcgaattttcgctgggcctcagccacctccccgcggggcaagggggca

SEQ ID NO: 33855 - DNA, 2300 bp, Homo sapien
cacatttttcataccataaagtcaacttaagtcagacatactagacaagctactggctaaatttgaaatgtatttctacttaatttttacttagcttttgagagttttgattacataagtaatgccaaaagaatgccacacaataatttcaaacaacagagaaatgtatacatttaaaagtgtataaagtaaaaagagaagtaagtttcctttcgcattcatccaatcctgtatatttgtatgtgttttttcacaactgcctctgtgcatgtgtgtatgtgtatttgtggctgcatatgtataaactaagaattttagtctataaacttacagcaaatattgacacatttatttattgctgttattgtttttattaaaattgaatcatatcctgagcccccaacttgccattacatgaactaagttcttcccatctcaggaatcagaaaatcccaagaatctttatcacaacagaatgttctgggagagtccccttggatttaggacacacaggtcaccaaggaaatggccctgtgcaaactcacaccatcatgtgaagtggacatctgcattctagtgctacacagactacaccatctgcttcagagagtttgcaggtgatcttctctcagtctgtcctcctcacatttcaggtccttcacagagccaactcctgttcactgttatcctcagcctgaaatcacaaagcttccttatgtaggccttctttatcaactcagattaaattaaaacctttcctcccagtggacaacaaggcactttttaatgtatccattatcatacttctcaaatttatttttgccaactctctgcttccttactaaactatggtatccataagcgtagcttacagtgctcaacatttattcattaattggacagatactcactgagcttctactatggtgaattgatgtgctggatgctgagaataaaacttctatttgaatggcatgattctctctcactgtccctacctttgagacagatgtgaataaaaaagccacacattattacttaattagaatgataagtgttatactatctatgtgagtagttggagcaagttagtctagtgagagaggtgagtgtttcaggaaattctctggaaaaatttgtatgtaagttgagacctgagaagtaaacacaacttcattaggagagaagagcatccttagttctttagtgagactggaaggtgtgtggagtagaagccttagagaggaggaggtggtggaaacacattctgaaagaagaagtattctaaagccaggctggccagcaaggattttatattaccgaatcttttgggtttttttccatgagaatactgtgaagccataagcaaggcagcaatatgagtagatctgcaattagaacatgatggtggacttggccaagatggtgaaaacaaacagaatagaattgaaaaatattttggagttaaaaataggagaatttatcgattcactgattgtgggtctgaggcaaagaagataaaagttaaaaaatataagaggaaaagcaatagttaacactcataatgcacttgctaggtactaatcattaagtttctcacatgtattagtagatttaatttgcacaataaccataagaagtaggtgctattattactcaaacatcatcgatgaggaaagtaaatcaaagggttaataaataacttgcccaaagttgtacggccatagggtggtttggttccagaatctattacttacacattactcctgggcttttggaatgagaaactgaggatggtgttgctataaactggaacagggaacattggagaagcagtgaatctgggttaaggcacaagatgatctttgaacaggttgaatttaaggtgcctctgagataggcagctagagatgacaggtctggcattctaaagttgaatataaacagaagatatcattttgggacttatcaaagtagaaatgataatgaaagccatgagatgcatgaaagcattcaggattacagtatagagtaaaaaaagaaagcctatatgaagtagaggaaggggtattggcctcattgtctagggaggaactgctagggtagtagaacaatgggattatgctgtcacaaaaaacaaagaaaaaacataatttcttaaatcatggtctgtcactgaatctggttataaaaccttatcttgcactagaaggatctgtagcttttccagctgagaatggggttcaggataccgaatcaacactagaaaagagagaaactggggatgaagaaaactcagc

SEQ ID NO: 33856 - DNA, 2300 bp, Homo sapien
attttgatcagttttaacatttgggaacttccaaatatttgttaattttatagttacagtaacctgacttttagtggtgggtttcttctgtactgactatgcaacattggcaaatttgcttaacttctcagagccctaacttaattaattaaaaaaataaaatattataatgtctgcttaatagaattggactaaggggttcatggatagctatagctgaagtgcatgccagtcacttactacatagcaagcatgtaatagacagtacctgttattttcatgtgactacggtctcccctcactcctccaacaaaatggtcttattttgctttgttcttcatgtgtgtagtttcacataaaatcaattagtgttccaacacaggttaaaaaaactactgaagagtcatcatactctctgtagaaaccattcagggttttgaaagacctctggattttatgagaacagaaaggctgattatttggaaatgtcatcagggcagtctcatggagttggagtttccagatagaacccatctactatggcacagagtttcgtgtgcacctgttttagttggtgatgatgattgcaggttggctggcagggttcaggaaaataagccgtgtcttaatgttttaataagttttaaaaatagttcacaatttaagatcctcagaatgggacttagaccaatatgagaaacggagtgctttaattgcatgaccaactacacattagagccctggaatctatcccactgttatttacaagtattgtgttaaagactagttggaaccctctcaggagaaattagcagttacattttcttatttttacaatttatgctcaaggtgcatttacttcgatgtaagcagcctcttttctactataacactctcatgccaatctaaaattggacaatgggtttcctgctttacagcagcaaaaattgttctccctctcctgaagtggttgactgggtttcttcacattcggctgtcaccctccaccagctgagggagcaagagacctctgcatgggaggctacagccccacctcctgggtctcctgcagggccgtctccgttttcagagtaggatgagtacctgccttagtaacagcaattcagttaccctgaagttttactttgtccaaaaagtttcaccaagagcttgtattttaatgagatactttaaaaatatatttgggaatgtataaggcaaacggattctctattatttatacttagtgcattcgcctactgaaatttgagggttttctaagatatatataaatatcacaatgtaaatatagcttctcgctcttcctctctctctttctcacacacacacgcaagcacacgcacccacccacacacgcacacacacatcaaggaaatgccatatgtcccaagtgaggcccactggaaaaaaacaaaagtgctgaacatatcactcaggatcattgtgagaggacagtcgtcagctttctctctggcaatgagaattttctcaccctcaagacatgcaaattacttttttcatctgttctttttatgttatttgcataattttctcctgcaaaagtgagagctgtcaaaaattaaccatttggggctttggcattcagttatgtgaccttttccagagagttagatctcttcagggaactaggaacttgatgaggaagtgctgagaaggtgatcagtggcagaaagagcggatgacggatggggaccagcaggttggtaacggcacataactacgtttaaaaagttgttagatattttcgatcctctcatatgcttgtttgtttttgttttagtaaatcagtgtttcaacagataatcaaagagatgattcggttaggtgtagtgctgtattctcctacgttactctggttaatggtacaatgcaaacattttttgcaagtttaatgctaattgaaaatgccgtttggaaaactacacaagcaaggctgtgttcatgccgtggtttgagtgcttgtgtctgtagcaatctgccaaatatgcttatttagtatgaatacttcctttttataaattcagagagttgcactctggagggctgtaataaacctttaaattcattttacttcgacaaaggttgaagtatgtagcaggcgagcgtcagggacaagtgcagctatctctttgatcacatcgctttaaacatttttcagctttaagcttgtcttacaagtcagctctatcagtctattaattgtttcactgtacctaatatcttacacgaaggcaccttgaaaaacagcaggagaaagc

SEQ ID NO: 33857 - DNA, 2300 bp, Homo sapien
accatgttggctaggctggtcttaaactcctaggctcaagtgattcgcctgcctcaacctcccaaagtgctgggattacaggcacgagctgtgcctggcctccagaccttcattttcttcatagtcttagagatatatgttttctcttctctgctttcagtcttgccttcctactctcaaaagcacttgcctcttttttgttctccctttaggtgatcaatttcttcagtcagttcagaattttattcctttgaccttttgttattaatgtatcaccatattcttgtaggattttcttttccttctaagaagaaagtcaggcctttgtgttcccatgagtcaggggatttgtatcactggttcaaacattggcccaatacctccaaggccaacctcagctctggctatttttcctctcatcatagaggacttccctagccactctactgccagcctccctcccattactttctatcacatcatcctgtacatttctctcttttttttcttcttattattaaatttttgttttaaggacaaggtttcactttgtcacccatgctggagggcagtggcactatcatagctcactgcagcctggacctcctgcctcagccttccaggtagctggagctagaggtgggagccatcacagccaccgcatgtaggtaatttgttttaggggtctcaatattttgagcaggttggtctggaagtcttgggctcaagagatcctcccacttcagtctccacagtagctgggattataggcgtgcctcgccatacccggcattcaacccttaaatttatttcatgacatttgatatactttattttattgcaattaattaattaattcatttattttaagacagagtctcactcattctgttgcctaggctagagtgcagtggtgccatcttggctcccggcagcctccacctccagggttcaagccattctcctgtctcagcctcccatagctgggattacaggcttgcaccaccaggcctggctcatttttgtatttttagtagagatggagtttaaccatgttggccaggctggtctcgaactcctgacctcaagcaatctgccttgccttagcctcctaaaatgctgggattacaggcatgaggcacccacgccgggcctgatacattttaaaaatatcttgttcatttcttttttgtattttctcctcccaaatccagaacgtcttgtttactgctacctcctgaagcagattaagaacactcacaataatttacaaggtttcaactataataatttttaaacaggctggagtgtagtggtacgatctcgggtgatacattcatattaaaaagtacacaaggaggttgggcgtggtggctcacgtctgtaatcccagcactttgggaggccaaatgggtggctcgcttgagcctaggagttcaagatcagcctaagcaacatgatgaaccccgtctctactaaatatacgagaaaaaaaaaattagccgggtgtcgtggcgcgtgcctgtggtcccagcaacttgggaggctgtgacgggaggatcgcctgagcccgagaggtggaggctgcagtgagccaagatcgcgcaactgcacactccagcctaggcgacagagcaagaccctgtctcaaaggacaaaaacaaaaaagtacacaaaggcgtacggtaaatggtcttcctaccacgacgtgttttccagaaacacattcctctcctgggaggtaactattatcagtttcttcacaccagcatttttaatctatgtctactcaatttagaatttctaaacccttcaggatcttcaaaagacaaaatcggccagcgattttaatagttccagtaaaggtttgagcagagaagtggactttcttctgttcctcttttcaactactcctaaggactcctggagaagaaagagcaaatatctctgcatctcaatttctggtccgcaggtaacccagtctcagtagcttggtagttaccatggctcccagtgctgtgcgtctgacgtcattctgcggcgctggctgatggcgcaatcagttgcggcgtcctgtgagcgcggggatgctgggaggagggtgaaatttagccatcggtgtgtggcagggtcatgaaaaagcggcggcggcgggagagaggaggaggcggcggcggggcagtgaaactacggtagctgccccctgagctggtggtgtggctttgtggggagggcgtagttcctaatcccctttccgggcagccgccggggctcggggctgtgagcggccgtgaggctgc

SEQ ID NO: 33858 - DNA, 2300 bp, Homo sapien
gaatgtggattatttcttcattttagcgtttcatcttacttattcatgttgaagatgaggctttgttttgctgtttataatatgccaaaatgaaatgataaaactttattttgacagcttgaaataactgtgaatgtcccagatgtaggatgcatagctgttgttgaacatgagctaccaaacacagatgtgactactgaagaaatgaaacaagaagaaaatttgagtgtaccgtttgtaagcatccattttaatatgttttggccttttattctttgtttactttgaaaagactggaggttccttttgatagctttaggtttataaacactttacttagctaatttctctttgtaaggagctgttagtctgagtagtaaaaactagtgaaagcaatgattttgtttgtttgtgggcagagctcttaatatcctcatagacttttacattaaaattcagttgcattaaatttatactaagtataaacaagttaaaatatattctgttgcgttttatttgcactcttccattattggtatttatttgcctttgcaagcggaggcttgaaattgtaactttttaaaaacagctttattgacatataatttacacaccatatgattttctcattatttaaagtgcacaattaagtgacttctagtatcgtgcaaacattatcacagtcaattttaggacattttcatcacctcaaaaagaaaccttattagcagtcactactcctttcctcccaaccctcactggcctggggaaccaataatttgccttctgtctttatagatttgcctgttctagatgtttcctagacatgaaattataaaatctgatcatttgtgtctggcttttttcacttaatgtaacattttttactgttcatctatgttgcagcatgtagtggtacttccttactttttgtagcctaataatattccatatggatatggtacattttgtatatccattcatccattcatgaacatttggattattttcattttttgtgtgttatacataatgctgctgtaaacattcatgtagaagtgtttgtgtacaatatgtttttatttctcttgggtacatttctaaaaatgtaattgctgagtcatatggtaactctatgtttcatcagttgaggaactgccaaactgttttccaaagtagctatacccttttacattcccaccagcagtttatgagggttcctgttcttccatgtccttgccggcacttgttatttcacttttttttttgttcggtggatttttttttttttttttgagacggccttgcattgtcacccaaactagagtgcagtaacacaattgtagcacactacagctttgacctcctgagtgtaaatgatcctctccactcagcatcccaagtagctgggactgcaggtgtgtgccaccatgcccagctaattttttttttttgtagaggtggggtcttgctgtgttgttcaggctggtctcgtactcctgtcctcaagtgatacttttacctcagccttccaaagtgttgggattacaggcatgagccactgtgtctggcttgactttttggatctagctgtcctagtgagtgtgaagtggtgtcacattgtggttttgatttgtatttccttggtgactaatgatgtcaggcacattttatgttcctattggccatttgtatatcatctttgagaaatgtctattcaaatcttttgtctgtttttcttttattgtgctatttgtctttttattattgagttgtaaggagtctttatataatctagataaaagttgcttagcaggtatatgatttgcaaatatttcctccctttctgtggggttgtcttttcactttcttgatttcctttaaagcaaaaagttttaaattttgatgaagttcagttaatctgttttttcatttgttgctcatgcttctgttgtcagatctgagtcctttgtcaaacccaaggtcatgaagatttacccatttttcttctaaaagatgatttttgcttttacgtttaagtctttgatccattttgagtttatttttatacatggataacctcattatccaacttatgtcttttgcatgttgctatccatttgtcctatcaccatttattcgaaaagactattctttccccattgaatagtcttggcacccttatcaaaaatcagctgaccatagatgtatgggtttatttctgaattctcaattctgttgcatagatctatatgtctgttctcatgctggtgatgctatattgattactgttactttgt

SEQ ID NO: 33859 - DNA, 2300 bp, Homo sapien
ccaggtagctgggattacaggcacgtgatactatgcctggctaatttttgtattcttagtagagatgaggttccaccatgttggccaggctgctctcaaacttctgacctcagataatccacctgccttggccttccaaagtgctaggatgataggcatgagccactgcacccggccaaaacaggtatgacttttaaagaaagcaaggaatcatatcctattgtgtcttttctgtcttcgggtggtgattttaagtactttgcatcattgaagaactatttagagaaaaataaagtgtggcaattaaaatatcaaaccctctcttctgataccctgatacatatgaaaagtcagtttttactggcctttttttctgttgaccatgggaggcaagcacagtgtaaatcatacctttgcagtttagctcatgctctcctccatttgcacaaagcctggccatgttcattgctcagtccactctcaacgcttctgcaaggctcagctgcaaccctttcccaattgcattctgttcctttaatgtctgtcctacacagttcagtaagaaatcatgtggccatttgtattattttcttataagtaccttgaagtctgaacctaagtttacctccaggtgtagacgcaccctttctctaccccatcctccccctttactctgccccactaagcaaccaatggagtagaagtagtaagtgctcaataaatatgtgaatgaaaaaccttaagttcaaggcattttgtatagaatgttttaatttttatgggtatatttggagtcctttatttaagaccacagtgctgatgtccacaatctgtcactacatagtgcctggtgtggtggctcatgtctgtaatcccagcactttgggaggctgtggcgggcagatcgcttgagtccaggagttcaagaccagcatagccaacatggtgaaacccctacaaaaataaaaaattagccgggcttggtggcacaaacctgtagtctcagctactggaaaggctgaggtgggaggtcaaggattcagcgagctgtgatcgtgccactgcattgcagcctgggcgacagagtgaggccctgtctcaaaaaatgaaataaagtaaaaaataaaaataactacatagcgaaaataatcagaagaatgtttaaggtctccagtgaaaggacaacaggcttgttgtgctgttcgcaagcacgtgttagatgcgattcactcatgttgttggtgtgtcactgggggttgtgactgcaagttgtccaggttcttggcattgtgaacaaagaattggacaaaacgcccagcaaagcaaagaaagaacaaggcaacgaaagaacgaaagcagggatttaccgaaaacgaaagtgcactccacaatgtgggagcggaccgagcagagctcaagggcccggatatagaatcttcttgggtccaaatacccactagaagtttcctattggccattttatgctcacctcaaacccgattggttgcaagaagcaagcagtcagaggctagggtgaaattacaaagttatacttctatgcaaacgaagactggacccccaatcagtctgattggttgtggacagcaaccattcagaggctggagttaaggttcaaacttggcaaagcaagcctccaccagcagtaagtctgatttgtcggggacagccaatttcctatctgccctgcggaaaaggtgggggggtttgcaaagggagtagcctttggtccttttgttacttaggcatggaaagttagggttttcctttcagtttagctctaggaagtcagcgtgagacagccttaggttccctgcttccagacttattctcctgccttaggtacagtcactatcgtgatattatctatcgctgtgtcaacacaacaccaatccaagcccaaccgcagctctctcactgccgcaccgcttcgtgagggtcgatccgccggggagacctgctctcctgcgctcgggactagacgcgacctcgcggggctgaggctctgtcccttattggctgggtcagggggcgtggcgcggcttgaccaatcgcgggcggcgcgcttaggcacgtgtgtggacaggcctgagaatcagagaaaccttctctggggctgcaaggacctgagctcagcttccgccccagccagggaagcggcaggggaaagcaccggctccaggccagcgtgggccgctctctcgctcggtgcccgccgccatgtgggccgtcctgaggttagccctgcggccgtgtgcccgcgcctctcccgccgggccgcg

SEQ ID NO: 33860 - DNA, 2300 bp, Homo sapien
tataggctagcacatcattataattttttttttttgagttggggtcttactctgttgcccaggctggagtgcagtgacatgatcatagcttactgtagcctcaaactcctggcatcaaatgatcttcctgccttggcctcccaaagtgctgggatcacaagcatgagccattgctctggcctttattataattcaaattgacctttcttacataaaaattgttgaatggtttatatcatcactactctttctctgacaaatgacagatgagctgaatttgctcaaattaagcaaaaaagaggatatattgattctcttatctggtgagtctgggcatggctgtatctgggagctcaaatggtcttaggtattactaggtcccaggctgttttctactcctggccctgacttgctgtgtgtcagctttgtttctaggcagcctctctaaatccagaggcagtgatggtcataggcagttcctggtttatattctataagtttagcagctgcagtggaaggcaagatctgcttaggcttagagcctgtcccattgccgagcctcagtgggaactctgggtagaaagacctggtccctgtgcccccctttaaggcaggctctggggtcagtcctacttgagccacctggattaaagataagaggcagtttctgaaagaaggtttagttttgttgccaaaataatagatgctgggtaggcaaaaccaatagaaatgcaatctagtatttttgtgggccaatttgatttctcattctgtaacaagtctgtgacctttaatagacaagcagatatggctatgtcccttgtccatggtcacataactaacaagttggcagagccagaatttcagtctaactttgtctgacttcacagcctggcctctttccagtaccagagcttcttaaactttctagcgtagcacccccagtggtaggaagtatgagcacacactctggagtgtgaggttatggcccagcaacctatgagaagcctacatttcctttgaagtctagttcgtttaatgttaaatcattaaaagtttgcattctactctataaaatgttcattgcagtgcagaaaaaggttttatatgacctagggaataaaattgatgctcaaagaagagtcctgtttgtcttgtggcgagccctgctggccacatatcctagtatgagaagctcaacactaccctgtgctgggtgttcagttgccgttctctattttcagcagggatttaatgactcactctttagagttgtaggcagcataaagtgaggtaacacaaacatcagaaacataaagaaaattgaattttgtaaagagcacactgttgtcatctcagatttcaagggtacctctgaccttaaggtttcctgccagtgctgtacagtttccccaaccagctgtggttgttggccgccctgctctttgtgactcatacccaataaactggttttggtgagaaagggcactgttgatgactcaggatacctttcatgtgtttttagtatattaaagtttgcattcattctgacttcagttaagatgaacgttatattttagactacatttagttttgtagaaaaccatggggctgtaatgttgaagaacaagaatacaaaaaataaatcttagtactaaaggtcagttttcatttttgcaaaataccctcctaaaaggagactttgaaggtttattatgagggaattcttttcccttgagacttggattttttttttcattattattttcatcttattaggaccttttcattcaaagaaccattatgacacaaggcttaggttgttagttttttattactaatctaggactgatgacttttcaaaaaccaagtgtgagtttataaacttgttagaagtaattgttttgtattatataaattaatatgtgaactgtgattaaagtttgcatttatatcctaagactgctgtctgctaatggatgttaatagtgatacgtactagaagttgaaggttgtattggggtatcttgtaatgagtgtaattagttttgaagaaatctcttaaattctctctccaatgaaatttctgcctttcagagtagaatgcatgattattgccaatgatgccaccgtcaaaggaggtgcctactacccagtgactgtgaaaaaacaattacgggcccaagaaattgccatgcaaaacaggctcccctgcatctacttaggcaagtcaccagagtggtaaaataaactattattagctggtaaaatgcaagatagtttggaaggctgtatgtatt

SEQ ID NO: 33861 - DNA, 2300 bp, Homo sapien
ttctctgattctctggtatccttcattatatgttgcagagtgtctgagatatacagggcactcagatatgttggttagcagaaaacagcctcccccatcccaggctacctcagcttcaaaggaaggagaggctcttagtacttgttgggatcatgcaagcctctttgagaaggaagagtcaggctcttggcagtcaacagggcttgaaatagtactggtgctaaagcatcttcatcctgtgagctacttaggttcatgatatttggttagatgaatgttgagagaagttatatccaaatggcagcctaagagggtcctgcatggtaacttatgtaaaagggcagatagaaaggattctgaagcctaactataccagagttcttgtttttaataatgattcctggattgttaaccaccaggcagttaaaactctgtggtttgaagatatctacatttttgttttgttttgttttggccctgttgggttgagtttagtttttcagcattgcatttgaggttcctgtgggatattcacctggaggcatatagtgggcaggtgaataagtctcagcacaggagaggtgttttaggtagagatgcaaatgtagacatcatcagaatatggaggtaattttaaagctgtgggaatagataagaacccccctgagagaagagaagaaggttcagtgacagtcttcgagtacctctgattttttcctttttcttcaagagtaaaggaagatggggagcatgattatgcagttttcttaagattggaagaagaaggatttgagaaagcgaagtgagatgcctcactcttctttttgaaggcaggatcccctccagagaatagagggatggtgggtcgggttgggtggggtgagaacttgaagacagctgatatttgaagtaggtatggtgggaatgttacaatggagtcaaggctggggagattgaggagtttctgagcttttctgagggtccagctgagtaggatagctgcaggaagcagatggtgccaagtaaagggctgtgctgccattcctgtggtgactgcagaaggcacacgtgctctggaggaactggttgggttgaattggatgaccagatactggagtttggcaaaccagggatagtggcagtcaatgaggcaggtgagtctgcaggcccacagatggaagaaatgcctttgctggagacttgcggggtaaggagacaagcgaagcccaactcagtgttataaggcagagaaagaggaacccaagttctggaaggcagtgaagttgcagagcagcctccacagagctaggggcttgaagaaatagaaggatcctctattgaaatggaaaaatagtttttttttaaccttgctattgagtcactggcagggactgttagcatctctatgaaacattcatctttatgtcttcaaagtttcaaagcatcactttagaaagaacagtctgttttaaaaccaggtcagtgaaagctaaagccctcatagttaggctcatcacagcactttgtccttaactagccatgtcacattcttttcagcatcaagctgcttctttgacatcatctcctttttaaaatttttatttatttatttttaaatagaggtagggtctcgctttgttgcccaggctggtctcaaacacctggcctcaactgatcctcccgcttaggcttcccaaattgttggtattatgggggtgagtcactgcacccagccaagatcatctcttgaagatagattgcatcctcatattgtttgaaggtttctgtgtgcatccagatgaactgctttaagaaaatttagaaagtgattagagaaaattttattttatccttttaaagcaaactttttaacggtatgtttcacatataaacattttcttaaggcgagaggcatttagtaagatgagtttagtaaaacaagatgtccttttggtggaattgcgttccgcatattaatcccatcacccagaggctctctttctgatctttctctcaggatttatggttggtagagagtatgaagctgaaggaattgccaaggatggtgccaagatggtggccgctgtggcctgtgcccaagtgcctaagataaccctcatcattgggggctcctatggagccggaaactatgggatgtgtggcagagcatataggtaggtgtcatgattttctctgaaacaaagaaacatgcttcaagtataaaatacatggtcagtttatttcaggtgtatttgaaatatagaatgccattcccagatctcaatcaattataccgtaat

SEQ ID NO: 33862 - DNA, 2300 bp, Homo sapien
actcaagttcagcaagatttaaactttggatttttttccaatagaagtagcacaaagggaaagttattacttgtgtctgggtagaacaaaattggagagaaagtattgcattgacaatatctacatccttcaggaagaataggctaaaatcttatttgagattatttttcttctgaagcttagaatagtttaaagatcactggagatggtttttgcagtgagtgtcaatatgtctctgtaaggttttaacagtaaaacgtgctgccactgaagttttcttgtgcagaatcaaaaggtatgtgtggaaggcagagctgagggaggtgttagatacattttcaagttgggtttaccccacagcaaaatattttgatgctgttaatatgtgtgctattcattagaagagatatcacttcttgaattgcttcccagtgagtatttgagtaccaattaaatacttgatagttgaagtaaccaggcatatattgtgtattaaactatcttaatgacccacataatctgctatgcaataaatttgtgggagaaaagtattgatagatggtttggattgagtagtcatagatatttacactgagatttaaataacagaagtagtgagccttttggaaatacaggaagacctttcaaggaggggtaagtgcaaagacatcaaagtatgaatgagattggcctgctagaggaccagaaagaaggccatgtgaggttggagtggaggagtctggggcagagtggtagaacatgaggtggagaggggtgaagatcatataatgctttgcaagtcaggatgaggaatctagattcagtgcttagtaagattaggagtcattagtgtattttaaggggaaaaatactctggttggtggtgaactatggagtagaggaaggcaagagaagatagggtggggattaagtggtagacattaagttgactggggcagctgtctaggactgggttgtagtaatggggatggagaagagtggatgaatttaggaacagttgagggaaagatggtgtggtgaaggaagccaggtgagcaagcaggtctaagcgggaaagcattgcttttcctacaggaattttcctgtgcattcaggctgtaaggatctcaacttttaaaaaagccacattgttctcccaagttgttggggagctggttcaccattgacttctgatctctggagatattttcataatcatggagctgtctttcttttcactcttttactctctttctagacaggcttcttggataccaagggttggtggtgggtggggggaggttctggggatggttaaatttgcctgggcagcctcaaagttcaaaaaggagggacagggaagcttagctaagaaccaggagtttgacatacttaatctctcatttcatcctactgatgactttgtgaggtatatctttttaatcctagatctacaaaagagaaagctgaggcttggagaggttcttcattttgttcaaagtcatacaacttttacgtggtgtagccaggatgggaaccagagcctggctctctgcacttccaacaccactgctgaatccgggtttgtctgttttccctctcttcttttaactattgtcacacagattccatcatagaacccatcacgtggagggccactatttctctttcttttgtatagtatgtttgcttcccctaccccacagagtaaggtgctcagcaaatgtggctgtctggaggcaacacccccttctcaccgccacacttggggttggggtgcgaggcaaggcagggctggcgaggtggatgttgcagctgtcaccactgctaggtgttgggaaacgactctcctgcctgtgcattgacccgaaggcattttccatttcctaggcccctcccgcttcccgtccctcacctctagcccctcggcttcagctcaggcccctcggggagcatcccttgccgtgagactgacagcctttgggggcgcagggtcctgttctctgcgctctagcccatctgtgcgcagagcctcgttcccaggcgcctggaacccggcgggcattgacgtcaagcgccggcggagcgctgcctacagacggttgacccgggccctcctccacacccccttccttcttcgcctcctccctctttcctgcacgggggctcgggctcactataaaaggtgggagcgcgtggtgccccagcaacgacgagtttcagaacgatggagagctcccgcgtgaggctgctgcccctcctgggcgccgccctgctgctgatgctacctctgttgggta

SEQ ID NO: 33863 - DNA, 2300 bp, Homo sapien
ttcaaagtgtgggtgatgacttaggtggtcacggtcatggtgtttaattgcacagacacacacagtaagaaagcgctctgttataattttcatccaatcttctgttgcaacatggagaacaactcagttaggtgttagtatctctttaatacctctctaacacttggccaatctctgttttcaaccaagaaaggagagccttggactcagagtcttgagcaaatcataacagtatgtagcaggaatttgatcacatcttatcttcattgtgtatatttttagggatactttctattaataagtgatattagtgtttccatttatacagcaacatagaattgcatttaaaaataaatttaagtaaaagaaataaactgcataaaagaaaactattacatacataaaagtaacaatggttcaaagaaaggaaaaccaaacacaaactagatgaggctggaatccaacggatgacctttagaaaacagtgctcttcaccatatttcctgcccctcaccccagttatgggctttggtgctggccttacttcttgaacagcaattgaatatcttaaccaaaatattatctggaaacacttcatctagttactggtgaatgcagctagttggaaacacttcatctaattactggtgaatgcaactctctagtgatcctgtcacagatcccaaatactgcgggccagacggtattttcattctgcattgatcagattgacatgttggatggaaccccccagcccttggctgcccagcatgtctcccatgccagggtgtcaggaaagatataagagcaaagagtacatgaccaataagtcatggcagctaacacctaagacactgggttattttggaaatcttaagaatatctaggtgattatctatctatctatctatctatctatctatctatctatctatcatctatattttactaacaggcattctagtattaaagctatgttgactaatttccatctattcctcttccttaaagctcgaattccccagtcttctatgataccatgtttgcacattttgctctttcctcaccctcctccccttttctgggacagaagctatattcagtatgtttgtgagaaacggttgtaaataggctgccttaaaaaaaaaaacaaaaaaacaaaaacaaaaaacacattttttagttcttctaaacacaaacaaaggcaataaaaattcccaatgctacaggtattttaaaagacatcattgtcacgaggtaattttgcttgtgtgttccccaaggaactgaaaagtacattatagtcactgtaaccctgctgagtagagacagtatcttctctttattctttgttattactgatactatctgttcagcacattaaggaaagaaattggtatctaatataatacatctgcatttctctcatttcccatgagcaccacaaagccagtactttttcatccttggccctgccagagtagaatccaaggcctgaacaatagtaggcttaagttttgcatttttgatgtattctttaagtgaaggtggtaaatattgatattggtaaatatcagtaaattcgtcttcttaaagccacaaggtcaaagaaaagacaggttccgtcttcctaggcggggtacccacagccccgcatctgcccactgtggctatcccagttcctgagaacctggctacatcatacacagcacacaaggcagaggcctgactagtgcaactccaacaagagaaaagacccccactccgaaaatggaaactcatcccattcccatgcacagacagggtgagggtgaggagtgggcagtgggtgtgtacgtggtgggtggtgtaggttgagagcgtcttcccccttcacggctgcagcaggagctcagcgggcgccccagccccttggctcgcggccctgccccgaccattgtccgcacacctcgtccctccagcttccgggccgcgggcgagatgatttgctgcagatgacatcagccccgggccaacggctggaagagcggaggcagccaccgcgtgaggatgtgccgggtggtcctttcctcctcctcttcctcctcctcccggctccctgcctagtctccatataaaagcggcgccgcctccccgccctctctcactccccgctcctctccgccgcgcactctccgcggcgctgggagagggcggagggggaggcggcgcgcggcgccagaggaggggggacgcagggggcggagcggagacagtaccttcggagataatcctttctcctgccgcagtggagaggagcg

SEQ ID NO: 33864 - DNA, 2300 bp, Homo sapien
taccatacaatttacccatttatagtgtactagtgaatgttttttggtatattattaatttttaagtcgcgataaaatataacatttgccgttttaactatttttaaatgtacaacttggtttcattaattacattcacaaggttgtacaaccatcccctctttttttattttatcaagtttttgagacagagtcttgctctgttacccaggctagggtgcaatgacatgttcttggctcactgcagcctcgaccttctgggctccattgattctcctgcctcagcctcccatgtagctgggaccacagatgtgtgccaccacacccagctattttttttttttttttgagacggagtctcgcactgttgtcggggctggagtgcaatagtgcaatctcggctcactgcaacctctgcctcctgggttcacgcgattctcctcttgtctcagcctcccaagtagctgggattacaggtgcacatcatcacacctggctaattttttgtatttttagtagagacggggtttcattatgttggccagactggtctcgaactcctgacctcgtgatccacctgccttggcctccccaagtgctgggattacaggcatgagccaccgcacctggcctttttttttttttttttttttggagacacggggtctcactttgttgcccaggctggttttgaactcctgggttcaagcaatcctcctgcctcagcctcccaaagtgctgggattataggcataagctactgcatccggccttcatcacctctattttaaaaacattttcatcactccaaacagaaactgtacccactaagcaataactccccattccccttcccttagtccctggaaccttctaatctactctctaactctataaagttgcctattctagagatttcatgtaattggaatcaccatgtttatccttttgtgtctggcttatttcatttagcataatgtttcctaggttcatccatgttttggcattatcagaacttcattcatttttatgtttgaataatcttccattgtattgatataccacattttacccaatcatcaatagatggacatgtgggttgtcttaccatttggccattgtgaataatgctacaattaacattggcatacaagcatctgttcgggttcctgctttcaaatccacctggaagtgggcttgctgggtcatacagtaattctattttagctttttgaagaactggccaactatttttctagaaaacagttgcttttggtcattctctcctcttgtatttctctcctctggtgtctgcctctctcagattcttttccatttcctcctgctgcctgagagtcattgtacttccaagcagcagacatgtttgtgtctaccctcccaaccatgcgtctccctcccacatttcggagagaacacccacttccctgtccttagcagctgcccaagcatgtatcaccaactgggccacacatctgcctgatcatttcatcccattgtccagggagggggagtcttcatagaaggtcatgcacaggtctccatccactttggctggagggctggttcagccaccgaatgaccctaggacctgtgagcagggggagtcagcgttgtggagccacagccccgcagggtttcagccctccttagacaggcggtcatcacaccaacgccttgctttgttgttctctgtccactgtgcatgtttttaggaggcagtttggccaccctgtttcatgggagggttgttctccacttttcatttgcttacggtgtctccagtttcctatgagcaagtgaattaattaatgaatactccaacagactgtaagcctgcctcagacagccattctggttgttgggctaattgttagctggggtttctggatgtcattcatttcacaataaggctcctaattaatctcagtgcagttctcaccagaagaaaggctgatacggagaaacatccccaattaccatgagaaaggaaatgtcaagagccccgttgagttttcctggcacccacccttgtctcagatgaaaaccgccattaccgcaaggaggctgcctagaccgaccctgaaaactggagagtgtgagagcgggaggagcccccgaccacacaaacccagcctggggaggaacctactagtggctgcaccctcttttttaatagcaccaattgtgtttcccaagatgatgtagagaatttcagtgctgtgtaccacgtcggaggcagaaattcctctgctgtcccaggagcaggcagggcagttttt

SEQ ID NO: 33865 - DNA, 2300 bp, Homo sapien
cacgggaggcactaaatcgtaacctttgtttccatatgagtaatggagcaggaaaccaaattggaatggattgtagaatgattagaggtatagacaactcttttaagatgcctagctatgaagtggagaataaagcggggaagttgggagaatgaggatttgctttgtattaatggaagaggcaaagcataaaatggaaaaactttgaaggcattgatgaaaccacacctgaattagtccattatagtgtctacaatagaaattaaaggcttgggccaggagcagtggctcatgcctgtaatcttagtactttgagaggccaaggcaagaggattgcttaaggccaggagtttgagaccaggctaggcaacatagcaagacctcatctctacaaaaattgaaaataaaaaaaatattaaccaggcatggtggcacatgcctatagtcctagctactcaggaggctgagttgggaggatcccttgatcccataagtttgaggttacagtgagctgtgatcacaccactgcattccagcctgggcaatagggcaagaccctgtctccaaagagaaaaaaagaaaagaaaagaaactaaaggcttggaagatatctgttaatttatgttgacacatgaatagcttcatataagcagcagtagttccagcagccccagacaatgatcagaaaatttctaagacagtcattggtttgttttcattcatcttttttgaagtcctttagaagtataaccatcccagtcactgtcaccacccctgctcgactcctaacacatcaaaggtatctagtgcttagatattttagtgttcatttggctttaacccctactacagcctgttactgtagctcatgtttttccctacagggggaaaaatgtttgtaaggctccttatttattatttgtcggccctacttttcatgcagttttaggtggggaaaatcaaacttcttagttttgaaagtaaaatgacctggtttttaattaccagctcttttatttacctgtgctgcagaagtgcttgggggggggcgttgtttttcttctgaggtctttgcttttctcaaagactggggagcagcctcaagaaatgacacttgtattgcacaaagcctacttacagtaaagaggtttgggtgcctatgaacatctggggtgcctcacttgcccgtggttgtaactgcagcctgcagacattattcattctctgcttcctccctaatctcttggtgcagagaccagtgcagggcaacctgagcttagtgttctatgttttgaagccagagttagggctccagctctgtccactgtgtactcatgtggcaccaagaagatcacagatcccactggggagttgccaaggctctcccctggccgcattgccaggaagtcctccagtcatcgttgttactagtctgcagcaggtgtagcaatgcttgtgtttttgccctttgtttcccccatgtctctaaagacttcattttcattaaagcgtaattttgcaccctgggctgaaagaagcgatcactgtttctgactgcctaatttgtttttgagaagcacaaatctatctaaaagcaatttaatagtggtatttattctaacactctgaaggagtcttatcattgctaaattctttaaaattcaaaagcttgttccatcaggccacagcagtatgagtgactgtggggctgacagcatgttgaatcttgattgtctcgagtgtcggtttaaagtgtactctttatttgtgttttgttttgcttttctgattgtaaaagaaacgcttattcattgccaaatttttggaaaataataagatatacagggaataaaaccaaaattactcataatttcactgcccaaaaatccattaacatatagggtatttctttcctatatttttctttgacgtaagtaccttttaatcccaaaattaggattataatgtatatatagctttgttcttctttgtttacttaatgctataacatgttcttttcctcatgtcattgaaagtcacatttttgtataaagtactcattgcttagatggatcatgatccagtatattctgttgcagtgggaagaggagaggaactttggtgcatcccttttgcttccaggcctaaaacaaaagaactcagtgggtttcagttcccagttgtatggctatgcacttcttggtaagctaaatgatccttacaaatactgttcttcatggttagaattgttgcattcttccagttcataataaaattgtaatttgatttaaatttaccag

SEQ ID NO: 33866 - DNA, 2300 bp, Homo sapien
tttctaagatgagtgtcatagtcttatgatataccccacattcattattaattcattaaatatactgtattgaacacatacaaattccatacattggcaagtgctagttatgtactggtgagcaaacattttctgcttacaatttaggaagaacacagagtttaaacaaaacaatcacagagatataaaactatgactatcatgaacactgcaaaggagaaatctaagaaaagactatattatagggagttttctctgtattttaaacttaaattggttaggaagggcttccttaaggaaatatttcttaggttactattgaaggatgactggtaattaactggctaaggaggggaagaacagtccaaaaagaggaaattacatgtccaaataccctgtggcagaaaacttagtgagcagaaatgggctggaagaagatagtcagtgtagttacaacagaaaatggtagggaggacgtggggtgagagggttggagaatgtaggccatactaagccattttgtgttcgttctaaaaacagtgagaagcccttgaaaagttagaagcagagggcatataataatcaaatctgtgttttgataaggtccttctggctgtactgtggataagctatcagagcagggcaaggatggctatggtcagaccatccgagagactaccatgaatctcagcaagggataatggtagcatagagaccaggatatgatgcagttagagagtagccaatgggcatatttggaaggtaaataacaagatgaggcagggaagcaggggtcacatattctctcctcagtttctgactcatatgtctggatgcaaggtgttccatgtgttgtttccaaaagggaactttgggaaaagactggatgttatgagaaaaatcattaatgtgactctgaacatgttgcattttgaaattgagacagtcacgagatttcaccaaggaactgggggcttaatggaaagatctggactggagatacaattgtggagacttatacttccatgtgtaaatgtttgcaaatgagctagaaagcaaaaagaagggaaatcaggaatgtgttggaccacagaatccacaggaagagatggtctgctatgtagaatgcttccaaaggggtagggtaagatgaggaataaaaaaagtcaattaaatgcattagtggcacgggaggcactaaatcgtaacctttgtttccatatgagtaatggagcaggaaaccaaattggaatggattgtagaatgattagaggtatagacaactcttttaagatgcctagctatgaagtggagaataaagcggggaagttgggagaatgaggatttgctttgtattaatggaagaggcaaagcataaaatggaaaaactttgaaggcattgatgaaaccacacctgaattagtccattatagtgtctacaatagaaattaaaggcttgggccaggagcagtggctcatgcctgtaatcttagtactttgagaggccaaggcaagaggattgcttaaggccaggagtttgagaccaggctaggcaacatagcaagacctcatctctacaaaaattgaaaataaaaaaaatattaaccaggcatggtggcacatgcctatagtcctagctactcaggaggctgagttgggaggatcccttgatcccataagtttgaggttacagtgagctgtgatcacaccactgcattccagcctgggcaatagggcaagaccctgtctccaaagagaaaaaaagaaaagaaaagaaactaaaggcttggaagatatctgttaatttatgttgacacatgaatagcttcatataagcagcagtagttccagcagccccagacaatgatcagaaaatttctaagacagtcattggtttgttttcattcatcttttttgaagtcctttagaagtataaccatcccagtcactgtcaccacccctgctcgactcctaacacatcaaaggtatctagtgcttagatattttagtgttcatttggctttaacccctactacagcctgttactgtagctcatgtttttccctacagggggaaaaatgtttgtaaggctccttatttattatttgtcggccctacttttcatgcagttttaggtggggaaaatcaaacttcttagttttgaaagtaaaatgacctggtttttaattaccagctcttttatttacctgtgctgcagaagtgcttgggggggggcgttgtttttcttctgaggtctttgcttttctcaaagactggggagcagcctcaagaaatgacac

SEQ ID NO: 33867 - DNA, 2300 bp, Homo sapien
ttattcatactttataagaagagtcactgaaccagttaggggggttgtgtgggtttctttttttcttttttcttttatgttttttttaagctatgatgaggtgttagaattggagccttagtttttacattatcagttgtcttatatcagactcacaactttctcaccctgaccaacagttcctgttaccaaacctcatgagtcatggcttctgtttcactgtcacagatgctgtaaaatgatagtcaaatattttaaagctaatggtggcaagttttattctgaataatacataggcatatattacagactaaattagataattttctctttttttcctgttatgttcattttcattataggttcaatatggaatttttccagataactttacattcaatttactgatggattctttcataaagaaagaaaattacaaaggtaagaaactaaccccagattcagtgtttatagggcttccagctcccaaagggaggtgtacaaatgtaggaacttccccttttttatttcttaataacatctcttcattactcgtttagtcagaaaagttttgatgattatcttttatgcaaaatttttaaaaacattatttttattttaagatagaaaatatcaaagtacataaatgattatggaggaaaagtaagttaattatacaggccaatctaatttcacttcccaaactgactgaaatgcagaatataaataaaggataaagtaaatttatttttcaagtataattttggattcagtaatgaacagttggcagaaatgagattttttttttcaactgaatttttagcctatgctcttttaaaatattactggcttgtttgtttgtgtaaaagaaaatcccttccaggttcttatttttctactgacttattagatgactacctggtctgcctatctcagtttccccatttgcaaaaagaacatagaaatccatgcgtgtggcctcattcagaaccatgacatgtgcaaaaccagctgggtaggaacagctgcaaatcagtgctattttatagttatgaatatatgtaaaaattggttaaaaaaataattcagtaagtaaaaaacatttgttgtgcttgtgatatgaacaggcactatattttaagccattgttaatattctctgctttaccaccaagtaactacagaaaggaaattgtttgacttgattttcttggcctccatctatgttgtagaatatcaagggaaaataaaaattgcttaaagcctgctctccaggctttaatgaccagcattaatgtgcaaacaaatattttatgttacgtgttatactcaggggcttataatttatgaacgagcatttcccattcccttccaacaagtattttaaactgagccttattgtcctttttatagtcattattttgctgtctttgaaataacacctgagatttagggtttcctttagcattttgtcctcttctgccttaacagtgagaaggtaccagagcagagaatagggcagtcagaccagcctgtctgctctgcctgtcagggtgaccttgagaatatatgtgtctcctttatgccttagctgttctagctggtagacatgatgccttaaatttgcatcacagtttgagccattttctggttgaactgtccaaaattctcttgaagtaggtgaagcaaatagtattttatcattatgacgatgatactgggagccaagagaaatgagtggtttatttaatgtccttcaggacgttggtgcagtagcacctgatttagttcgttctggtatgtaaaatagaagctaaaggctgaggaaaaaccttgtttgtggaagaactagggccagagcctaagcccgcatattttacttcttaattctgcatttttttaaaccatgccccacgttttaagagtgtttatagttaaatagagatttagtaatattacctacaactaatttcctctcttttttactttcatcttctgctagatgctttatctgtggtttttgaggtcatgatgcaagaagcctttgaagtgccttccacccaacttctctccctctatgttttatttcattgcctggcaaagaagacagacttcagtgtaagtgatcttccctaaagcagtattaagaactttagaaaaggcaagcaggggcttgctctcaaaagctggaaaaaggtgtctgcagctctgtggccaggcacaaccaggaatgtgtgtttattgtatacattttggttactggtttctaacaaatggaattggaggttcttccacttgaga

SEQ ID NO: 33868 - DNA, 2300 bp, Homo sapien
gtattttgatccgctgttggttgactctgcagatgcagaatgctcggataaggaagccaactgtactcccgcataccagctacttgcttactctctatttattatctgttattctctatgccttcattctagcatatgcttcattctagcataagtaatcacctttctacattctggagtcaggacaatatctagatcattgctcaagagttctgaactgggagattaaaaagctgggccagctgggcacagtggctcacgcccgtaatcccagcaccttgggaagtagaggcgggtggatcacctgaggtcaggagttagagaccagcctgaccaacatggagaaaccccgtctctactgaaaatacaaaattagccgggagtggtggcgcatgcctgtaatctcagctactcgggaggctgaggcaggagaatcacttgaacccgggaggcagaggctgcagtaagccgagatcgtgccattgcactctaacctgggcaacaagaacgaaacccgaaaaaaaaaaaaaaggctggggaggtgattgtggggaaagacaggtctcccaaaatgccctctgtgtgtagttgttcacggaaaccacataaacagaaaatagctacaacagctaattcttactaaggtgtcaagcgttgtgcataacactgcctaatgtgtgacattaaacgttttcaccaggtcagccacttaatcttcagaaaactggtggccaactctgaggtttcacattgacgtttaatggctgttcctaaagaagtgcgtgctttttaaaaaaatagaggatgggaggtaggttggaaagggaagataagcggcaatggaaaaatcgagtgtgattattgcatttttatcaaatatgtctgtctggattatgtggttagaatcactgcaaatttggcttctataaatactttaaaacttttttccaatgttttcattatcagatccactatgcaggctttgagtgggctgccatttagttcagatatcaaagtattttacaagtaactaatagcatttattatctacacgtggaaaactatagcaaagaaaggtcaatcaaaagttgtgctctaggtcatcagataaaatgagattaatactgaaaaattcttccacgaagaccaggggtccagctaaatgtgtggtggtgggaaaaatgtttatctgacgtccctctaaagaaacctcagatgggagaaaaatgtcccagccccaggaatggacacatttaggtttttccttttttttttttttttttttttttgagacagggtctcgctctgttgcccaggctggagtgtagtggcgcgatctctgctcactgcaacctccgcctcccgagttcaagcgattatcctgcctcagccccccgagtagctgggattacaggcgcgcgccaccaggcccagataatttctttgtattttttagtagagatggggtttcgccctgttggccaggctggtctcgaactcctggcgatccgcccgcctcgcgttcccaaagtgctgggaccacaggcgtgggccaccgcgcccggcgcacatttgggtttttcgtggtcagcaaaagcacgaccaccccaacacataaatctggcgaatcatacgcaaattccctcatgctatataaccttccactgctcttcgtacctttggacaggaacatactgttattttagggaaggaaatggatcagataccttgtctccttcttctgcactaccaaacaccccaaatggcgtccctagcaatcagattccagaaacgtttcctctcctcttgaaagcccaccgctcccttcacccaaaaaacagaataatcaggggcctaatgaagctgtccggccaacctgcaggagagagctgaggaagaaccacttgccgcgccaggagcatcccgcgccgcactatggaggcagccatcttggagcgtaccaaaaggaacagccaacgggttacggacagaggaaggggcggggttacagctcgacctctcggggcgcccagaattggacgaatcccttttgtcgctctcgacgacaggaccgacgctccgcctcctcgccccggttccagtagttggtatggtccgagacagtatggctgctgcatttcggccctcgaatcgagttctcctgcaggcgctgcagattttggtgtatcctggggtgggaggctccggctctgtcagctgccgctgccctctcggaggtatccgcggctttagcctagggaaggaggggagggatgggagagaagggagtgttagatccc

SEQ ID NO: 33869 - DNA, 2300 bp, Homo sapien
acactgaatagggataaagacagagaaacttaaatgacagataaatgacagaattaacaaaatagattctattacctttagtgccagaaagattacatgcaacagccactttcttttgttgaaattcttttaatttcaccacattatctgtaagtaggtatcttttagctaaaaatcagagaaagaaaaaagtaaagtcattttgactgttttagaagttagcaaataacatgaatagagctggattacctctaacatctattatagataatccattagacaggtacaaatataactgtacaaactgtacaaatataaatcctgggaaaaacaatttctgaactaccagagaatgcaaatcctcagcaaaacaggttttatttgtgtgtgtgaaagaagctagtgattaaccgtagctagtgataaacctgtgtggggactggttgacaggaagttgggatttgaagtacaaatgggcatttgccatcggttaagggtatcaagggcatttaaaaaaaaaactaataacatttaaatgcaaaacaggcatatttagttttggtttatccagggagaagcacagtgtagtggaaaaagctgcagcatgaccactggaactcccagttttgtcctctgtgaaatgagggggttaaggcctctcagatgtggactcaaaatacatttgagatacatggaaatcattgatcacagcttagtagatttgggaaacatcatcctttctttaggatccttggctgtgcatgagataaaacggaccaagcgtggccgaagaatcacgcactaacagagttctgtgagctgcagtaacaaggtaacaataaaagttgctatttatttacagaaaggcagtccagtgaagtggttaggagcaggtttctattgttgggtgtgttcaaatcccacctctaacagttccctctgactttgggcaaattacttaaccttgttcctcctctgtaaatggagaaaagaatggtacttctcttgctgggtgttgtctagagaaaaggaattaatgtatgtaaactacattaaagtaatgcctgacaaacatttttactatcactcactagcatcttcagatttaactctcttcatagagatgttagaggatagttttgaaaaatgaagaaacgtgccgttaagtcttttagattgttagcagaactgagactccataagacctctgcttccaaactctgcagaaaagaaaaaggccgggcgcggtggctcactcctataatcccagcactttgggaggccgaggcgggtggaccacgaggtcaggagttcgaaaccagcctggccaacatagtgaaacccgtctctactaaaaatacaaaaaattacccgggcgtggtggcgcacgcctgtagtcccaactactcggaaagctgaggcaggagaatcgcttgaacccgggaggcggaggctgcagtgagccgagatcgcgccaccgcactccagcttgggcgacagagcaagacttcgtctcaaaaataaataaataaataaataaaagtcacccaaggcgggagggatgttcctgaagacgaacgtcgccccatctgagggagcactacagccccaaggtcaataccccagcagtccttcgatttgcaggcactgggggtatccacgacccccagtggtcaccactgcacccacgtgcaactagagggcgagggtgcgctccaggccagtgagtgacttaggagctgtggctgctccacagagatgctagctgggatctaacactcccttctctcccatccctcccctccttccctaggctaaagccgcggatacctccgagagggcagcggcagctgacagagccggagcctcccaccccaggatacaccaaaatctgcagcgcctgcaggagaactcgattcgagggccgaaatgcagcagccatactgtctcggaccataccaactactggaaccggggcgaggaggcggagcgtcggtcctgtcgtcgagagcgacaaaagggattcgtccaattctgggcgccccgagaggtcgagctgtaaccccgccccttcctctgtccgtaacccgttggctgttccttttggtacgctccaagatggctgcctccatagtgcggcgcgggatgctcctggcgcggcaagtggttcttcctcagctctctcctgcaggttggccggacagcttcattaggcccctgattattctgttttttgggtgaagggagcggtgggctttcaagaggagaggaaacgtttctggaatctgattgctagggac

SEQ ID NO: 33870 - DNA, 2300 bp, Homo sapien
cccctcctccatttctccaacctgatttcagccctttcctttctcactggtacccctccactttcaccaacctggtctgttctgagtcataatagtaaaggttgtaacaggactcttctgtccactctgagttgtaataggtgtcgtaacaggacagaagagtcttattatgtttatagtattcatgtgtcacctcctccatcattgttttcaggtagctttgtataaatttagcttgccctccccaaaatgcttttaagttctttgagggcaggaactattccttacgcttcttggtgtctcacacacaaagaaggatacttccgagtatgattatatgataaacaaatgttgattgatttgttttaaaacacaagttatatctgttgaaatactggattcttaaggtgttgttttttttttttctgagacagagtcttgctctgtcacctaggctggagtacagtggcatgatctcggctcattgcaacctctgcctcccaggttcaagcaattcttgtgcctcagcctccctagtagctgggattacaggcgtgcaccaccacacctggctactttttgtatttttggtagagacggggtttcaccatggtggcgaggctggtttcaaactactgacctcaagtgatccacccaccttggcctcccaaagtgctgggattacaggcctgagccactgcacccggcctcttaaggtttattaaggaggattaaggagtacaagatgtaacgtcatctctttgatgacttgagactttttagactggaagttgcttagaaatatttaatagactaaatcctcttagatctaacaggtgacacaaggaatgaaaatgagaacaataatgtttctatttactggcagttaccgaatgacaaatgctttacatatatcatctcaggtaaccctgtgaggaaggtaccacgatccttaatttacacatgaggaatcaagtctcagagcaagggtctccatcagaatgcaagtggccgagcttagatttcagcccaggtccttccatctctagagcctttaactgttacatggttctgcaaataaaaattggaagagccactgcattatctcaaacctagtaggtcttttcttttaaattgagaacagtgcctctgcttctagttcttgtgttttagatgtatttgtgcctctcctttcagcagcattccttcaaagctctgggttcttggaacaaatcctatagctatttcctggcagcttctgatactgacaacagttctgccttctggaaagcagatgcttggttggtgcctgctttgcttttcaccccgcattttggtgggaataaagccccttattgatgacaagaagaggtgcctccttttggtttttgtccccacggttgatcagatacaaagacaagggagaatgatagactgtgatgacactgaaatgattctgtcactgaaaaactgtttgctgctgtttggaggactgttttcccccctgcccattacatagtactttggcatgccttctaacagctgagtaaaaagagaccaagaggaatgaaaaagaggtgaagttgaatcaaatgaaagaaacgtgagtcatgtgggtccaccattgtggacaaacctaccttcaactcacattttctttttagttttcccatttggttctctgccagttgacggtttgggtgtctggctacattttctttctttttctcatgagtcacctagagattcagttatttgagccaagcctctggaacagtaattctcaaactttagtataccagaggatcacctagggaatcaaaaatgccaattcttgagctcttaccccacagattttattttagagagtcttgagtgggcctggccctgtgcccatgtccctgcctcctgtgacagatgccatctgctgatgctgttctagaggagattggccagtgatggcagctgtgtgtttctgaacccctctcagtgcccctctgcagtgagccggggttgggcttccccatcttcctgaggtcagactccttatactctcagtcagcctgagtgatggtcaccatactgtgctttcttccagaaacgtattttagaaacttgaaaaagaaactgacccagaacaagctcatcttgaagggggagttgataaccttactacatttgtgtgagtctcgggaccatgtggaactggctaaaaatgtcatttacaggtgaggcatttccttagaatgttgccacccttatcccttcttactctgttcctttctatgagcagtctgatc

SEQ ID NO: 33871 - DNA, 2300 bp, Homo sapien
gtaaagtcttacttctatgaagagttcttccttgcggtagaatcataaacaagaaatagtctcagaggttatctcaaccaatgtcttcaattgcctgataagaaaaattcctcatgcttttttcttgttttaatgatagtgcttagatttcaacaaaactcttctgctctcatttgttctctggtatcatttatctttcaattattgtttaagatctcccacaccattaataacttaagataaaaacagaaatctacagagtttctttctctctgagagcttttcctgtattccactctccgtgttagatgactgatgagcctgggattcttcctcttaatgtctggttaggttttcagaggaaatgttgacttttgccacgaatggtggcaatctctaatcttctgggacctcatgctagcacactcttgccccacctagaggtgctttggcccagagcttttctgcatctttgtggtagagacctctgggttcctacagtgcagtgggcacattcacaagcaactcccccaacctcacccccacctgattctgctataaagaggaattattgtctgcatgttaaaggggaagaaacaatgactgtgagatcaagtgtactgacagaatttcactagttgaggctatagctgggatataagcctgggttttctgactccaatttatctacatcgctattttctttacctattgctaggcttttttctcctctcttttacactctactaaccagccccatcctgtgccaccagaaaagaggtgagtgaataacagggaagaaagcactgccattccatccttggaccatctggagttaagaactcccctccttaaacaattaagtcctctgttttttcacttattgtccccagaaagaatcaataatgttatgttgtttgttttttgagatgggtccaactgttcttcgagacggggtccaactatgttgcccagggtggtcttgaactcccgagctcaagcaataacaacgttaagttttaaccacttcttcccttcctgctcgtctggattgctaataactgttaatattaatttaatgttaggtttaatgcaacatttatctcagaataactttcttgctgcgttttaggggttttttctccccttcattcaaatcaaggtcatttttctccaatctcaaagcaatgttagagactgtgcctatatgaaactcccttatcactatttttcttcagtagaatacttttgagctgctttagggatatagcaaaacagaaagagaagaatatatgttcccatgcacccatttatggtagaaccattatacaaaaaaagtcagtcacaacgaaagcataatccataaaatatgaatgttgataaattggacttcatcacaatcaaaaacttttgtacttcaaaagaccccactaagtcaacaaaaagacaagtcgcaggctagaagaaagtacttgcaaatcatgtatctaacaaaggacctgaatttagaacatataaagaactcttataactcgatatacaagaaaacaaacaacacaatttaaaaatggactaaacaaatatttcaccaagaagatataggattgtttaacaagcatatgaaaagatgttggatgtcattgctcactagagaaatgcaaagtaaaaccacaatgagttactactcgatacactagggtgactaaaatagaaaagatggacaataaagagtgttggagagaatatgaagcaattggaaaattgctgatggggatggaaaatggtacagctactttggaaaatagtttggtagtttctgaaaaaaataaacataaactcaccatacaaaccagtaattccactctgaagtgtctatccaagagaaataaaatcaagtatctatacaaagacttgtaggcaaatgttcattgcatgattattcataaaagccaaactttatgctaactgaaaggagccagatgtacacatgaatacatattgtatctcatttatatgaaatctatagagacagaaattagattagtggtttcctggggctgagggtggagtagagattcactgcaaatgggcatgaggcaattctttgaggcaatgaaaaagttgtaaaactgggtggtagtgatggttgcataattctgcaaaaataatacaattgaaaacttgaaacagacaaattttatggtgtggaaattaatctcagttagacaatttccttaattcaacattgctaagtgcttatctttagctttattgattggcgtttgaacctatgagcccac

SEQ ID NO: 33872 - DNA, 2300 bp, Homo sapien
ctcaacgtgacagtccccacattctgcagacttaaaagggaaatcctttggattctgcctggactcctggggctcagccctggccttgccttgagggtgcaaagaggagtaaaaatatgggaaggcctgtgtgcagctgcaatggattcttcaagtgatcagaggcggtttcctgcctgtgaggagttggtaccatgagcgtcttgttccttgggtccctcctttcctctgctgctgatgccccgcacaccttgccccctccctattgcttctcctcaccccacctcactcccaaggacgtctgcttttttattgtgaatttcagctgcctgcttgtttcacctccggttactcaaaggtttgccccagtgtttctccccctttaaaagactccattcctaggccttcctgctccattccctcatgcccttccctggctttctcagattttcattttcatttcccttcccatttctacaaaggcaggatgtagaggaaggccagcagagggcaaagagcccgagagccgggatcaggagacaggaacgtgttggcgtgtggctctaagcgaaccaaagagactgtctctggtcatccgtgttccccactgttggtgaggctgggtcacccaggccagaactcagtgccatgggttgtgccagtgttggtgctgtggcggatgcaaggaatgggactctgctctggcttgtgcacacctaccgagtaacaaaatcttcatgtctctctctgatacatgcacacatattcagataactagatagacagggagatagatagatatatggatagattagatagatagatgatagatagatagatagatagatagatgatagatagacagatagatgatagaaaaatatctgtcagaataaaaacataatcctataggccaataaggactcaatcaaaatcttacagggtcactgaatcagaatcattcttcccctgaactcactttcatgactctttgcaatcaggtgtatctgtccaccccatttttttcacagttgggtgaaatgaggaagtagtgtaaggctggtttttcttttgctgccacaaaggtctacataactgctggttcctgttcacagtgaaaatggtcctaaccagatgaataagggacacaagagacataacacaaatcagagaagttaaaaccaagcttattcctaagtgcaactagcctaagcaagctcatgcctgcctgctgaagccccaagtcttctaccttgataaaggttactccctccattttaactgctcctgcctcccctatcttttttcgaacaccatggctgatttatctaaaccctatgctgcttcacagtattttgaaaacaaattagaaatctccttccagttttccagaggtgattaaatccaagacgccttaggaatgtagaggatagaataatataaacaacagatctgagataaccatggccggcagcagttgtggttagttgcttcttttcctttttcatccatcagtgatggaagctggattgggtccactgtataaagttcggtgggcataaatctgctatttgatcctggaaaaactctaaggatctagagtcagcgaggaattgcagcaatgctggtgtttcaaagggcctaagaaaagccaggagtcctggctgcccagccccgacactgtcttacaggctgcaggtttaccttggttagcacaacaggccaagctctcccttgctctaagtcgacatgacatgatttgttccctttcggctgtgtcagttctgcaaaccagataccagaggctgcaggctcaggagagcctgcctgtctggaacaccgtttgtttggacaggacaggccactaaggcgtttcatctctttaaagctcccagggcagagaacatatttgaggaattccttttttcaaagattttttttttttgccccttccaacattttgtttaagagaaaatgagatgtctatcttctgtttccttattttttttcaggaaagcaaagggttgttgacttcctccctctcccctcccttccttccttcttcccgaaggtactcatctgagaaaaagagaacgaagtattgttcctgttctctttcttaagtcattcgaaacactgtccctgcgagttctttaagttccctgcaatctgtacacaagagaaagagggagagagagagggagagagacagagagagcagggatcaggtaaaggagtggggctgctgcagccattcagacctcaggagctggtaagttacccatgcaatcatttctgct

SEQ ID NO: 33873 - DNA, 2300 bp, Homo sapien
ccaaggaggttgctaattgagataagaggcatcatagcccatcaattgagcagacaggtgtgaagagtgagaaaaatggagtggtgggttctagtcatcccctcagacctgggaaaattactgaagtgcctttcccttatttaattttcttcccactaaaaatggaatggtgacggtgtgtacctaatcataatgctgatcaaaatctctggaaacagctttttcagagagaaggtttcctaatcttaacaatgtaaaaaaatggcttaaggctaaactagactttttcaaggcatagtgaaacctcttgtttcattactaaggtttatacttttaatcagtgccatttccaagcccctggcatttcctatgtaaaaagattttgtataacagtttagctccacattgaacactaattcctctttcatgtgactgtcctaaaaatatgtgaaacagctgtcatgatgccctaagtattcgtccttccaggctaaacaagtccagttcttcataggccaaggtcttaagcgcccttgttgtcttaggtcatcctagctggatgggtttctgtttactgaggtccgcgttaatggtgaattactgggagcagagcatggggctcccattgtggtctgtccatgtggaatctggcaagaattttcactacacatattcagcctaccatggctctttaaagacagctgaagtctgatcagttatttttggaggctacatcagatcactggcttatgttgaacttggagtcaattaaaactacaagtctttttcacacatgctcctgctaagctaccgtgtgtgtatgtacctatatatagttattatctgttgagtgcttattataggcaaaacaatgtgctaaatgctttgaatcttttgcatctcatttaatcctctcattaacccaatgaggtagtaagtaaccttagctccacactgggttaggctgaggctcccaccagtagagacttgcctaaacgggtctgactccagagcagataatcttgagcttggtgctattttgtcctctgtactgatgtgatgtttttgttgctgatctttcttggaagacggacacagagggcccaccaccaaaaagcaggactatgaaatataaattgggttggaactgctcatccttttagcctactggaatcttgttggatcctgatcttgcccccaaatatattagccattcccttaaagcttcatgccgcccatggatttcatcagctgccattgctctttttattcaagtcattacctcaaaaaatagaaccaagccaaggacagagagctccaacccacaccagaccaaccatcatgcttggctttggtcactattctgatcaagttacaagcccattgtactgtgactcagtcacatttttccttcttttccatcagcaagatcaccttgccaaatcccttgctaaaattcaacagcaaaatttctaaagcatgcttttaatgagtctagcaccattgccacagagagcaaaagggccagtgtggcaaaagttgaacaaatgaacactacgaacacatagtgaaattgtgttggttttaactgatcatcattccccgtgctaagggagcagggaccagccccaactctccattctagactctggtctaggactgatatcaaggtcaccagcttctagtttacagcatcaaccttctttcttttttgaacatctgttctacatgtgaccatattcactttttctgtagttttccccatttttcaaaattcttgaaagatcagtgacagtggttggatgctttcattgtacaggttctttttgtatcttgaaaggtatttttttcttggcaaggagatgtgaacatatttaggaaattaccatatcttttgaaacttttccaggctaagtaacaattttattttacaaagaagacaaaaataaaatgaaagttaagtgattctgtagggcctttcacttgatgatctgcattttattccatttccctttaaactattgaaatgcctttgttctatcagtaaagtgttatatcattatgtctcagtattggatctgcttttaaaactggtgttcccggtggctcacgcctgtaatcccagcactttgggaggccgaggcgggcggatcacgaggtcaggagatcgagaccatcccggctaaaacggtgaaaccccgtctctactaaaactacaaaaaatagccgggcgtagtggcgggcgcctgtagtcctagctacttgggaggctgaggcaggagaatggcgtgaacccggga

SEQ ID NO: 33874 - DNA, 2300 bp, Homo sapien
tgttttaaaggtaaaaacaaagtttataaattttaacttcatttttgtcatttaaaaattattaataattcttcaaagttttaccacatgagcatatttaggtataaagagaaaatactactggatagctgctattatatgtgcaaactgtcaaagaaaaataaaataagccatgttaataaatccttgttaataagatttactgtttaaaacatgtttttttaatttgacctagaagagacaaaaaggctacatgtgtaagaatctctattcaacagaactattttatattagtattttcattcactttaatttttacaaaagaatacatatttaatttgcttaatctcaattttacaacatctgataatcaacatttttttctttcaaaatgttttggccaataaatcctcttatgctaaataatatgttactttttcttcaattcatttcagctatttccaaactattaatcaagtgaactcctactaattgcttagtcagtagtatttacatctgtcattatttgctaatcttttggattttagaaatatttgtgttttttcctttagcaaagtagaatgcaaatactacacatcttctgatttgtatagatcctagtccacgatgtaacttttcaaatgcagaaataagccatttgttatttggataaatatactttttctgggtatattttcctgcagataaactaccattcagaaaagtttatattacatttttttcttggtaatctactcctatttgggggggggggctctttttgatatacactactgtatccaattactatcaaattaatattataacatgttgaaatcatgaatattttagttatctatattttcccttgctaagttcaatttcccaatgattaaaaaatggtacttttagtctcaaattttaagttaaataaactagttgttcctgcaaaatgactgtaattcaaatgaaaattgttaacacgtttagaagaacaaataaattaccttagtaaaaatttagacattttctagtattatgtactgtaattttacctaaactatgacaggaaggcaacaactgtcacacattttcaaaatatatacagcacttccagtaagatagtcggaactgctggtatttctactcacactgatcatgtgaggaatattatcacgggcatcatcaccttagaaaataaaaatcagctagctatgcaaattttaagtatttttatacagtaaattttacatataagaataatctgagggaaggaaactgatatttatctcattacccttgttgcagttgggtataaaaacgtccaccactcccattttgaatcatttgccgtacagaaaatacaggacattttaatttctcatgatggcaggttagggagagaaaggcttgttatttctaagagcaagaaactacagttttataggattgaacacctggaggcgtaaacattttataaatcactgaattctaattacatagtagtttatacgccagatacaacatacgtcaaaagcctatcttgttctaagcgggcagccatccaccggcgtctacctaccgaagccatttctgctttttaccagcgacgctggaacagtgttattgtgggatatgttcagtgttgaacaggctcccagggcacggctgttactttggaggttatgctggggtacagaagttaggctggggcagggccatccacctaggagggcccagcacagtctgggcaaccacaccggcgggccgttttgctcacagccccaccgcgccgggcagcgtctgcagctgctgcgtgcgagacccagaggctccggtcagcgcgccggccgcagggagtgcgagcacttgtgagccccgcgccgggccggtgaagtctggtgctgccgagcccgcttagaaagcacggccgcgcgctgtcggacgcaggcccacaggcccagccgacccaggcagcaattttcctagccccgccgccgttgccaaggcgaccgccgccgaatgttcccgccgcgggctccgccccccggccaatcggaccggcgctcggtgaagcccagattctctttgttccgcagccatttcaggccccggacaggaggcagtgccgcttcggccgaaggcccgagcgcccgaggcgtctgggatggtgtgggaccgggtaggtggcgtgagggtgcgcggccccgaactgcaggggcgggaacggaggctgggagcgccgagctgcctgacgcgcctacgggagagacgccgggctcgcccgctctctcggcgcc

SEQ ID NO: 33875 - DNA, 2300 bp, Homo sapien
cgtgtgtgaattgcgtaactttttggaaagtaatttggtaataactgtttaaagtttttaaattcacatactttttggcctaataaccccaccaggttgccactattatgtagggacattggtacaagaatttttttgctgtgttgttggtagtggcaaaaaagtagaagcaatctggaagccaatcaggagatggttgaacaaattatgctctatccattctcaagaccaatgtgcatctattaaaaggtgagttaaattggtatgtattggcccggaattatggccatgtcatattaatgtgtaaaaaacgttgtagagttagtattagtgtagtatggaggatgatcttaaaaaaagaggaaaaatatatgtgagattagaatgtagaaagattcacataaaactgttaaaacgggttctctagggagcctggagataggattgaattaacttgtcttatacaaccatgttgtttgatttattataatatttgtagttttttaaaagtttctgaagttaagagagggaaggggagaaatctatagtgatagaaattatactggggattactttaggaagggttgatggctgggattggacacaaaagaaacctcttcatactcagcgatctctatcttgagctgggtgttggttacacagatgggttcactttgtaaaaatccatctatggatcatatgcttatcatttgtacaatgttgtgtctatattgtatcaaataaaagtgtataaaaatgacagtggtacaatggaatactattcactttttattgaaatattttcaataaatatttaatgatatacgaagtcaggcaagaaacaggacaatcccattattataaaatataatgtgcataaaaacacatagaatgaagactagaataaaagcactacagtattaatacattttatgtccagatggtggtgattttgttttgagtttttttttgtttaagaacagtttattagattgggccatttacgaagtcattagaacttggtgagcaaagtcagattacaggctattaagcagaaaaataagagtgaaagagagaggaaaaggcatttttaaaaagaaagaaaaagctaactagagaggtggaaaggtagtagtttttttaagcccctactagcaagggacttttcatgttaaaaatcctctcctttatcaaactgtttggtttttacaaataagtcatgcttgatacttacattttgttgtttttgtttaagcatttagttttagtgaaaaatgtcattaatagcttcagttgactgtagcagatgcaactcatagtagctttaaaaacctatattcgtgtctcagtcttcactgattaagtgtggttgtttgctcagatcttttttagctttagttgccacatggaggcaaataatacctcactaggttgtaatgaaaatcaaatgagaaaatgtagtatgtgaaaatactttaatggaattaaacactacccagttgtaaaattacatcatttttattgtgtttccttcgacccaaagtccttacttttggaatgtagttatttcataatggaatttatttcccttaataggagttcaaaagttgaagtttatgcagaaatgcaattttttttaagtcaagttctgcaaatgttgcatataatggttttcgaggtctgggttgcgactgcatcaatattttagactttttagtgccttatatatcaaattgaaatgtaaacatttttattgcttctaattattgctgaactgtcagggaaattaacaacctttttaccctatttcaatcatttttcgttaattcaccatgtgtatgtaaaataatatacccaaaacagatctcttcaggtgtttcgcaggggttttgataaggacttgactttttattagcccttaagtcagtagtaatctggacggaattagagatgggttgggttggagaaaactgcgtggcactaggacccagggggctcccgtgagcggatcttggggccagattgcaaattcgcggtgactcagtctggtcggctccttgcgctcggcggccgcggcggcagcagcagcagacgctggcggccgggctgccaggagcagttccgccgggtttcactgtccgtgacttccttcggggcacctcaggcaggtccgcggcgtttggggagcgctggggttgtggtggcggggagaacgggtcagctgcgcgcgggaagcctctgggcctgtgcaccgggagtaacagttgctccgtctcttcctgtgtctggctttatttgca

SEQ ID NO: 33876 - DNA, 2300 bp, Homo sapien
aaatgaagaccttgacaacagtctacatctaagtcacaatttcatacttcccttacatttcttgatagataattttattgcatgcatatgcaaagggtgagatatatcttagtttttagcattgtaagaactgcacagtactgaatgtagacataggcaactttaatgttatgttgcattcatctgtactgaatcactatagctcattttgactcctctgtaatattccattgcatgacaattagcatattttttaagtgttgccaatcaaatagatatttggtgtttcattatggtcttgataatactttgctatcattaatgatgttgaagatcttgtatgtttattgcctttatcttgttgttgtctcttccttttttctactaggttatttgtactccattgatttacaggaattctcatcctttatcagttatgtgtgtagagaatatcttaatccttttttgtctttactaagagtttaaaatgttaagggctttttgacatttaagagcttaatatggccgggcgcggtggctcacgcctgtaatcccagcactttgggaggccgaggcaggcggatcacgaggtcaggagatcgagaccatccttgctaacatggtgaaaccccgcctctgctaaaaatacaaaaaattagccgggcatggtggcgggcacctgtagtcccagcaactcgggaggctgaggcaggagaatggcatgaacctgggagacggagcttgcagtgagctgagattgtgccactgcactccagcctggatgacagagcaagactccgtctcaaaaaaaaaaaaaaaaaaaaaaaaaaaacacaaaataatatatcaggcatttgtgggtgtgttatggggtagataaacattctgtcttttccatttatgtaactttttcttgctgtcacatttattttatagtcccttctccccatcagtttaaaatgtcacctctgttatatgcttagttatatgcgtgcataggtgtattaatgggccctctattttattctattgctgtttcatgactaaagcttcaaattgaattctgatatatcttagagcaaaaattggagtgtttgaggcttttttctttttttaacaagttgcagttacttaaagtttaggctgggcgcggtggatcacctgaagtcaggggttcaagactagcctggccaacatggtgaaaccctgtctctactaaagatacaaaaaattagctggacgtggtggcgggtgcttgtaatcctagctactcgggaggctgaggcatgagaatcacttgaacccgggaggcggaggttgcagtgagccgagatcgtgccattgcaactccagcatgggcaacaagagcaaaactccatctcaaaataaaaaaagtttataacatattgcaatgaatttctacacagcaaggaaagagttgtacaaacagctcaaactatattaagataatttttccgtatttttattgtgttctggcttatctcaacttgaaaaaaattttgggtaacgttactcctatttataaggtaaatttatattatgtcccagaatggaatgaaaataaggcctacagttttacaacatataaaattggcagaacttttaaaataataaatggcagggcgtagtggctcacacctgtaatcccagcactttgggaggctgaggcgagtggatcacctgaggtcaggagtttgagaccagcccggccaacatggcaaaatcctacctccattaaaaatacaaaagttagcctggcatggtggcatgcacctgtaatcccagttacttgggaggctgaggcacgagaatcacttgaacccaggaggcggaggttgtggtgagctgacattgcgccactgcactccctcctgggtgacagagtgagactccatctcaaaaaaataaataaagacagttttaccttataaaaatatgagttgaagaaaggctaaaaatcagaatttgacctggaatatgcagactttcaggatgagaaattagaattgaaaatatacatgatttaacagaattactctgagcttactaaatacctcagatgcttctgggggaatattttcttataatctataaggaagagatcatattggagaaaaattcattcttcacaaacaaatgccatttatatagtatcagacagatctaattaacaaattgatattgattatgaatatgtgacatgagtaattattctgcctttgttattgcctttgatcaccagaaatcaatacaaggaagttttatttttatatacacag

SEQ ID NO: 33877 - DNA, 2300 bp, Homo sapien
ctgtgaattcacatgaacgttcataaatggccaaaacttggcatgattgggtagtagagttctgtttgtaaaaggaccactatcaggtaacagtttaaatctcccagtaatcttaccttatttcttaatatcctttttatcattaaaactgtttagcatagaaaaaagttcctaccagaaaaaccaagtgactggaagatagtggaaatgaccaagtgaaataggatcagaatgggaactaattaggaacatcaagaaggcaagtgtaggcagggtgtgatggcccacatctataatcctagcattttgggaggctgaggtgggagcattgcttgagcccaggagtttgagacctgcctgggcaacatgatgagatctccatctctatgaaaaaaattaaaaagaaaaaaatgagctgggcatggtggtatgtacctatggtcccagctactcaggagactgggcaggaggattgcttgagcccaggaggttggggcttcagtgagccatattcacaccactgcgttccagcctgggtgacagagcaaggtgctatctccaaaataaataaataaatgttaaatttgcttttttctctctctctttttttatgtagaatttgtttgttgatacttactgaatgtagtgaccctgctgtggtaatgaacacttctagtgccttctaggcttaaaataccagacaaccccaaataacaaatgctcttttgtgttttgataggttggatttctgtttgcttaatattgggaatactgggggaaaaaaagatggtgttttcattctaaggattgtcctaaagaaagtgctactttatttttaagaaagtaaggccacttgttatataagaaataacaagttcccattgggtcccattttgcaaaaggggataaagaattagactgatagcatcatacgaggcatatttcactatacaaagtgttgtacacctgtctatacaactctcctacccagcttgacctcacttttcatacctgatgcagcaaacaattcagtgccataggagaaggaagcagcatggttataagtgactaacacgatattaggcaatttgtccaaatttctcattttctttataggtaaagatagcattcttatttgattaattttttgttccactggctttgaaagacaaacgattgttaaagataaaattgtttttgttctttttcttataggtccttcagtcttggagactataagggagcctctgcacccagggaaaatgttaccctttacaggggggaagggtaaaccagtagggaatacagtacaatcccaaccctactgggaggggcgggagggaggtgttgccgtcactgtattaagtcgatgttgggaaacgttttaacatctggagcctttgtgggtggaaatatgtctccagttacaactccgcagtggatgtgaagaagcaaaaaaaaaaaaatctattcagtctactcacaaaacagtacattgtggaatattatggggaattgtaccaaaacaagaaccatataaatgatgcctagggacaagaaagaggaacaattctatagcgcacaataaaggaaacctaagaatgggagttacaaatagtaaagaagctttttttttttttttaatttaaagtttttttatgtaagttttcccacatgatggggccttgttttgcatgttgatgaagaactacacaaagaaaactaatatagttaaaagtcagcttgccttcccgtagtagaagcaggttcttggaagttacaatttaaggtaccccaaaaaagttggaaataaaacaaaacaaacataaacaatgaagcaccctgtgaaatgccaaatgagtcactccttttaccttttttggggtgggcagggagggaggaataaatggggttgggcatatcaaactaaagatgacatcttaattttgcattgaacattaatgtagcggatataatttgatgattatacttcattagatttaatttctaggccaagatgttactttttaaagtgcagtttaaggttcaggcatgcattctggctcatagtggttgaaagtaatttaaattagtgggaaagtagcatgcttgcatcacatagagtgagattggtattcatttacctatgttgcgccagtttgtgttgcagtttaccaattcaatatagccctgcatttaaagttcctttttaagatttgtggattttatttttattaagaacatagatatataaagtactgtagtttacaggtaggccttgaaatatcttttttaggatc

SEQ ID NO: 33878 - DNA, 2300 bp, Homo sapien
acaggatatggtgtttcggccctaatgaaccttgcaaatacctgaaatactcagaatacttattttcattccagatctactcctaaatttaaggggagcagaagaatgcgaatgaaggccagtaactattgtgaatactatactaaattgtctgtaggtaatagccacacattggaacactaacaaaaggaaaatgtatgcttgatactactgagaaacaatactttgtcatgcaggaatctatagcattcaagctgagatgaaggatttgacaagttaatttgtcttctctcttacctaagcatttctgctgctcaaattctgactccaaagcagtctctgaaatgggcagccatgctatgtacaaattttcactgcttttggagttcaccgtttgttttgaggacagaagacaaaagataggaagaagagttttcctggggcctgaatagtgttcttcactgggagagggaatttatggttatgagccagtgttcagtatcagatcacaagcggcaggggcacctatttttttttaaattaatgtgtgtgtgtgatatgtaagttcctttaaagcatggagtccaggatagaagtctctcttgcccaggtctaagggtgcggggggaagggggggggcgcggcggtgggagggagtactttagtgatactaggaatttaatgccaaatgtatttgctgtgtgacctagatggctgaattttttaaaaagttcttcagcatcgagaaaaatccagttagaccgatagcttagagagctgtagcttatttctaaatttgactttccctaaaactaagtgtaaatgtcagtgatatgaggactttttaaagaaacaaaataaagaaacaagatacacaaaaatagagcaactatggccaatcttgtttcatcccttttcatctatgaccttactcatacccctatccataataaatgactttcagcaaatcctagatgttctgcatcctatatctttctaacagatattcttaaaaagtatgaccacaataccattatccaattattccttgttcaacaagcacttacaatttcatccatgtgaaaggcacctcatgatttttacttgaggatgaagataatttctcatgaattctcattgttttaagtcacctgaagaggtgtgatatgctacaataaatctatttgtagggcttggcttcaagaactgaagattctggacctagctgatctggtgacagtgaacttgagacctctaatagcgtttaactatttttttttaacttttggaaagcaaggtgtaggaaggggatttagtttttccattaggtcgtggcatgttaagacttgtttctttttccaaaatgttcaagttgctgaagagaactatggactatgggtcaggaagtccgtcggtttcgggtcacattccgctcccgcaggcctgcgggccgccccagctggtttgttcccggcgtgttagaggtcagaggccgaggccgcactcagtgcctgggtctcgcgcagctccagggctctcaggcgacactgggcgtttcctttccggcttcggaaagttttgttttggttcaaggaaaggcgccctgttgaccaaaggcttctcagtctcctccgggtggccagcggccaagtttcctccagcccagcgagtccagactatagtccgttcgagatcctcgaaggccggggaagcgagtcttgtgaggagagaaagcgagtgggcagccagcctgccgactccactgccgctggctggcccttctcttccctctgtccctgggccagtgcccgtcgcaccacaaacagtgcgagcagtctccccggtgactcctcaaggacccagttctccaccattcctaagagaacactcaacccagccgcgcccgggatgcagagagatctaccaacacccgagaatggggacagggcgcatgcgcacaccgtggccgtggcgtctaagtgctcgcccagctgcggcagccgctaggtggcgcatgcgccctggaaggtgcgggccggtctctgggaagaaggcggcggcggcgaaaggcgggggtgctgtgggggccgggccgtgtttacacagcggcgggcgggcgcggacgcggaacccggcgcggcggcggcacgatggtcatggcgtatttcgtcgagaatttttgggtaagcttaggatgttggaagtcgtgtgtttcgaagtccaaggcttttggcgcctgagcttggcctgcgtgcgcttcgggcggcggcggcggcccctccggcagggcgagcgtcctc

SEQ ID NO: 33879 - DNA, 2300 bp, Homo sapien
aagttaaaaaccaattacttggccagcttgccttgtcctaacattatgatatagctattactatcaagtacaaagacacataaaccaattgataaattatatattacatgtttattaagagcacaacttttatgtaaaatttacatttaatgaaaaaaatcaaaaatatttacaaaatcttggaagacagatgtgcattgttctaattacaatccaaagtagtaaataacaatcctttaaaactcacatttattagagttgtgtttacaaattcttggttaaagaggcagctacaaagtttatcactatatataagcaagaaccagcttgctaggtacatttcccattgaaaatctactggtctcttttacaccattagtggatttttaaatggaaaaaaaaaatcaatataaactcatatggcttcaaaattgtaacctgtacccaatacttggtatgaagactgtggtaactaagaaagtgcagaagtttaaccatttcactaatttgtacatttttaggtaatatttgattaaaaacaaacacggtaagaacagtgtctgaattccaataataaaatattggctgccctaaaagcagtttgattgcaaagcaaattacagttagaattccagtaagggactgtaattggcatttaaaagagcacaatataagagttagaaattctaatttagctcactatttagtaaagattagcattttagcaaattatcttatgtgctgctttagtcaaatgtaaattcagacttgggctaacattgaatatataaaaaagcatatactgtgttatatattgctaaagagtagattttctgctgtatttagtacagcaagatgttacataaatgtctagtaatagaggttttattttctgtgaagcttaacggaacaattagtggttttatataaattatcatatataacacaatttatcacttctactaggcaaataaaggacactcatatttattattataaatgaaattcccatttgtaaattatgaaaccttatccgaaatattttatttcttcaattaatcaagatttgctactaaagttaggtttcttactatttagtattggtagtttatttttagaaatgtttaaccaaatatatcacttcaaataatttccctatttttacaaagtagaaattgaataattaaaatgtacaaattggtaatttttccaattgttgaaataaaaacaaatggcagtgcttctccttctgtttccaaaattaatcttttaaaaaatgcatccctcacaaaataccataaaactcatgttcacaacacaatcagtaaataaatgcataaattttcaatgataaagtatcaaggaaaatgctaaattgagagttaaaataccagttaccaatttagcactatagtttttttagaatttgttttaaaattcacacacttttgatgaggttaatgtcaagtatctgaaggtaatctttcttcctgtaaacacatgccattgggtttatttctctttctagtggctacagtgtatcaccaaagaagtgagccaggattcttaagttaggctttatgactctgaatccccttcccagttgcaggccaaaaatatttacaaaaattgcaaatatcttataaaaatgcttgatcactgtaagattctgaacagaagattcagactgagaaaaaaagtgaggcacattaatgaacacaaattgtataggcacatctctggtttttgttattgttttaaaaggcacacattatgcaattccatataaaaataaattaaatctacagcattaattcatcaaaaaaatcacaactcctataaagttaactaactgcagaagtaaatgtctctgctgtcatttgcaagcttattttaaaacacattgcacttgagaattttttttaaaaatcatataaaacatcacttatactttattaatatgtttatgagaatcaaattatagattttttgcatacaacttggactctggtctgattaccttatggcacatagctcaatttgattaagtgttctgagttaacattacccaaaacttagaattcatgttctatttgtatccactgaatatcaaacttatgaaatttcaaagttatctctgactctaaaaatgtatggaaagctaaattactttgtgcttgctcttctgaaactttaggcctgatattacactataaccctttttttcaacatagacactggaaataatttaaaaattaatcctacaaaaacttcatttttactgagaatctgaataaatg

SEQ ID NO: 33880 - DNA, 2300 bp, Homo sapien
atcaacaggccccttgcaggcctgcacatgacatggccagagattcagtttcaaataagggggaagggaagaatgagtagggaaaggacaaggaaacccttttgcacaatgaagagttgttcacaggcctgtgtcagaggggacaaatcctataatgagggcctgagttcttagaaagccagtgcctgctgttgtacaatccactcttgggtatctgcccattcgctggacatgctttggtgcccttccagaaggtggtataccttgacacttggaccaggaaggatatctccaccccaaacatagattactgcaatgtccttgggacacagtgcctgtattgttataataatctaaacgtgcttggcatcacaaggccatgagggcgttttctgggttcacagcatggtgtgttctctgagtgacaggtgtgctgcgggagaaacactgaatggtcagcgcatctgcatctggctcaggccttctctgcatgtcaaccagctgcagaggttactttacctctgtcagcctggacctcagtttcctcaactgacaaatgactgtttttctcagtctcctgtcccctgctgcctccaaccttttctgaactgctggagagatgtagcaaagaaccacaaagcaaggggtcgtgagtgttggcattgttcatttcgacagtaatcagggctgttagttatggcggggatttacagaggtcgggcaccctggctatgaaaaagtccacctttggccacccaggcaagtgccccaccaaattccaatggcaagaacttgtccgttctgcctccctggtgaaccctaaagcccaggtaaccccctcccctctttacctctctgactggttctttaagtctcttctcacctctgatgattagctaagcctgcttcatactttaccttcagtgagcatgaccaggaatctcttgttgtatcaggtaggtaaagtgcttgcttgcacattgaaaagtttcatccattggccttaactctagatagggtttcaggcaaggcagacaggaagctgagaagagaaggcagggctgggaagtccccgtggctcagggcacctctgcgcttgggcagagaacccttgactcaccttccaccgtgccctgacccctggtgtggaaactagcacagttggatccgtatcacgtgtcacggggctggttacaaatagcacagggattggcaaactcatcccgaaactcccggttcaagggcagggaaagttaccagtttaattccggcagatcattagtggtggagaaccaggaagggggttctatcgcaaaggagggctgtgcgcagacacgtgggtgcgggaggggcagagctggtccggcgcggggcttgccgcgtctcggcctcagtctcggagccaggacctcaggcctgaatggctgggtgtggagggcccttgtctcacattctgtagagcgcacgtcgtcccgtgacctggtggctccatattcgatggggagctcgcagcgagtcgcttccctctgtaaccccactccaggtctccagagcagtaggagggccacagggctgctgggtgtagtcgccccggacctcgcggtggccaaggccaaggcggccggggcacggtaccctgttcggcctgggccgcaaccacgaaggaggcggtggaggcgggggccggcgcttcctccgcgccccccacgccgccgctctctcgcgcccctatagaactgggcctcaggcctcgagggggagcgggcctcggcgggcggggcgcacagttccgccagccggcgggggcatctcaactcgccggccccgccaggtgtgcgggccaggcagccgtggaaggtgcccatttctcccagattcctcgcgcgcacggccacgagcgcggaggctgccaaacccgccagccctgggttccgaagccgcccctggctctccattccctcgcgggcgcgccccgggcccccagtggcggccagctcccaccggtcgctcctgcactgccctgccctgccctccccgggccgccgcgcccgcgcagcaccgcctccttctctaaatactgccgggtccgccctccgcaccaggacgcgcggtgggtagggtgcagggcggccggcgcagccgaggccgcgtgcggaggcggacgccgcgcccagccagtgcccacagcagcgcggtcagccaggcgccggacccagcttcaggtaagctgccccggcccgcgcgcctgcgccggcggcggcgggtcgggcgctgagctgtgcggccaggctgggcgcggg

SEQ ID NO: 33881 - DNA, 2300 bp, Homo sapien
tgtttgggaatttgccttaagacagttgaagccttgtgactcactgcaaagttgactatactgggaataaatgaattcctgataggactttgcagccgagaatcacccttctctttcttgtctccgaaaccgcaaaagagattgcatgattcaggaaaaaaattaaaacaacaacaataacaaaaaaccaatatatataggtttcaggactctccatcgtttcattccactgagagttttggaatgtactccctgtaggataaatgaggactactgtatactcaatatgaaattcttattcactgcaggatgttactgacttaataaaaaatgggaagattaaaaaattagtgcaatgctttgtctcagcttaactgcatctgtatatcaagtttttccaagtttgaaatgaaagcttttttccctcctatatttcctttttttctccaacttccttctgattctatcatactttttcctggaaaagtttttcccagtgtaagattgcctgtttgctttctttacctaaactgaccttccctcagtgtgattttggtttgtcaagatcatcttgggcttagggcctcagtcttgagttccttcatgggaccatggatgtgagcggcacaaaatattttaaaagttttctttccttgggcaggtgaaaatagtcttcacgattttggattgtctttgcaattgcaggacctgacttacggggtcctggtaaaatatcccattcattggagtaaaataagataacgagataattaggtcagctctgtgtaagctagacaactctttaacaaccacttggcatatttaatatattatacccctgaagtacagggcttgggtgattttctggaaggtgctttctcacttgattccacttatactattctttcaaagccaagttccccccttccacccattttgtgctttataactagcagttttattggctgcttgttttttaactgagtctcaacctctttgtggaagtaggtgacaccatggaggagggtgagtgagaggccacaccagcctttgggtacctgtccactctgaaaattgagctcctgttgacctgctgtgcaacactttccagggtcatcccagatccaagcaactgggtcaccagtctgtgcttgttgagaacccaagaaccattttgttttgttttgttttgtttttggcagggtctcactctgttgcccaggctggagagtagtggcgtgatcttggctcactgcaacctccagctcctgggctcaagcaatcctcccacctcagcctaccaagtagctgggaccacaggcaccatgcctggctaaagtttgtatttttagcagagatggggttttgctatgtcacccaggctggtctcgaactcctgagctcaagcaatctgcctgcctctgcctcccaaagtgctgggattacaggcgcaagccaccacgcctggcctcaagaaccacattttgatagaatcaacttaaaagtccaccaaacccactgtgttcctgaacagacttcttattctattgaaattgctgaaattgggtcttttgtagatgtagccttagaataaaacatgaaatggaaagctgctgtagtctaaaacaggaaatggaaagttagttactgaactgacttgaaaatgctgagagcagctatgatgaaaagtggggcatttgcaatcagaaagaatccctgtggttcttccctcattcaccagtgcttttttccccagggaaatgagtttgtaagactcagaaaaggaaatgccacacccagctacttttgttctttcagtttttaaaaaagatacccttagatgtgtagtaatttaatttcctgttttgaatatcttgtaaaattacatatttaggagtttctgaatgctagtttatctgactcataaaccaactcattgttctacagcttatcagttgtataaagttctacccccaaggcctcattgtggtgtgatttcagaaatgatcagcaaaaaaccagggtggttctggaacacctgtgcccacgttaatttggtgtttggttgtgtttgcagagctgctgaaatcttggagggaagaaaacacatcccaccctgcctccgggaaggggcctctcctggacatgtctcctgcagctgctgctgagccagatggggaccagcaggacagacacgtcagcaaactcatcttctgcttctttgtcttcggcgccgtcttgttgtgtgtgggagtcctgctctccatctttgggttccaggcatgccaatataagcccct

SEQ ID NO: 33882 - DNA, 2300 bp, Homo sapien
accaccatctacccctttggctactcagcatccacacacagccttctatacattatttgcacttgtatccacaaacaaaaaccactttgtgctttgcataacaagatgaaactggtgtccaaataaagatgccctcatcctctccttgaaatgggagatacaaacttccaagaatcattcatgcgttcatctctgggcaatgttcattcttctcaaatttggccacaatcccatctggataaagactaaattgtaaagttaaccacagacaacaatatttatgtaaaataataaggggaaggaggaaaggcagaaaaagaaattgatttgtatacacaaataaatatatacataacaattaaggaagaagctatgcagagctgctaccacgtttattcctgcaattggccatgagtccctagttgatatttgtaacttttttcttccactacttagtccctgtttcctttgccctcatcaaggcctcagttgatcggttctttacctggtggagtgacgcaagctttctttttggaagaatctgaatccacaatggtcctgtgtgtcggtcattacaattttcctttaacttttattattgggcataaaaatatgaagagaggtcccagagagtccctaggttctaaatatagtcctttctgctcccatgatgttgtagcatcctagtttcctcttggtaataaagagcaagtatcctggccaggaaagcaaccccttctttgcttgctggttcagggtcatgagaagctcagaatggccaagtggcagtgtcacttttctattgttgtgtcccttggtacacaacagtaagactaagacctcccaggtcaaagttgaaagacagtcagaaaaaataatgtgagtagattatcaggtgtgatagtgagaggagtcactcctactttctctccttaatttctagacccatgtattctgacaatgaaagaaacaatgctgtatattgcttgctggtttaaagtatgtactttatcctggagatgaaatgacatctatggcggatgctgtggaacactgctcagatccaccttaagactgaggcatttattcccccaactaccagaagtgttgcctgctgaccgttcatactacactcctctctgggcattttcctcagcaggaaagaaggccgccttgaccaagattatgtccccttcttggtggcaacctgcatccagtcgctggccgatacgggaatacaaaggcctggcaccttaacttcaatttggaacaattctgaagcagcattcaagctccaggaagacctaagcattcagctgaagcctatgttgcaactgcatcatagttcaacttttccctttgtgcaatttggctaccctcactcccattaggcattgtttcctagagcattctccaacaaatctatggcattcaagtgaccccctcagcatctctttctagggaacctacccaagatgctatctaatcagggtgatatctccttactggtgctataactgaaccttcagtaagccattctaccattcttttgggctagctgcttctggatgatagaggatgtaattatagcaatgaattttatgagcataggatcattgctgtacttcttttgctgtgaactaagttctttgatcaggagcaacgttttgcagaataccatcatggtgaatatagcattctgcacaccatatacgatgatgctggtagaagtattaaagtgagggagggcaaatccataacccagaatatgtgtttagttgagtaaggacaaattgctgcccctcctggaaggagtccaccatgatccagctgccatcagatatttggctgtgatcttcagggaatagtgccacactgaggactcagcattggtctctgcttttggtaggttaggtactcaacagtgatggtagccagattagctactagttttaagctcatgcatcgccttcatgctttcatcatggtagcctgcatcctgtgtacatgggcttatcaaggaaacactgatgtctgggggaaaagactgactgatatccacagaatacaccagcttgttcacctgactggtagagcctcctttgcagtggatgcccttgggtgagtgttcacagggaacacaactatctttacactctgtgcccactttgagatatccttatacttgttcaccatacttcctgttactcacattccaatcttgttctttctgagtccttgaaacctaggacaccactcacctctgcctatgaaccaacatcgattgtattattggccat

SEQ ID NO: 33883 - DNA, 2300 bp, Homo sapien
ttggttagctttaaaaaaaaattgctatttaccatctagacagaggtggggcttttggaagaagcagctgagtcaaacggaccttgaaaatgtaattggagaactttctgatctttctgctctgaaagcagttccagtttgcattcatgagctgtctaaaggagggtgatctgtttcctctactctctcaggcttcccagttattcttagtggatatagctaaaggcaaatggaaaacataaattgagtgatttagaagacagttttgagatcctagcttttttctaaatgtcagggattgttttgactgttaacttaggagttaagaacctgaaaataatggcaggctaacttaccagaaatttatagttaaagagaaaatctggctttcctggatctctgatctagctcagtgggaaaaagggcagcctgttcctatagcaactccactccagccttgctgctccaaggcacatccaggaagatacctcaggggtcacctgcttgcttttccatctgtttggcagtgaagtaggagattacaagccttgtcctgtagcagggagaggcattttcatggggaaaaatgtcctttggtctcctagaagcatttaaggttaacctggggttgggtttcctaagatttcttgatgatgaatcacctgaggtccttcccttggatatttggttctgttggtctgaaatgggagctcacattttgtcctttaaaaaagtggcccatgtgatttctttgtcaagggaagtttaggaagccctgccttagggcaagacggcagccctctcaattctgcaaaaggagctaatataatatttaattactgcagagagcatcggcttgaataaaatctgtctaggaaggaaagaaggctacagttattaatcagtggaggaagaaactcatggggctgtttggaagttttgcagtcatgaatgacagataatgttattgaaaattaaactgtcttctctacatcaacttgggtttggttgtaaaacatagtaggttccaaaacacagctggttgtttcaccttgaagaccaggaactgtgtggccaccatggagggagggtccgaagcatgtgtcctagtgagccaggtcatatctgatgcttattcaaccactggcagtgatgcagtgcataaaaaggtttcctatgacgttgttcctctcccaaagctggaattactccccaaacgcagaaagcaaaaggcatgtggggctggccagaaaagaacaggatctcagggctttgtgagaactgttattaaagtttaagtatcatcacagctaggggttcttgaagtagataggaatacacacgcagtcaagaaataggtgtctgtctattcctaatgaactgaaccactaggtaaatcaggttagactcctgtgcatgtgtggatatatcaagggccccattcactgctggagacccttgagggagctctgccatttctacaaagttgggtaggacaaaaacagggtcttatggcagcgtcttaaattgctatagaagagtacctcctggggccaaggcaggaggagcacttgagtccaggagttttgagaccagcctggtcaacataatgagaccctatctctacaaaaaattttaaaaattggctgagcattgtgatgtgtgcctgtagtcctggctactggagaggatgaggtgggaggatcgcttgacccaggaggttgaggctgcagtgagctatcattgtgccactgcattccagctgggtgacagagtgagacccacaccctaaaaaaacaaaacaaaacaaaaaaaagaaaagaaaagaaaaagaaagagaaagatgggctcaataagttaatttttgaatgtgtgaatgaatgaatgtgaattagagagacagcttgtcattgacttgcaaaacagagacctccacttgttgacaatacatgagaaaacttcaggcttcatttctcagacctttattcttctaaacaaggtccagccctctgtgtgttacaccctgttaagcacaagccctaagttcttctataactaatttggacctgtgattccttggttctcacaatcctctccactctaagaagcagggtgagcccacaaggagcaatggagcagggcagcggccgcttggaggacttccctgtcaatgtgttctccgtcactccttacacacccagcaccgctgacatccaggtgtccgatgatgacaaggcgggggccaccttgctcttctcaggcatctttctgggactggtggggatcacattcactgtcat

SEQ ID NO: 33884 - DNA, 2300 bp, Homo sapien
tttgggaacccttgatctaaggcatggtagtgggggcgaggggaagcggtcctttctgtgaggcatttctgggaccaggtcagggatactactaattggtatttactgagccctcctcacatacaggcacccaccatgattcccattttccagatgaggcaactgagctctttcattcatttctctgctgtgtactgaagtacctcaaagcaggagttcaccatgtttttgaggccatggaaccttttgagactctagtgaaagctataaaccctctcaccataaaactgtacatgcatggaagattttgcagtgttggagggttcatggagccccctaaagcccatccaagaatgcttgattaagaatagtcatcatgaaggacattctctcagggcaggccaccaacaggcacagtaagcttgatccgtagcagcctgaggaagggcttctggagcacctgcgtgtgcagagcacattgagagatgctgtgggcacagaagtgaagatgacatgcaatgagctggaaagactcaactgaacagaaagagagataatatgaaattcaaggtagtttatgctaagtcctaaacaacaggggccaacaagccctgcagctcagggtggcaaggagtcatgcactgtggccttggtaggagggctgagaggttggaggttgggaggtgaggcctgacctgagctcagcaggcaggagagaattctgggcaatgggggcttggtgaacagcatctctttttttttttgagatggagttttgctcttgtcactctgaagtacaatggcgcaatctcagcctactgcaacctctgcctcctgggttcaagcgattctcctgcctcagtctcccgagtagctgggattacaggcacccgtcaccatgcccagctaattttagtatttttagtggagatggggtttctccatgttggtcaagctggtctcgaactcctgacctcaggtgatccaccctcctcggcctcccaaagtgctgggattacaagcctgagccaccacgcccagctagtgaacagtatctcaaaggagaggacggttttggggaggacaggagaaccactagtagggcagagacaaggaaaaaaagcctggtcatttggtttggttttaagggattctgcatacggaagtttttaaaaaggaaacgaaagagcagaataagaaaactattttttaaatgttcaaacggggtgaaaagttttgtagcctttttattttaatttattctttttttttttttttttttttgagtcttgctctgtcacccaggtggagtgcagtggtgtgatctccgttcactgcaacctccaccgtccaggttcaagtgattcttctgcctcagccccctgactaatttttgtatttttggtagagacggagtggaaatcatgttggccaggatggtctcaaactcctgggttaaaagcgatccactggcctcaacctcccaaagtactgggattacagatgtgagtcaccacgcccacctgtagtctttaaaaaatatgtttacgttgaacaattaaattattgaaacacaaaacatgctatataattgttctgttcagaaaaaatattacagaatttacaaaaaatattaactcagttccccacaagcaatgtagtccagtaacagggccagagataaagttgcaacctctgtcagcttctatgggaccgtgtccataacctcatttgcagatgaggtctaacttcgaagtgtaacctctttgtgaaagcagagtttcaggccagcagtcctcctgccgccctccctccctccctccgccctgtgataggccctgcgaaaggctctgccttagagtggggagggtctgtgccgggatgtgtccctttgggtcccattggagagggctctggggccccgctagcgtttcctcctttgtcctgtagggggagccgctgcagtttcgcgggaagtcggcccggcggagggcagagccctgggcgtggaggaagctggagccaggggagactggcaggaaaggatcacgtgggccagcgagaggagagcctggacaggggccagcaaagggcgaacttctgcagacgaggactatccagccctaggggtacgggagagggaaagacgaggccgagagggaccctgactttgcagcagggtgtctgggcattggtggctccacctgcagaaccaaaagaatccaccaggtctgatgggcaaaggtaacaaactcggcgtgagtcctgcctcgctgcgtgggtcgtctcaactgtgcttc

SEQ ID NO: 33885 - DNA, 2300 bp, Homo sapien
tcccgcgccatgaacggaatgatggctgtaaccggtcatctaaagtcattaatggtctgcgaacaaattcttcctctctgtttcatctttgaataacttcgccacacaccaaccctcagtgctgcgaaagtcatggtgtttatttagatatcgactgagtacttataaaacttaaactttccaatgtaaaagtgaactccttggtaaggactcctggctgcatcaacaaagcaatgtgatgcctgattaatagtgctgattaatgttggctcaggttaatgctcagcctattacagtaattaaattgttcacccatatatcaaacaagagttaatgaaaaataatttatttagaacgtcgaggctttctcatagattgttcaaagacctatgatagcctttatgggtcacttgtaagagtaactggtggtagcagtcctcagcaacaaaaactcgattttaatagaggtctttagatggggaaacagtttatttctgaggctctgtgattgacagcggtagtaatgacacgtttcagaatgtgaaaagtacttggtcgataaaatgatatacacaagggcagctgatggctgttcctacagaacgccattgaattttgattcttagttcttgtcaaggggtcattttaatcagaaagttaaacttttgggacaagctcccctctttgaaatagaagcattttaggaaatgcacaaataagtgaatgtgaattcaacaaactattaggatttttccactagccaaaatagctcgtttgagttggtgataaagataggtatatttaaaagagcatcatatcttaattatttccactatcttgtcacccgaaaagaaaactgaattgagcggaactttaatctcataaaaaaaattttcatctcaccagaaaggattaacaatatttaaggattttccaaaaacacatttttaaaaagtttatcttaaagtcatctatcattatagtttctattaataagcctcagtagaaatatgtatatgttatgtaatttaagtattttgagattactatgcaaagtgctgactagaatgttcctcctactgagaactatatagccccattatgaacgaacttctgttttttttttttttttttgaggcggagtttcgctcttgttgcccaggctggagtgcagtggcacgatctcggctcactgcaacctccgcatcccgggtccaagcgattctcctgcctcggcctcccgagtagctgggattacaggcgccgcctactaatttttttctatttttagtagagacggggtttcaccatgttggccaggctggtcgaactttttagtagtttctaggtgcaatttttgtgcgtgtatttgggttttcactaaaaatttcaatttcttctccgaattcaattattacgttctttattcccatgacatttgtcagatcgtctcattagagtggcttagtttaactgtcaagtctctagggcattcaatcgcagagaagtgagtaaaacgccagtctcacagcgtttttattaacagatggcggaaaacaaacgtctttggagtaaaaccgaagagaatgggttaaagggtcaataaacaattattatcgtgcttaaattggggggcttcgcatcagatccaatggggggccgctcgcccgatctggaggggctggacacccccaaccgaccccagagcgtcccccaggggccacctcagaggatggggtggttatcccccggctggaaggctcctacaggctgtcgaggggtcaaaccagagtgtcgcgggtgtgcttctgaggttagggtggaggactaattgaggaggctgggaagtctaactcgtgcagcggccctcggtgcagacagccgcgtaattcgggcatcagcctctttggcaagaaatagtgaggtcccctctcctccccactcttctcagctgctgcctccctcctacgggtgaattttctctcccgagaagggctgatttcctaggcttgctttccttccctcggcagcgctctgacgtgcacaccatgtgacaggcccccttctgctataagccgaggaaggtccgccctctcctggactcagccctggcctcgccgagctctgttcttagactctcacccgtcccgcacgttcctgggcgcctggcgttctgattcgcccgcccgggccccgccaccccctcctcagctgacggggcaaaagctgctccgagaggagaaggtcaagtcctccgcccgggccgggcgcgagcggagcccagggagcgcagcatccgc

SEQ ID NO: 33886 - DNA, 2300 bp, Homo sapien
agtctagtatataattattttattagaagaatcagaatttcctgactactcataaaaccagcagaagcagctggagtcaaaaatcaaaattttggccaggtatcgtggctcatgcctgtactaccagcactttgggaggcccagatgggaggatggcttgatcccaggagtttgagaccagcctgggcaacatagcaagacctccatctctaaatagaaaagcacaaaaaccaaaccaaaacagaacgtaaaaagaaaatcaaaattttcttttttactattaagtaatcttttatattttcaacacgcagcaaacttttaaattcatgaaagaacaggagaaaaaagtaggaacgaggggaaaattaaaaagtcataagccagggaaagtggtgcacacctgtagtttcagcttctcaagtggctgagactgaaggatcctttgagcgcaggagtttgagcccagcctaagcaacaaagtgagaccccatctcttttaatttttttaaagttttatattttttaaaaaaattataaaaataaaattagcagcatccctggtttcaaaaagtagaaataaataaataaataaaagtagctcacaatatttcctgaaaacaggtgtattaaaagggcagaggagagggaaggcaaagaaaaagaaaaaaaaggtggcaggttacatacatacaatcttgtctctataaaagctcagaaaacatcacgtgactaggaagtttcaaatgcctccaatataacatggaggagaggaaaaaaactgttcctggacaaagatacacatttcttccaaaagggggagtctttctatatattttgtaatatctccagagcacagcataatgttggtactgccattttggcctttgtcattaggaaggtaacccacataagcctaactacaaacacccttacctgtactaaaacttcactcatatttaactgaagcaacattgttttttgtaaatataactgtaacaattattctaaaaggcaatacagctgtcctcaccagttatgttcttgagacatcagttgcaacaaacttatatgtaaaaagtattcaaaaagtttaaacattgatcttaactggagaggggtctgcacttgaacaagttttcttgctacacacattgcattctaagatttcggactcacttttgaatatgcaaagacatttcatggttaagaccacaaaaaggctgatcagagaacatttttatttaaattgccattttaaatatcagtcgttttatcttaaagcttgtcctgggtttaacaaagtttaactcacatccacgcgttgtctctccaaacacagcaggcagaaattctcctttgattggattaagatagataaagtctgcttaaccgtgaatcgctaattgtcaaatccatgccaattcggtacctaggagtcaatttttttgcctgataaacaagataattgtgtggaccgttttaaggtggttagtcatctgctaaattggctgaaatgcggattacccagttccttcgtcgtacagagttgcattctgaggagtggggctcggggatacagcccccagaaattctgaacctcggtcccgcaatctaccacaccacctaaccttggaaggccaaactaacttcactatttttgacaaaatgctttggtaatggctcattcgggccgagagggaaattctgcaattctccaacccacacctccagcaaggggagagctgcttgagtggtgagcacaagctgggcacctccggcgtctccaggaaacgtgaataggccctttcttcggagggcacagaacttcaggatcagggcccaatggagactgagcggacttaaccctaactgtgcacaggaccgcgctctccgacccctttgtggcctctcccagaggtacgggctgcgccccaagccagcagtctctcgtagggcctacagccggcagccgctggagcaggaggaggagaatagggactcgctggaccatcacaaacgctgtcgcgcgtgcgcagggaggaaccgagttcgcggcgaagtcagtttcctgactcttgaaggaagtggccttgtgtcacttccggcctccctttagctgccatcttgcgtccccgcgtgtgtgcgcctaatctcaggtggtccacccgagaccccttgagcaccaaccctagtcccccgcgcggccccttattcgctccgacaaggtacaaaaaggctctggacggcggcgtggtaggaggacgggagcgggggcgggaagttccctgaaggagcgagac

SEQ ID NO: 33887 - DNA, 2300 bp, Homo sapien
atggattggctttccaagatgtatagttgtcttagatacattatcatttgggacagaaaggaaattaataacatccagttaattttttcatgttagggttaattgcctcttaggaattttgagagggtgcagggtgtttcaaaattggaattggaattaaaagaaaaatgcattaggatcgcagtggagcaagggtcgcgaaaccatacatttacagataaccaccttctacaattttaaaaacattttcaaagattagtctttataacaatcctttgagtaggcaggtcaggtaatcatatgtccacctaggaggggtaaaaaaggaagctcatgaattatgagggcttactcagctcttctgactccatcactctgaccattaaaatgaggcagccctaaacaaagccaaaatctccacgagagagttgaataaataacacatagtatagtaaggaaaaaaaaaaaaagcaggaagtaagaaggttaatacatttgggcaaaaagaaggaaaccagaaaagaaaattagttcagtgattcaaagggagatggatgtgcaatgcattagtccatgcgtcttaaaagggactggacaatgtgaactgtgtttcctgagggaagaaccatctccccctttctcctatccagcggttggctaagtgcaactcccctaagctctctgagcaccctgcatgtatctgtattttagcattcaccatccttttgacaatttccatttaaataacagctaaattgaaaactcccctaggatggggaccactcttactaatttttgcacacagaacagtacttggtcctaccaggtgctccataaatgttttctgatcttaactttaacaattttttccatattcttttctatttctaacatttgctgattagacctggctttccactcccaacatcgctactaactagctggccactcctggacaaataaataatacaagttttctgaaattcatctattataaaaaggtgttgaaataggcctttctaatattctttccagctctaaacagcttccatgttacaaatcagggtttatagatggaattacaggtcttcgagaggagaatagcaaatgtgcttaggcgaagggggtgggtggaaaatgaacgcttatcttggcacagcagtttaacgagaggagaagcaaagttgattggtaggccaaaattttgaagaacaggagagggaggcgggggtgaggggagtggggtaacaggacttagaagaggtggtggtgagaaaaagggggtaaggcaatcgatagctaggttcacctcgatctgtcagagcccagggatgaagggatagagagtctacggagataaagtgggcagctatgctagttcctgtggatgctaataacaggagcccctcgtttcttcctgatcctggaattattctacaaggagaggaaggtgctatgaaaataaatgatgcctcacaggcgacaggtgtcccagcgtcccgagacaggagcccgctgtctcccgctggaggggagactcttgcaggaaagaaagtccgttctgtcgccaccggccagctgtgcccgaaaagtcccaggaagaaactctcgctcatccgcggcgagcggatcccgggcacaggggctggaggccgacccggtgagagtgcaaggtctcgcgaccaccgacgacagcagacagcgagtcgggccttcccatctgaggccagcttcagtacaggcctccaagcccgggcttgttttggccgcgacgtcacttccgatttcttctttcgccttctggctaaaaaacgttccgcagcaatgcagctgaaactttcgggttttcttttttttgtccctctctccttttttttaatatttttgtttttgccgcctttacgctccgaggcccatcctgccggagtactacacagacagggtcatttcagttgacggttctgggtcaccagagcagaggaagccccaatttcgccctccggtcacacctcctactccagatcgccccgcccacctgacccgcctctgcgccgccgggctgcgtgagtctcatgagcgtgctctggtacgtcatcttcgcgcgacgttcggttcgctgtgtgtgtcgccggctccttgagggtccatgtgatttttacgccagtgctgctgaactgtgcagggtagggagctggcacagtccgattaattgtccttgggtcgaggtgtctcgtcggaccctttggggctcagtggaggtaggtgaaggcggctcccattgagggaagcccacactcaca

SEQ ID NO: 33888 - DNA, 2300 bp, Homo sapien
ctaatagacatgggtttttcaagatttctactattacaagcaatacttcaataaacatctttacacatatgagattcaaattttaaaatttaattcatttggcattgattgatcatctgttctgtgctaggcatttgtatggttaatctgattaagcagtatggacttttacataaaattccaagaaaaaatagatatcaaattatctgcccaaactataagctgctgatagatggttttcagttaataattctctgttagagcatccagagtataacatatgctagagaaattggcataaacacaaatcccttctccctcattacgtcccacactcaccttatagttgttccagtacagtgtatcttgggtgattttttcaccaagtataggatatgtctgaatagctacaggcttataaccagccataattccatataattgcactattgtccaagagtcactattttggaattggtattagaaataattacagtgactctgccttaattctgaaaaataaaatattttatatacatattataagcttgtacacatagttgattttcactctgctttctttaaaaagtctgtgtggaagtatatagattagagaccaataagccatttaattctaacccagaaaaggcaatctataggaagcaggaataattaaagtgaaggctatcatatcgcaccatctattcagctgtacacaaaggttctcacacctagccaaccattttacaacacttaggaataaatctagcacagccttacagtagccaaaccaaaaaggatcatgctggctttgagtgtccattttttggcaacaggaaatattaaggtgaaactgcaaatacaagtttcctgaaaccaagtttaagatgacatttaatctataacaattatagttacggatttgatttcctgaaagcctaaaaatgccaagaagtaagaaacacaaagctaatattctaatgtagaagcttaaaattaaatttactttaaaaggtttaaacagtaggaaagaaaactgtaataaagcagtcctgaaattaaattcaacactaaagtggcagaataggataaaacttttaaataacatgcaatcaagccaaaacatttttccagaacgactcaattgcaaaagagattcaatgttatcaggtaaatgattccagaggtgctgctcatcatctattccaaaaagcctgaaaactttacattagtaacaccacgataaataggtgtaacatatatttaaaaggtgctttaatgaaatacaatgaccaatgattgtatttcactggtctttgggaacactcttctgttcattaaagtacctaccaatgtgcaggacactgctctaggcactggggctataatggtgaatgaaataaagacatggtctgtgcctttgcttactccaatatactccattttggctggtgactggcaccagatattaacctagactcagccttgacgtgtccttttcttcctcactcctaacatccaaatagttaacaagatctgctgattttatctcccaaatattttaaaactccattaggttcacttcacctgagggagcctcgtaagcaaaggcaaagatggaaatgtgtccattgccttggagagttgctgattactccgggaactaacaacggtggacaggaaagggtgtaatcgcagagaagaacctaggtcgaagcttaattgaggggaacttgagccggttaaagaatttggccactctcctatatagcctgggaagccccagaagagcatgccagattaacacaggaaggccgggtgtgagtgtgggcttccctcaatgggagccgccttcacctacctccactgagccccaaagggtccgacgagacacctcgacccaaggacaattaatcggactgtgccagctccctaccctgcacagttcagcagcactggcgtaaaaatcacatggaccctcaaggagccggcgacacacacagcgaaccgaacgtcgcgcgaagatgacgtaccagagcacgctcatgagactcacgcagcccggcggcgcagaggcgggtcaggtgggcggggcgatctggagtaggaggtgtgaccggagggcgaaattggggcttcctctgctctggtgacccagaaccgtcaactgaaatgaccctgtctgtgtagtactccggcaggatgggcctcggagcgtaaaggcggcaaaaacaaaaatattaaaaaaaaggagagagggacaaaaaaaagaaaacccgaaagtttcagctgcattgctg

SEQ ID NO: 33889 - DNA, 2300 bp, Homo sapien
gatggtagattgcttgtggctggcagtgaagatggtggagttcaactttttgatataagtgggagggctcccctcaggcagtttgaaggccatacaaagtaagagacagttggtttctgtgtgttctggttttattttgttgtaagctctttttttctctggactttggttaaaaagatagagatcagttttatggagattatttgcctataggtactatatttcctgattgttctaagagtgcttaacttgggttccgtggtccagtttcatggggcttatgaattccctagaattgtatgtgatattttaggaaatacacgtttatctagggagctactctgtagcttttggttaactttagtggggtctgtggcccagctgagattatgaattactgacctgaagacaaccttacagctggtaatgacagctctataggcctgtactgtcttagaggctcttatgttgaagtcaagtaggaaggtggattttcttcttgaatttatagtgttttgccccttaataaattaagtggccatcacaattttatattataactttgttttcaggattgccaatgtccgtgctgaaatttgttaaaatttaacagaaatttatgtaacatgattctatttagtggtaaatctctttagagttttttaaagaactttttgaaattttaaaaattaaagtgcctttgcttccatattcagcagctaagtggaattgtttatatactagaaaatataattttaaggctatcctttaattttttttaactttacaatataggagtatttacacttcttaattggtttgggggcaaacacttgtaagttttctctttctttcatgatttccccctatgaagactccctgaaactcagctgctttttttttaatctgagaaaaaggagcattttatgttagaaggtatcagaaaaataattttcttgctttttaatatactgaccttcaatctttcagagcagttcatacagtagattttacagctgacaaatatcacgtggtctctggggctgatgattatacagttaaattatgggatattccaaactccaaagaaattttgacatttaaagaacactctgattatgtgaggtgtggatgtgctagcaaacttaatccggatctctttataacaggttggtgaactctattccctcctgaagcaaataatctcacggggatgtactttaatgttgctatgggactcttttgggatggaggggtttaaattttttttataaaggaatatgtttctgattaattcttcagtttttaaattaatttttatgtatgtatgtttgcatttattttcagacagggtctcactctgttgcccaggctggagtgcagtgatgtgaccatagctcactgcatctgctacctcctgggctcaagtgatcctcccacataagcctcccaagtagctgggactacaggtgcccaccaccacgtccagctactttgtgtatttttttgtagagacggttttgccatgttgcccaggctggtctcgaactcctgggctcaagtgatccacctacctcaatttcctcccggaggactgggattacaagtgtgagccaccatgcctggcttccaattgttttttattttcttattcttcttttgttgattgttcatgtcttccaaatgtgtttggaaaaatcaggctgtcttgaaaacataatagactctcagaactgtaatgtatagtaccctgcctcaagcagccaagaaacaaagagtgcagtttagcctttgtgggtgcctttacaaagatttccagatgattcagtagtgacagtagtccaaagaaagaaatattttaagatcagagcaagttagattctgtatagtattatgtagtgcttcttcagacacgatcagtagtagatggtttggaggtcctgtgtcttcatgaatatacatatatgtctttttaaaactccatctaagctttttttccttttaaaatttatatctggatacacacagtttttgttgttttaaacagtcaaactaaaaattcaaaaattgacattttaggatcatatgatcatactgtgaagatgtttgatgcacgaacgagtgagagtgttctctccgttgagcatgggcagccagtggagagtgtcctacttttcccctctggaggtcttctggtgtcagcaggtacttcttaaaaatagctttcaccaatattgttggttttgaatcacgtttgtttaaaatcagttgctctttgtaatttatcagtgtgcatttga

SEQ ID NO: 33890 - DNA, 2300 bp, Homo sapien
attatgtagtgcttcttcagacacgatcagtagtagatggtttggaggtcctgtgtcttcatgaatatacatatatgtctttttaaaactccatctaagctttttttccttttaaaatttatatctggatacacacagtttttgttgttttaaacagtcaaactaaaaattcaaaaattgacattttaggatcatatgatcatactgtgaagatgtttgatgcacgaacgagtgagagtgttctctccgttgagcatgggcagccagtggagagtgtcctacttttcccctctggaggtcttctggtgtcagcaggtacttcttaaaaatagctttcaccaatattgttggttttgaatcacgtttgtttaaaatcagttgctctttgtaatttatcagtgtgcatttgaattgcatatctaagtctttgttcaaacagttgataggtaggactggcaagcagttatcatttattgtgtacctaatgtgagccaggcactgtgctgttacatatgaactctaatgccctagatgatgctacaaggtagttagctttttccctactttacagcaatgaaataaaagttttaacttatttttcaaggcaaagtggtaagtggcagatctgaaatcacagaactcgagagctctgtgtatttagccctgtgccatcttatttatttagccctgtgccatcttatttaaccccagaaatttagccctgtgccatcttatttaaccccagaaatttagctcttatgtatttagccctgtgccatcttatttaaccccagaaatttagctcatactccttttactcctacctaagagatctgcagcagcttttgaaaatcagttatttgagatctagtaggcttgtctctttttctgtgactctcttgattgaaatgccactacccagcaaatagctgctagtactagagaaaggagataatgtggcctcaaaaggggccttggtacatttttcaacaagttgggactgagatgtttttctcattttgcacatattgcattttcataattacagtggaagaagtaaattggcttttttcatttgtaaataaagtaaaaatgtgttcatattagaagaatgtataggtagtatgtatacttgacaacatatatattgctgtgtgtacctcctttttttttttttcttaattctaaaatctggctagaaattactctgttttatattcttttccccagtacctatttgatttaaaaataagttgaggcgggatgtggttgctcacgcctgtaatcctagcactttgggaggctgaggcaggcggatagcttgagtccaggagtttgagaccagcctgggcaacatagcaagactctaagactccatctttaattaaaaaaagaaaaaagttgataatgtcagatgtgtctacttttcttgctgttattctgacaaatggaaaaaatatcatgttgaacagggagaatagaaagctgtgtgctgatctccactgtgtgtcactagctaattgtgacctcgggcaatcccttaaggtctctagaccttgaaaatgagagggttggactagatcagtgatttcaactgtgatccctcttgtgaggtgccacataggagtggagaggtgggaactgtgagttgggttccaactcctgttccccagtcaagatttcagtctccccttccatccctttttctgtctttccatattagacttttttgcttgatattttgctgcagatctacattattcacttccactgctatatagaatttcttttaaaaaatgattttattataattttcttaaaatggactctttcagttatacatttattttgctggaatttatgtacacttcacaaatattatttaatggtcataacagttctgtgaggtaggaactgttattaccaatgacccaggaagtggtgcatccaggattttaccaggcagcctggcctggactccctcactcagcctccatgctttgtggagtgtccagagaagaatgcttttcagatctttaatatgttgaatctgtgggcagaatatccaactaacgatgatttctttttataggaggtcgttatgttaaagtctgggacatgttaaaaggaggacaattgctagtatctttgaaaaatcatcacaaaaccgtgacatgtttatgtctaagcagctctggacagaggttactctctggctcactggataggttggcattttaatttttttgtatattattattagtgtacacctgtttactgcttgaggaaatgagttattt

SEQ ID NO: 33891 - DNA, 2300 bp, Homo sapien
tcaggtgcaaagggttatttacacaactgatagcttcctgcctcagatagtcacggcttcttttaaggttgctgaagcaaacactttgcttaatatttgaacctagagaagttgaaagccaagtacgtatttaaatattgatcaagctcagggcttgagagcaggcaagaaaactgcagctagcattgtatgtccttgggtggtgagagtttcacaattactagttttgctggtttctttttagtggggaaggggcttgggggtaacttcttataatatttgttcctctttccacatttttttgttttttaaaaaaagatacatacctgccagaattaaaaaaaaaaaaaaaagaaaaagagggcttcagtactagtgatatgaaaaaggacaataacaacaaaggcttctaacacatcaccatgtttattcaccagagtttggaaaccatttttgtctggcatgttgattcagttaatcttcagttcaagtgattctcctgcctcagcctctcgagtagctgggattacaggcacgcaccaacacacccagctaaattgtgtgtttttgtggagacggggtttcaccatgttgtccaggctggtctcgagctcctgacctcaggtgatccacccgcctcagcctcccaaagtgctgggattacaggtgtgagccaccacgccctgctcaaaattttttctatttttgaaaagaatattattgcttttatttttatcttgtgtaccttgacactgggcaggatatatatatatattttttttttctttttttttttttgtggcagcgcctgaggccaggccttgagttcacagctctgtggggctgagggtggaatcagctgggatgacagcccaggtcaggagtgcaatgccagtgttggggtccctttcccaaggcggaattgcagcctttgccttggaacagggctaaggcattcagacacacgatggtctttctcttgctaatctcagcctttctcagcattcgtatcagcaaggtgggctggggaaggtggcggctggaagggagacagaaaaggcccaggcccaggagaagtggtggtggcagcctgggagctgggctccattctggcttgggatcttggtggccagcttcctcgggccacacctttgttatggttctgtgcgtagccagtcttcaaaggaaaaacaaagcagagactcaaggtgattttataaattttattagaaactttatatttcaatactaatttccttacaaatagtcttaactataacacttactgccacagcagtctcagatgggcaattttacctttaaagctgcaataatggtcttaagtctgtatatgagagcctggctgatgaagaggcttggcttctgctcttggggctgtcatcacatctaagaggaaaactgctttggaggataaggaagtcccttcacattgctgttcattgtaaaagtggttatggttttcatacgtttttgaattaagacttgcagccacttgcgtgcataaacgtgaagggaatcgcagcttgcaaagctctcggccagggaacatgagcttcaaataagagggcaaatgctgtttttaaaaataatatttcctattgtaatagacccgggccgtattatgtcacgggtgtggtggcttttggctgggaacagcctgagcctccctcgggcctggcacaactcctttcgcgagcgggcagcccagcgcctccctcgggaggcgccaaggcgtgggggcgcccggggcgcaactggcactcctgtggcccgccaggtccgcgccagcctccgcgcctccgatctccggaggccaacggccgcagccccgcagcgggagggggctggcggagacagcgcggtaggggcagcttcaggtttcctcctggagccggtgtcgggcgcggccggcgggcgggcctcgccatgtgatgcggccgccgcgagccgggccgggaggtgggcaggcggggatccagtggcagcggggaggcgcggggggagcggggggagcgggggcggcacccgctgctggcgcagccagccgggcccgggcgcgcggccgcggctccaccccctaaaccttggcttcagcccggccgccgccaggcgttggcatcgccggggagagccttccggactccgggcggcggctggctgggggcgcgttccgaggcgccctcaggcagggcgcgggggcagagcctcgcctgggttctggaggctgcggggccatcgctccaggtaaatgctctttgggactccatcgtctgcgtttc

SEQ ID NO: 33892 - DNA, 2300 bp, Homo sapien
gggtgtgttccggtttccattacaatgctcttcaaggggacgtgtgcatgtaaggccatcacagtctaaaaaaatggcattcaagtcattcaactagttctcttcacagcaccttatgattctaagttgatttctatgtggattttctacagatgtttttctacaggtaaggcttattgaaacatccagcccacatctctacttttcttcattagctaataaacaggcattctggttattcactggtgtctttcatcttggctaatgatagcctgcccttgatctatttgtaatgtgtgaacaaaaaatcaaattccctactaaggactcagtctatggacatggtcattagccagtgtaaatgccaaatgggtgatttttttgggggggaggttagccaaagtaaatgtcaaatgagtgattttttttggggggccagaccttcctgaaggcccctaaatgttgccatatacttttctttcaatctataaaagtattaaaactataaattgaaattataaatttgtattataactaagatgagaataaaatagatcaaatgtttttcatttggctatttgataattatattagttcaatataatatcacattatgttgacccttaccactcaacaactttcttttattttaatttaaaaaatgtctgaggagataagtgattgtgttcagaaattccatgatatttattttttatttgcaaatactattttgaaatagatgaaaattgcatattttttgtgtgtttagaacttactaaatttacaaaccattatttaaatgttattcttccagttttcagaagaaaatgcaagtaaaatgaagaaaatatatggagaattctgttgccatcataaagaagctgttaacctctttaaagaactccagcagaataaaaagtttcagaattttattaaggcaagtattttaaaactttattacaaagtgataaatcagcatggagaaatagtttatgcttgtttcttaatgatttaaacaaatttcttagctaatgatgcttttcaggggaagaagaagggaggtggaatgtttgtgacaaaggtggaaagtctctttttctgtattagtaaaatattgcccccaaatcatttccttttgtatatttgtgaggtcatgtcttccaaccttctgagaatatttgtaacatactgggaagctgtttcatgccaagttatatatcagaaaaatcaaagtgaaaataaacacagaatctactccacttctgaattagcttgaagcagattcatgacatcatataatttcatctgtaatagttttctccagatgaaaaagttaaaaattatgacattattatacaaataaagtaacaatagtttttgatatcttaaaatttcactgattatctcataaaattggattacttaaatcagaatctgaccaaggttcacttattgtatgaggtggttatatctcttaaatctcttttcatttgaatgttatcccaccccttttttcttcttctgatttatttgttgaagaaatttgtcttataaagtttcctggattctaaatttttatctgccatgttaagaatgctaccagattctcttcccttttttaccacataaatgtgtgttgaggacttgaatactatgaggaatactttgatatttttagaaaaaaagttgtcctgattagagggaactctaagagttataatgaataataacaaatgtggaggaagacctgttgggaaaacaaatggtaaactgcaaactgatgttcaaagttgactttgatttatgattatttttcaaaaattttgctattcataaatcgaggcacttagaagtattggaacttcttttgaaattaactacaaatacatcagtaacttgaaacttcttaaaatcatggagagttggggtactgaaatttatgacaaagtatgcaatttaaattagtgataatgcatcgttttaattgatagcaatgaatgttaagtctgcataaaattgtactgttgcagattctttgtattgttacattcacacctgaaaagtaaatacaggtagaatttgtgtacataaaagtatatattttttaagctccgaaatagtaatcttttggctcgacgccgaggaattccagaatgcattctgttggtcactcagcgtattacaaaataccctgtcttggtggaaaggatattgcagtacacaaagggtaagttgtgacttctgggataaaaatttgcccctcttattagttttaaacacagttgaggtgttctaaacag

SEQ ID NO: 33893 - DNA, 2300 bp, Homo sapien
attccagaatgcattctgttggtcactcagcgtattacaaaataccctgtcttggtggaaaggatattgcagtacacaaagggtaagttgtgacttctgggataaaaatttgcccctcttattagttttaaacacagttgaggtgttctaaacagccatcagtgtttgtggtctctgattcataaagagtttcacgacggagaaactgttaaagccttagaatttggattagtttttagaaattatcttttataatgcagcatgggtaaatagtctgaatttctacaggtagcccaaaccaagctggcttcttcttactttgaacctgcctttcttctctttattttccccaccactgggctttcttaatacctcctcttcctcattttcctattaccttcacaacagtctgatgaaacatgctattgatcctatcacaaaatgtcaactctcccaagcaatctgttattaagttgagagggattataagaaggatctatttttgaccctgtcaattcatcaagttccagggagtaacatatgggcatcttttaagaagctatgaatgcacatggctggtctgtaagctccttgtgggatctataagacctgtgtctgtctggtttacagctgaatcttcaatgtctagtgcaatggctggtacagaatagatgatcaataaataaaaacatatcaatgcaatgaatgaataaataaaatggtctaatcctcaagctaacatattgatcttgagtaaagattattattagggtggtagtgtgttatgttaaaaagggcttgggtttggaattttgtacacttgtgttgcattgtatatactcagctctgccactcattcattgggcaaattattaactgagcctcagttatctccactacgaaatgacatgaaacattacctttcagttccagttgccttaataaacatcaactaggtggtctttatcaccaaatatcaatgctgctccagaaactccttcagagtattttcataagataatctagagacaagagcaggtagccagtattttaaagaataacaactgaaatcaataattatttgctcttggtatgagcatggctgatttgtccgttagcacagcacttgggtaccatgaaaatattttcttttcccatcagaagaagaaaattcattttttcttctgatggtaaaagaaattaaaatatttaattttaaataaaatggtcaaagaaaattgtttaattataatagtaatatattcatatttatgctaatgcagttataaaatataattttgaatgttaattttatggaggaagggatcaaggaatataaatgaatctgaggctcattcacataaccctgtggctctgtttctgaaagcattgctggctttgccccacagctggcttaagttttaagaaacttggcatggagattattgattacctatgtctaagaaggtggaaggaaggcctaagttagtatataacacatttcctgccctagggagaaggtcagacccatccctagaactcagacatcttactgtcagcggaaggactatgtgtcagctgaagcacatttaatcatgcaaacctttcataataaaatattttaacatttttttggtgggggggtggtacagagtggtattataggatttaattttttttttttttttcttcgagacagagtctcactctgtctcgtaggctggagtggagtggtacagtcttggttccctgcaacctctacctcccaggctcaaactctcctcccacctaagcctcttgagtagctgggacaaaaggcacatgccactatgcctggctaatttttgtatcttttttggtagaaacagggttttgccatgttgcccaggctaggaatttaagtttaatccaacatttttcttatgggatttttattgtttagatgatacatttaactatattttaaaactaaagaagaagttttcttccttagtactctggtttattgtatagtatttttgtttgtttgtttctttttcccacgcagaaagaactgaggaacataaagacttacgcaaagcgctttgcttaattaaagacatgattgcaacagtggatttaaaagtcaatgaatatgagaaaaaccaaaaatggcttgagatcctaaataagattgaaaacaaaacatacacgaagctcaaaaatggacatgtgtttaggaagcaggcactgatgagtgaagaaaggactctgttatatgatggccttgtttactggaaaactgctacaggtcgtttcaa

SEQ ID NO: 33894 - DNA, 2300 bp, Homo sapien
acgatctcaactcactgcaacctctgtctcccaggctgaagccattctgccacctcagcctcccaaggagctgagactataggcgtgtgccaccaagcctggctagtttttctatttcaccatgttgcccaggctgcagtctaactcctgggctcaaagtgatctacctgccttggcctcccaaagttctgggattacaggcatgagtcactgcacccagccccacaagagctcttaaacaagtttcttatctcttgccaacatcattaagttaaaatttcattatatttttgaaataaattggagagaatcaacacctttaccataatcacttacttgtcttataaaagaacatcggtcagtcatctcttattctatgatttgctggagagctttgtaattgtcttcatatggtatgatatgcgtgtatatgtatttttttcactaagtttattcatatgtctctttgctgctattgtgaataattttttttttcattttgtgtccccagtggttgttgctaatataaataaaggtattgattttggggtacttatattgtaactggtaaactcattgaactttatttttcattttaatagtttttccattgatattttgaagtattccaggtagaaaataaaaattagaaaataatgatattatggctatttgtcaataattacatgaatttcattttcttggcttactgcttaggctaggacttttgaaaatgtgttaaatcacagtggtaatagcaagctctttgtcttgttcaagatttagtgagaatgcttttagtgtcttaggttagatgtgaggttctggagttgatgttcttagcaatcaatgtatcatgtaagacaactaatctttcttttaaatgtcagctgggaagggatacagtttgagcaccagccattaacttgggggatgaaaacattgagcatcctggctagtgttgccggatgaaaacactcacaaggtcatgtgtcttcttttcaaccctgaatgcagccctgtgtagattcaaggttcggaaaagctggatcacctgaatgacctaatttttgcaacacattaggttaaaccaacatgggaaatatcaaagtctacagtgaattattttaatctgagctggtccaaggccatgggctttgaaagatttctgttcatggcacagtcgtcttttttgaagctgaatgtcttatatgtgactgaagtttttacataaacaattttgaatcaggtggaatgaaatttgatccctatatcaggaaaatagagttagaaatgaggcatagacagggctaaaaggaaaagacacagatattctagcaaagtaaagttaagagagtgaattgggaatttccctaaacttgaaaagcaagtgctgttctctgtcctaaatataaatgtaaactttaagtgtgaagattattcatttagctttaaatgaatatttaaatttagatgaatatccgatcttcagattccagctctatgcaagggaaaagaatggccttatcccaaatgttagatagacatgaagaatacctcacagaagcacttaattactgtagctgtaactcttacgtgagagttattgtctgtggtagttttgacatataaagtatgggatttttgtttgtcttaccatactggtccctaaagatttattagaattaagtggtgatgtatagtctacaattttctttagccagatcaacagagtcctgagtggcttattgtgtgctaattatttcatatttaaagatcatagtaattaatacctattctggatgataatcattgttttatttataacaactcccaaaagccactaaatattcatgtgtctgaaattttaaagattagtttccaaatttaaaaatatgaatttttgttcaaaaggccccagtgaatacatttttgagtcgtattccaagacaagtatgaatttaaaatataccttagttctttaactttcaaaagtataggaaactgctgagctgacaaagaacatatggtcaaatccccatcttcccaacatctgttatatggacagtttaaaaaattcttaggaaggaaaaatgtgaatttatccctaggagagaaatgatttctcatatggggtcaaaacatacacacatactcagtatgtgtccattttcaatttgtcccttctgtactgctttgcactctaaatgggaacttttaaaattaaaagcttccaagggcattcacagagatctctttggttttgtggaatccttccaaatcttggtaattatttcctg

SEQ ID NO: 33895 - DNA, 2300 bp, Homo sapien
ttttccttcccctccaattctttcctatgccactcccattgaagtgtttctaaaacagcccttatcccgtatctttagcttgtccaataagatataagaattcctcttgaatcattgcaccgggtctaacctcaataccctttacgagcagaccctgttcctgttgcttccttccacgaactttcatcctagctggaacagattcttcaccagtctcacctctgtgcctcatgctaaatctccccatcttgaaatacagtagatccctggtttcatgtattcgaaagccacctgtaaggcctatggcctgttcttacctgtcatgaatctaagccctgcaccctggagtggaggcatgagtgagtcactctgctaggagggaaactgccaccctctgcatctcaacattgccttgtggttctctgcttgtcatttcggaggcaaaaactctctttgtgtttctgttgtggaagaaattatcatgatattggtgtaattagaagctcacaaatatcagggacctatcagactttcttattcttttccacaatttaagcttttcctccttctagaagcctttcccagtgactctgacacttggtgttttctctcctttctcttttccaatggcaagaaaggaacctctgacccgcaaacaggtagcataagcttctatatgttatctatctgatatagtttctaaattaatttagttgaataaacctcaccacttcaaccacagtgtagacttttttgaagattagaaaccaggtccttacatctcttgccttcacatcaccaagcacaaagctggacacattgcaggtgctcaataaatatcataaattgttgatctagaaacagcacactaaggtctcaaaagagtacatgagagccatggagaaacaatgcggtatagtgatcctcctagagagacacgtgtctccgaggagacatggcccctttcaaacagccacctcagttctcttttactgccctatcctttcgccgggtttctcctttcaaccttgagagataactgacatgggcttaggatactcagtcattctggaattctgtatcagcactgaaacatgagtggggaaattctaagaaatttacttctctttttcttttcatattttcctcattccaaagtggaactaaatcgaggttccctagcaacccagggctctgtgaagattcattattctataaaatcccaccaccttacaaacacaaaatgttacaagttgcccagtcaccccggcttctgagatgaagaatattattgaagtcaaatctggtggctatcacactccatggaacttggggcaacatttaggtacctctacccaggaaagaatctctgagaaataggtggcagtttctctagcagcataagaagaaccttgataagcatcatccttaagtcctgacagcagtggatgactagtcaggaacctgtccaggtaagcgcacaccctagcagggctctgctaaatggctccaatggctcggaggccttactgaacactagggattgatttctattgaaaaccaaaaggaaaatgagaaacaatcgaaatcagggctccttccaaccctggctcaatagccctttgttttgcatattctctatgcaagatggtgaaatgtagagatacaattagaatatcaaggctaatgaaactaatcatttcaaattaagcccatatacaactgtggcaccacaaaactgccttctcatctctgctatcctgggggaacatcccagatgcacaggaaaaattagctgtcttttctggaaattaaaatggtaaaatgcctgatgcacagaacatacttcacaaatcttaagtgagccaaacgaggcttttatcccctgacagcaatctttcatgagctggacaactgtccccagtgtgaggcagtgaagtctggctagcactctgcacacaggaatatcaaggccccttttccctttcatgctttgcctcctcaaccatactctcccctttgtaatatctctgtcactaaggaaaccatggtaacatcagtgcttctgttgagcacagtggtcactcaaaagaggcagagtgagttcagcctatcatttgagatccgagtatgattggggaaatatcctgaaatagtctatgatttgaagaaatggatagatggctagaataacatgctagatggtagtcaagttactaactgcagaattgatttgataaaattctcatcgtgtctcctgacttaggagaaatattgggtctgatgaatgggtaaaattc

SEQ ID NO: 33896 - DNA, 2300 bp, Homo sapien
cagtagggtagagacataggaaatgcttgtcacccatcttcaaaaactgaatcacatgccttcatccttttcttttacaccatccctctgttacttcaaaggaatgaagtcctcaagaacctgcctgtccaaggattcctaaggaagctgtttatcccgctgtttatccccagagggtaaactgtgtggctggttgcagtatctgttccagacacataacagccagtcccaaaagcgcagctgaaactctgtttcctttaaccattcagacatttttaaatgcatattctaagaattattaataaatgcaaatgaatgatttgccacagattcatgggctaaaatactaacctgcacctccccaaccagatgtgagccccactataagactgcacagaaaaccacaaaggcaggggcatgacacatatacctcataccattaggtgatgcaactagttttctttcctttttggaatataattttttatgatgagtaaacatggctgagtggaagaaaggaagcaacaaagtcctagagctccagtgttaggaagactttacaaagcacccagtaatttccacagtgacttgagatataaaaaatggtgaggagccagcttcactcccacctcaagctaagcatctactgtctactccattctaaccaatgcccagtgttttggagaatgaccatatgaacctatgggaatgcatcaggtttccaaagggttaaaacattcattagcattctcaatgctccaccactgtagttgctattttaattagtacattcaatctggagtatctggaggaagactttaaacctaaacctcaatagactgtctacttactcttgtgaatctgccgcctctctcagagcaaatgctgccctgagtgaaggaagaatgaggctccctgaaactaggtgcacaggcaccaaaatgcttacacattgagctggaatcatgctaggcccagaacacatttccttgaacattaaattcaggatggtgcaaaacaacattcacaaccagacttacacctaagaaaacaatttgcttagaagaccttaggatataggatctacatctctccgcatcctgtgtttatgctcctgtatgttccaggttggcccaacaagccagaaggaagagcctagcctgtcatcttggataccacccagatggaaaagcacgtcacagtcaaaatcacaatcaacattcttgcaacaatgtttgattaaaataaaaagtaaacttggaaacccaagaggaaatacttgctttctggtttaaaactgtgcaaacctcaaaatatcagcagaaaccatgtatacaagtcactgaacacaccttcaacataaaatgaatcatctttcgagcatttttaagcccccagagaaatcacatttgcataccaagtaagtggccaagaaaatgcacacatgtacttaacctacgtctgcaaagaagacagagaaagggctgctattactgtgaacatcaaaagggcttcagttacagtaacttcagttcacttcatgctcctaactcaggctctctgcctccaatgcttagcgtcccgcacccttctccaggttttgaacctgatctcaatccaatcaaaagagaaactaagcagatttttttctgggcatttacattaccggtaacaatagaacattataaagatcttgttaacaaaagtagcttcttgccagagtctttttattaacacttgcaacgctatttaacaagctggccatgcctgtgtgacaccaaaccgcatgtggataaattcagtgtttcatctccaggcccaccaattcctatcctttgtaactaataatgttaacacgacagatcaagaaactagtttttcagaaagcagttttcattcattctctatagacatttccgccgcagtgaacatgcccgcactcagggtgtctgtgcatggccccaactttcctccaagccggggaggatgcaacgtgggccaaccatcccgcgcgctcggccctggaggctgcggggagcgacgcagcgcgacattcacccccaggaaagcgctgctttccgcagaggagagaggctgactgtatccttagctcggctcctcgcttccccagcggctcgccccagacattgcaccgcggaggggaggccggtcgacctctccggcgatgcccggcttctgcctgctgtgggagggcagcggcgggcaccgtgatctccgcaccgagaagagctccccttgccctctagtcgaagctcccgagtgctcggagcacgctcacc

SEQ ID NO: 33897 - DNA, 2300 bp, Homo sapien
gcaaagggatctgaactttgctgttcccttggttaaggacatcccgcaatttctaggtggtaaagatacatacctgtccctagttctgtcgcttcctgtggcaaaatccccaaccaaccagctgagctatgtacatagtccatttctaggcaaggtcatctaggtgccgttttaggtagatttgactcacaaaggaagcagacagagtgggtctaggaggtgtctaaaaggtgcgttggtggctgccttgatgagctcccccacaccttgccacaggctacagaaacatgttttaaaaagacatatgtgcaatagttacacatttccgcctcccatcttttcagcacctatctctggagtctacagagtttccatctgtctggtctttgcttcagaacctgggtgctgcttgccagccctctcctaacctcgcagcccccctggctctccatacgtggttcttgacatgaattgatccgggctgtctctgtgaatcagcctcaagccgagactctgcattaaaaaatatatatattgaaaggttcgtggtgaggctgccgagttaatgctaacaaaggacttcagagggcactgtctttctttgtttgcaaggagcgaaatttctcggcgcaaataccaggaaggaacaaggataaaggaaaatgaaattagaatgaagaactgacagtcttggtttcagcagtctggactctggaagcgccatgtggggcctccttagccagtttaaatcgctcctgcgcctagtgttttaaagcaagctgggaggcgaagcgcgggcgcttggggacgcggggacccggggacggaataaactctgtcgtggggccctcactctcgagctgcagagctgggacattgttgctaagtgactacgagccaggcaattcacatctccctgggcctcggttccccacctgtaaaacaagggggctggaccggtcatctatcccgttcatttatagacttagctccaaataccgaataaaagacagatattttaactcccagtggaaagacaagcctctagttgcaaagataaatgggattcgtaaaagtgatcaccacgcgagattatttttcgaatcgccttcccttctcctgacacgcgggactattaaacgtgtgtgtgtgctgggccatttctttactgaactccaaactaacaccaccgagcgataaaaaacaggagaaggtgatggaggcttaatcgctaggagaggaggcggcgtggctgctgctttgaggagttcactttgaatcaagcggccgcggcgattggctgaaaagcacgtggtgcgcgccccgcaggactgcgccccggctgcccctgcagtcgcctggcttagggcagagtccagccgggggtgccgcacccactggggagtggggagggaggacacataggaaatgcctggggctggagtctctttggctctctgccagcaagaaacttaaacgtcctggcttgctcaacccgagtgtccctaaactgtccagacttttgcccgtccattgccactatctctccccactctgggtgtcctacccaaggcgctgtctatgcgtgcccagggcctgtcctgcggatacccagctcgccccttgcagccctttttagagcatctcgcgggctctggcatcaccaagcgcacagccccgggctgcgctcccctaaggtgggtccctcagatccggggctgtccattaaccaggctggcccaaagaggcgcagacactcgaacccgggaaaacttattttattctcggttcccggggttgcagctgccagcggctgagacagtgcgtccgctttgtctctctgcactccccgcagcccccctctcccgcttcctctcccgattaactcccccgacacgctcttctctagctcctctcctcctcccactccttctcctcctcttcctcctcctacaccacaggccgcgctaatgcgcttcctccctcccccggtgtcggtctctttgcatacgcgccccctcccctccccgccgcgccacttatagcggggcgcacggcggcggggcgcagactgctctggcagccggagaggaggcggtgcggcggtggcgctgcggagacccggtccagacgcctggcggccgccggcacacaaggcgctttctagctccctcccccgagcgcacagcccgcctccttccgcggcgcctgcagtggcaggcttgctctgccctaccgtgacgcgctccggagacgctctgcgggtcctggacaccgggtccgcggcgtggggacgacag

SEQ ID NO: 33898 - DNA, 2300 bp, Homo sapien
cctgctcccaagggcctacaggactggcctaatgtcttgtgtgaagtgttggctattgtgtaatgcggatacagtgtaagcagcatttcctgacttgtttgtgactcagatatctgctatgtctatggtcgtccagttttgatgacagccctgtttagaagtttcttcctgtacaaaatgaagacttgctcagcttttctttgtgtgagtggggtgataagagttacctttaggattggctgagagatgctgtgggattacaccgtttgaattgctatgatcataaatttgctaacttgcaaatcattttcagctgagataagcattaaaaactgcccaactgcccgaaaactagtcatagattggctcaagcaaaccagagtacagtttgtaggaggtcatcagtagcacccatgatttccaaacttgcaagtttagttcttgtgactttcagcaggaaaatgttttccagtttttaggacttacataagctaatttcttttctcttgtattgcttatctccccgaggcagatgaagcgaatgtatacggtcactgaatgcatttcaagattttccagtctacagctttttttccctttcttctattgaagcatagaaagtggcaacattaggtagaaaagatacaggaaagtggcaccagcggatggtgacacaatggccagcggatttctttcctttctcagccctgcctgcttagcaaagttctttgcaaagggatctgaactttgctgttcccttggttaaggacatcccgcaatttctaggtggtaaagatacatacctgtccctagttctgtcgcttcctgtggcaaaatccccaaccaaccagctgagctatgtacatagtccatttctaggcaaggtcatctaggtgccgttttaggtagatttgactcacaaaggaagcagacagagtgggtctaggaggtgtctaaaaggtgcgttggtggctgccttgatgagctcccccacaccttgccacaggctacagaaacatgttttaaaaagacatatgtgcaatagttacacatttccgcctcccatcttttcagcacctatctctggagtctacagagtttccatctgtctggtctttgcttcagaacctgggtgctgcttgccagccctctcctaacctcgcagcccccctggctctccatacgtggttcttgacatgaattgatccgggctgtctctgtgaatcagcctcaagccgagactctgcattaaaaaatatatatattgaaaggttcgtggtgaggctgccgagttaatgctaacaaaggacttcagagggcactgtctttctttgtttgcaaggagcgaaatttctcggcgcaaataccaggaaggaacaaggataaaggaaaatgaaattagaatgaagaactgacagtcttggtttcagcagtctggactctggaagcgccatgtggggcctccttagccagtttaaatcgctcctgcgcctagtgttttaaagcaagctgggaggcgaagcgcgggcgcttggggacgcggggacccggggacggaataaactctgtcgtggggccctcactctcgagctgcagagctgggacattgttgctaagtgactacgagccaggcaattcacatctccctgggcctcggttccccacctgtaaaacaagggggctggaccggtcatctatcccgttcatttatagacttagctccaaataccgaataaaagacagatattttaactcccagtggaaagacaagcctctagttgcaaagataaatgggattcgtaaaagtgatcaccacgcgagattatttttcgaatcgccttcccttctcctgacacgcgggactattaaacgtgtgtgtgtgctgggccatttctttactgaactccaaactaacaccaccgagcgataaaaaacaggagaaggtgatggaggcttaatcgctaggagaggaggcggcgtggctgctgctttgaggagttcactttgaatcaagcggccgcggcgattggctgaaaagcacgtggtgcgcgccccgcaggactgcgccccggctgcccctgcagtcgcctggcttagggcagagtccagccgggggtgccgcacccactggggagtggggagggaggacacataggaaatgcctggggctggagtctctttggctctctgccagcaagaaacttaaacgtcctggcttgctcaacccgagtgtccctaaactgtccagacttttgcccgtccattgccactatctctccccactctgggtgtcctaccca

SEQ ID NO: 33899 - DNA, 2300 bp, Homo sapien
atcaacctaatggtaatagagaggagaaacctggcaagatgtgtctgttcaaattcttcttggcctctctgtgtggtattccttcctccaggatacggtgcagggccactctggaacaaaagtcttgagagccactatcagacaaggtaggtcagagaacctctttatggctggctcctacagaaagacacggcaagattagagtaatatttctagattttatgactggctttgggggcataggggctctagtttcttctttttttttttttctttctgagacagagtcttactctgtggcacaggctggagtgcagtggtgcaatctcggctcactgcaacctctgcctcccaggttcaagtgattcttgtgcctcagccacccaagtagctgggattacgggcgtgtgccagcacatccagctaatttttgtatttttagtagagatgaggtttcaccatgttggccaggctggtctcgaactcctggccttaagtgatccacctgccttggcctcccaaagtgctgggattacaggcgtgagccaccatgcccaacagtggctctagtttctgtgacccattttgaaaaagaggaattctagtttctatggcttgctctggggaagaaaggggagcaggagaaagaaaggcaggagaaggtcagaaagatcttctgactctcttttcttcagttccaagtattcaacatgccaaagtgccacactttggggtctcattttctgaggcccaataatcattacatttcttttctttcttttttttttttttttaagatggagtcttgttcttgttgcccaggctggagtgcagaggtgtgatctcagctcactaaaacttccaccttccggtttcaagcgattctcctgcctcaggctcctgagtagctgggattacaggcgcccgccaccacgcccaactaatttttgtatttttaatagagacggggtttcactttggtggccaggctggtctcgaactcctgaacttgtgatccgccctccttcgccttccaaagtgctgggatttcaggcgtgagccgccgcacctggcctaatcattacatttctttgaagtctttccttaaagctcttccaccctcattttcagaatacttatatagcagatctgtggttttggtctgcctagcgttttctccttctggtaagagaacacctcttctccctttggcatctccagtccgtgttcgtcatgtgacttcactggctcttccttagggatgggttatgaaatcaaacttgtcagttgggatcctttatatcgggacccacacagatgagccaagatgttctctctcaggattccttgggcatgctctgccccagggagttctgataggaaggctttattgaccacagctgaagtgctgttacagaaaagcctagacttaggagcaaataaactcagctctcatctcggttatctggtggttgggctgagaggagaaaggtgctcctcaagcttggcttctccagcttcaccgaagccagggatccacaggagagcgcccgtgttgacagcgtgagcggcgacccggtgtcggcctggcgtcccgagcctgtgcactgggccgttttctttttcttttctttttttttttttttttttttgagacggagtcttgctctgttacccaggctggagtgcagtggtgcgatctcggctcactgcaacctccgcctcccgggttcaagagattctcctgcctcagcctcccgagtagctgggactacaggcacccgccatcatgctcggctaatttttgtatttttgtagagtcggggtttcaccaatttggccaggctggtcttgaactcctgacctcaggtgatccgcccgcctcggcctcccaaagtgctggggctacaggcgtgagccaccacgtacggccagcaccgggcatttttcttactttagccatcccgtgtttgaggttgctgtctgggctctgctcctacccgagggcacccctggaggaaattctcgaggtgacctggacagggcgggctgggcgaggacgctcccggggcctggaggcggagtcgggggcgggcgcgcgcagtcatctgactcggtgactcacccgcggccgcgcttcctctgatccgggccgggcgggaagtcgggtcccgaggctccggctcggcagaccgggcggaaagcagccgagcggccatggagctgtgcgggctggggctgccccggccgcccatgctgctggcgctgctgttggcgacactgctggcggcgatgttggc

SEQ ID NO: 33900 - DNA, 2300 bp, Homo sapien
tgtgactgtaatagacattttcctcttctttaactcagtggttgtcaataaaaagataatttgcacaacccagccctcccccgcccaagcctattcgttcccatttattcaacaagaatttactgtgtgtctgcctacccactgctttctagatatcagcgttaatgcagtgaacaaaagacaacaatctctgccctcatactgcctctaccgtagtcaggggatacagacaacaaacaaaagtaacgaatacaatacatagtctctcccatgatgatagggtgctgtagagaagaatgaagcaggaaggaggaattgggacagttagaactgtaagtaaagagatcaaggaaggcctcattcaaacagtgacatttaagcaaagacctgaagtagatgagggaggaaattcgggggattgagggacggcggggaggggcgcattaaaggcaaagagattatataacgtactgtacctaaaatatacaaatgctagttactatttctggttttaaagagaatgatgagatcaccttagaaaatggagccttaaaaaactgcttcaaaggcggggctcggtggctcacgcctgtaattccagcactttgggaggccgaggcaggtggatcacctgaagtcaggagttcgaaaccagcccgaccaacatggtgaaaccccatctctactaaaaatacaaaaatattagctgggtgtggtggcgagcgcctataattccagctacttgggaggctgaacctggagaatcgcttgaacccgggaggcagaggttgcagtgagacgagatggcgcatttgcactccagcctgtgcgacaagattgaaactccgtctcaaaacaaaacaaaaactgcctcaaagccgggcgctgtggctcaagcctgtaatcccaacactttgggaggccgaggcgggtggatcgctcgtacccgggagttcgagaccagcctgggcaacacggtgaaacctcatctctacaaaaactacaaaaatcagccaggcttcgtggcgcgagcctgtagctcgctacttttgaggctgaggtcggaggatcgcttgatcccgggaggtcgaggctgcggtgagccgagctcgtgcccctgcactccagcctgggcgactgggcgagatgccgtctcaaaatacccataaaaacaaaaacaaaaacaaaatactgcctcaaatacaagcactaagaattaatgaaagtattcttttggtacagttctttttgttcatcaactgaatcacgctgcaagctgtgaagtaattaagggaacttctgcaactgtgcagtaaaagggtaaacctgatagtgtatttaagtagacgtactttctggtagttaattacttcttgacactagggggccactaaatacaagtccactcagcatttgattcggtgcaccaaaatgcctcagaaatttctggaatcagtcctgtacctccaaaaaaccagaatgttatcttcttcttttctaacagctgcaaagccccagtagttccatttttctgtacactaagttttcattcctcagtatccttcacaatcatgcacacattacacagagtgaccggaacaaagatgagtcgacttcgccgaatgatagagaaaaacttccatactgagcgaacaccgaggggagtccggaggccctgttgtcctcttccgtggctggctgtgtccgtcgcagcctgaaaggtcagcggtacccagcgctgtgacagggtcacaggcgcgcgatgtctcacagctcggagcagtactcacctggcattaggccgcgtgccgcaggccagctctcaccgctgggctcttgaagcaggaggcgcgagccgcgccaaagtctgcaacggcctcaagtctcgacgccagcctaggcaaaaggcaatgtatctaaacgaaaagaaaataggctttctccgctctaccgcctcgggcagccacacctccacacttccggcggtgtaccggccaaatgccgcctgccagcaacttccgtcctcctagctaaaagcggaaaacagaggctcggaaccgctgcgtggttcttgctcttcactcggccgttttaaagggtgactctttcctgtcccggcctgcgtggtgtgggcttgtgggtctttgagacccgaaaattgagagcgttttcgcactccagcggctgctcctggcggctctgcggccgtcaccatggtaaggaggatgcctcggacgctcgcgacacacagcgtctgagttagtgggacctgaggactctggggcgctggggtagggggt

SEQ ID NO: 33901 - DNA, 2300 bp, Homo sapien
ctcgagattgtccctctctgtccagcagataggcaggtactgctccctgtggtgtcttttcatcattcttttgtttggtgtttctcttttcatgcatcttgatactaccaagaaggaaaaaagattcaagattatctgttttaataatgattactcaaaagatgttaacttgttatgacaaataaatgagaccacttacgtctttttcatttgtattttctcagcatgacgctgtttatggtaaagcttagccttcagaccaatcattttctttgccttctttgaacgttcatgagcctctcgactttccttctttctctttttctcatggtaatccaaacggtatccatagcgtttacggtgtaattcaatatattcattctgtggctataatgatggaagaaatattattttaattttttaaagtactgacaattattctaaaatgctttcttttacacagcacaaagaccctgtttcatccaaatgttcacttacttaaatgattcttgcaccattaagtttattcacatgatgtaagttaaattttggtcttgaatgatatgaggcatcagggcttacatctctaataatctcattagggaatggtccaaaatctactggaccacaaaagggatgaactgattacagtatcttttttccttgacataatttgcttttttaataacaccttcatttcacatttaaaaaatttaagtcagttttattgaagcataatttacacacagtaaaacctgtcctttttaggtatacagttctaagtttttcctaactacacagttctgtaaccaccacaatcaaaatacaaagaatttccatttccccctaaaattccctatgtaacttttaagtcaatcctctttcccaaccctcagtttgatacctatccctacagttttgcctttcccagaatgaaacagggatcaacagtagtacatagccttttgaatctggtttcttgcttttgggattcacccaatttgctgcaggtataggaacttcaatcctttttattgttgagtagtatgctattgtatggatacaccactgtttacccgctgaccagatgataggtatcagggttgttcccagttttgggtgattacgaataaatctgcaataaacaactgcatgcaagtcttcatgtggacgtgtgtttactgccagaccgttttccaaaagtgcattatttttcttttcaccagcaatgtatgggatgctttttgcattttagacacgttttaaacacgcggccaggcgtgagtctattcgtattttaaggctgcaaaaataaaaatgatacaaagccaagtccagcacagagagcaatgttaagtaacaaccaacaaggtgtgctgctaccaactgctatcacataaactttgcagcaatcacatgaagggtgtatggaatgccattttgcaaagaaacgcagattatagagacgtaacacaaagagaaaggacctggcagttagatctgggccgttaagcccggcttcgcaattcattagctgtctggtctttggcaaggacgccttcagtttcctcagcagtaaaatgaagggggcgggactgacatctaagactgtacaagggacaaccatattcccattaggctctggggctgataaccacgcttgtggtgaaatcaggaatttttaggactcttagcggtggatcaaaaagaaaaaagaaaacaggacagagtaaaatcttgctccaaagcttgtgttctggcaaataccgtctgtgtctcgaatgtgaagttgtttccactcctcagagcccaccccacgggtctaccatccttttctcttggcagttctcatttccgcctaccaccgctcaccccctaccccagcgccccagagtcctcaggtcccactaactcagacgctgtgtgtcgcgagcgtccgaggcatcctccttaccatggtgacggccgcagagccgccaggagcagccgctggagtgcgaaaacgctctcaattttcgggtctcaaagacccacaagcccacaccacgcaggccgggacaggaaagagtcaccctttaaaacggccgagtgaagagcaagaaccacgcagcggttccgagcctctgttttccgcttttagctaggaggacggaagttgctggcaggcggcatttggccggtacaccgccggaagtgtggaggtgtggctgcccgaggcggtagagcggagaaagcctattttcttttcgtttagatacattgccttttgcctaggctggcgtcgagacttgaggccgttg

SEQ ID NO: 33902 - DNA, 2300 bp, Homo sapien
agcataaattagattttagaatctaacctatttaagattttagaaattcatattcttcatattactttaatgttttaaatagttgaaggaaatgtttatcatattaaactatttatatctctttttgttagtagccacaaatagtttagtttatttcaactacatgatttattctttaggtgatgatggtattgttacctgctttttcctattatttatcttacactttttgcaccttttatttattcatctttatctacattttaaccttttcttgttggactacaagttggttgaagcaagatatttgtcatatgatttatcacaattgctcccttgcttttgttctataaattgaaggctgtgtgcccactatattgtggagttttagtaagcatgtaatggatgaataaagtagttactatggcaagcattggacatataaagatatggttcttagacatgggagaactagatggtccattgttggaaatatataatatactatagcataataattgctttattatagcaagtaattggaggtacataggagaggatgacttttaaagggtgggtgggaattttcttagggcattccagacgatagcatgtaaaaaagttacagaggtgtaaaggaaatggcatgtttgatatgaaagaggtatttggtattgaataggttgagaatttgtattctaagcagtggttggccattaaaagttttttcctctttttttttttatcaaaaaaatggtacaatttgtgattcgaaagtatcactttgtcatcagggtggaggggtgtagatgggatgtgattagaatgagggatatgagtgaggaggctgttggaatagttggttcaagagactaaagatataaactaaagcaatggtagtacaaaggacaggacagttttgagagattcttcagttaaaattgaaaggctttgtgattgattacatgtgagttaggaagaagtcattgctgactcactgttttctggctagaatgactgactgaatcgtcattaagcaagatagggaataatattggggaaagataaagttcattttgggaatgattgagtgtgaaattggatgggacatccactgggagatatttcattggaaataaagctttggaaatcaggaagaaagtttggaggcttaagtctcatatttgaattcatcaataagcagatactgaagtaagcatagtgaagggagagcatgtggactgagcagagaaggtggctgaggacagaactaggagacactagtggacacactatgacatattagatgacttgcatatgttctcagtcttttaaactgaagctgaactataacctttttatttttaaagtaaatgttgttaacaaaaagtgctatttggaaaacattttacaagtttttctttgaaactataagtgaaatagatccatagggagaaaaaatagtctaaaactttgggtttgaatctctctcttttttagattgattctctaaaagatgcctttgcaagcacttccgaaggtaagaaattcaactgatatatcagtaagtatttgagacacttcaaattagggctgtgtgtgtgtgtgtgcatgcatgtgtgtgtggtgtgtcaccctgagaaagtgaagacttaaccagctctaaaatctagatctgggttctcatgccaccactgccactgattttgctatgtgaacactgagtaagctattgtacctctctcttccttgtttccttagctataaaatagggatggtaatgtctacgttgtttattttccaagattattgggagggaatgcaagtgaaatacaaaaacactttgcaaagcccaagataacatggaacgtgaggaatgacttacacagttcatataacttgacaaagttacataatttagaaaaagatgtaaattataaaataattttcttagcctgacataagtgaggggagggtgaacctgtgtaatgtggaggatatgtgtaaactagtgtagttcttgcatttctgtgtattttaataggtagtccttttaatatataatcaattaagtgcagttttgctgtttttctcctcaggtcatgataaaacatctgtttccactcatactcgaagtggtaatctaaagcggccaaagattggaaagcggtttcaggattctgaatttagcagttctcaaggtgaagatgaaaagacctcccagacttcacttacagcttcaataaacaagtaaataattgttgattttactctcattttttatttgtacttttattttt

SEQ ID NO: 33903 - DNA, 2300 bp, Homo sapien
gacagagtgagattctgtctctaacaacaaacaaaaacaaagcaaaaaactaatgcaagtaggcattttttcaaaaaaagaagtggtttgtttttcctgttttatgaattttctattcatgacctttgcttatttatttgcatcttagcttttaaaaaaaacactgcattattcatctgtattaaggtattagattgtataagtcatactggttataatttgcctctgagttttttctttttagatgcaaaagttttgattgatttctagttattagttgcagcagtttattcctttctcaaccagaaggaattttcctctatgtgttctgtatgttcaggtaatttgcccatggttacatagctagtaatcctgttagtttggctcaagaatacactcccttaaccagtattttataccagctttcacacactctcaaaatcctttgcaatatagctggattttgcttttgaaggcctaaaacataccaaatacgcagtatcttcatgcttaaatgatttcttatctaggagtattttcctgtacatgaagagagaattaaaccttgagttggaaagaatacttggaacacttcccctgacatatattaagcaatctttaaccgtattagggctgcctgagatgctgtgctttcagacataccaatgtgatggaaaaaaacagacatcggagtccgactgccgggttcaaatactagctctgctgcttactagtagtgtggccttgaacaagttactcagccactttgtgtctttgtttccttttcggccaagtgaagagaattaaaacacccacctcatgggttttagataaaagttacatcaggtgatacacgtgaagtgttcggaatagaacctggcacatagtccactatcggattagtggttataacttcaaaagatggttttgcttcctgcttgaaataaggagagccaacagatatgaatcccattcaacttcctgctctattacctaatttataggccgtcctaacccatacataattaaatgtttttactttcccagaaaacagaaaaggattgctgaacagtgttgaggcccatctgagattttgatagttgtagcagttattttgtcatattcaaaaactcggctctcatagtagaaaaagatgagtggttagaggaatctagcgtttaggaccttgtgtagggcaggagtgatggaagaaaaagtaaggtaaagggattagttgagctgatgtagtacagggcccaggttaattagggaaggaaatgatgttagaaaacagaaaagggagggatcaagagaggaatcataataaggttcagaaataaggttgagagcattgctgattatgttgcctggatacctaacctattctcggtgttggagagaccattgtgagagttaggatcatgaattggattggttgagataattatttttttccctgagaattctttcagctctatagtgtacatacttctttttgggtctgcctctctccacaaagcccccaaataatagcagtaacctgtaagaatcatgaaataacttacgagctgaacatgtagaatatgttcccatcttttcagaatatagttggcatccagtaatcaacaataaatagggaaaaaatcacaataatataaatttgttttctaactcttttcatgcttttcttaaggttatccattctgtcaaatacataatttttttgggaaaaaggaattattaaaaggtagatacaatatagcagatgctcatgatcttagatctcttatataagaggtcttggtattatgtttttatacagcttaccctggattaatgagcataccattcgcttaatttgtaaattagtttggacactttttacacttcgctgtccattctgtgtcagttttttgatgagttcacttaaggctacattaagctttctcattcatgtagaatctagttaggccttttggtttatctcatggacagagcataaagtacttgacagaatttgatctgacagctttacagttacataacatagaacagaagcttaaaaacaacaaaaaagagagagaagcaagggatttatcatagcaacctatatttctctctggaactttaccacccttccgctgcctctctaaactatagtagcagaaccactgttaggcttgcaatttacatagtcttaaattaaccaagactcaaaaacaaacaaaaaaaacaattccaagcatttagaggtgaaaaggtctttaggattatcctgtccagttgcatcacgttaccaa

SEQ ID NO: 33904 - DNA, 2300 bp, Homo sapien
cctggcgcagtggctcacgcctgtaatcccagcactttgggaggccgaggcgggcggatcgcttgagctcagaagttcaggaccagcctgggcagcatggcgaaactccgtctctacaaaaattagcgaggtgcgttggtgtgcacctctgtcccagctcttccggaggctgacgccggagaatcgcttgagcttgggaggcagaggttgcagtgagtcgagatcgcgccattgcattccagcctgcctaggctgtgggagtgaaaccctgtctcaaaaaaaaaaaaaaaaaaaaaaaaaaaaattggaccttttcttttataggtctgggtgaatgtagttctgtctcctaccagaatagccagacatctgggagccaggcctccctgacccaggcacaaatacccgcatacttctaaaacaatagctaagagtcaatcacacccaggcatttcaaatattatcaacaagttgtattggttagctttacactaaggcctgaggcttcaacatctgtagggcatagtctggtagccaaagcttccccaaatggcaattgtttgggattaccctggggactcctacttacacatagctctagaaatgtaaatacaagtcatataatttcattcatcactggctatgggtagaacccaactacccaaaattcctgctctattaaatctaattcattaagtttcattaaaatggtaaatgatgtgtaatagtaaagattttggctaattaaatattatacaaatgaaacaatagattcttatatggcagaaaagctttttttaaaaatcagggtcaaatatatctatatcaacaagcattctttgaagtattttttgatcttgctaattttgctaatcattagtaaattcgtgaaagttggtattgtgattgctaaatatttcccaggaatgaaagaagcaattttcaacttttctggatgagctgaacataatactacggttcttggatgatgagtaaaagaaagtcttgacattaatacttagatacaatattgtttctcaatacagttattaaatatatttagactacaatacgcattaccttaaagacaatttatcatgttttaaatgctggagggctaattttcagtaggagtgtgtaattagcaaaggcgccagaggccataagacggtagaatagagctgggagaggcacgggaggaaagccggatggaaccctgttgtctttctgggtcagggttattctgtaccggttaaacggtgaaagagaaaaggtcagcgcaggaatgtggtatttccctgacatctccagatgaaagtccgggctctaggacttctgtagactgtgaaagcagcccacgattctaacttgcatgcacctaagtggcagtaggtttaggatgaaagtggtggggcggaggccggcggtcctcgcccgtgccctctgcacccctgtcccgaggccgggatggccgcgcccactctgggtaaatttcaggagggcctacgcggggctggagaactccaccgggctatgcgaacagaatcctgcgaaggtcggcattaaaggaatacgcaaaatcagcgttgcagcccccgcggcttaaccgcatctatttttatatctaagccaaggtcactctttaataccaggccattgccctgagctgggcgtcgcgctgccgggtgacggcggccggggcggagagagggggcgcgggtggcgaggcgggggccgcgtgacgcccccgggctggccaagcccgcacctgccgggccggcgcctgaaagccggggctggagggaggcagggcggcgtcccaggctccgaggaggggccgctccgcgctggcgggcggggggattcgcggtgggcgcgggcgcggagcggaagcgaaggctggaggcgctgcggcgctagtgcgtcacgtcgtcggagggcacggtgggccgcggccgacccgcgacgaggagccgggcgtccggggcgagcgggaggcagccgcactcgccctggcagccgcgagctgtgcggcctgggaccggccggaggtcgccagcgagcagccgccggctccattcattcgcgcggctccgcctcctttcccgggctcttccagcggctcccggggcgcgtctgaggtgagtgcgctccctctccccggcgcggaccgctgggtgaggccgagacggccgcgccgggccccgcgcccccgccagcaccagacccgcggacaccgagcggcgacgcgggccaccggctgtgggcggcccctgcgggctgggcctggcgcagaccag

SEQ ID NO: 33905 - DNA, 2300 bp, Homo sapien
aacagtgtatacctgcaaggatggtaagaggattaagtgaattaatttccataaagaagtctgtagagtgcctggcaatttgttagctgtcaaaaacatcagttatgattttagctattaagaattcctcttccccagtgcaactaaagagctcttttctgggtcatgtgtattagtaacctccaaaatccagggttgtggcaagcttcttttacttaagatggttccactcctctttaaacatagaggaaaaatacaatcagaacgaactcttaacatgtttcctttgctaataacaaagtaataattaaagcaagcattgcaaaaacaaaaaccaaagcaataatccttttactctaaaaacggttcagaaaaaagcctcaaagcatatttcaaaatattgtggtaacaattttcagcatatactaatctgacaaaggctcatgtttttagttgttgttctttgcccactaagataagcaaaatttatctcagccaaagagggaagtcaatggtgatttaaaaagaaaaaaccaaaaactctcaaaaatagtgtcatttgcaagtagggaaaagagaatcaggcctggcgcagtggctcacgcctgtaatcccagcactttgggaggccgaggcgggcggatcgcttgagctcagaagttcaggaccagcctgggcagcatggcgaaactccgtctctacaaaaattagcgaggtgcgttggtgtgcacctctgtcccagctcttccggaggctgacgccggagaatcgcttgagcttgggaggcagaggttgcagtgagtcgagatcgcgccattgcattccagcctgcctaggctgtgggagtgaaaccctgtctcaaaaaaaaaaaaaaaaaaaaaaaaaaaaattggaccttttcttttataggtctgggtgaatgtagttctgtctcctaccagaatagccagacatctgggagccaggcctccctgacccaggcacaaatacccgcatacttctaaaacaatagctaagagtcaatcacacccaggcatttcaaatattatcaacaagttgtattggttagctttacactaaggcctgaggcttcaacatctgtagggcatagtctggtagccaaagcttccccaaatggcaattgtttgggattaccctggggactcctacttacacatagctctagaaatgtaaatacaagtcatataatttcattcatcactggctatgggtagaacccaactacccaaaattcctgctctattaaatctaattcattaagtttcattaaaatggtaaatgatgtgtaatagtaaagattttggctaattaaatattatacaaatgaaacaatagattcttatatggcagaaaagctttttttaaaaatcagggtcaaatatatctatatcaacaagcattctttgaagtattttttgatcttgctaattttgctaatcattagtaaattcgtgaaagttggtattgtgattgctaaatatttcccaggaatgaaagaagcaattttcaacttttctggatgagctgaacataatactacggttcttggatgatgagtaaaagaaagtcttgacattaatacttagatacaatattgtttctcaatacagttattaaatatatttagactacaatacgcattaccttaaagacaatttatcatgttttaaatgctggagggctaattttcagtaggagtgtgtaattagcaaaggcgccagaggccataagacggtagaatagagctgggagaggcacgggaggaaagccggatggaaccctgttgtctttctgggtcagggttattctgtaccggttaaacggtgaaagagaaaaggtcagcgcaggaatgtggtatttccctgacatctccagatgaaagtccgggctctaggacttctgtagactgtgaaagcagcccacgattctaacttgcatgcacctaagtggcagtaggtttaggatgaaagtggtggggcggaggccggcggtcctcgcccgtgccctctgcacccctgtcccgaggccgggatggccgcgcccactctgggtaaatttcaggagggcctacgcggggctggagaactccaccgggctatgcgaacagaatcctgcgaaggtcggcattaaaggaatacgcaaaatcagcgttgcagcccccgcggcttaaccgcatctatttttatatctaagccaaggtcactctttaataccaggccattgccctgagctgggcgtcgcgctgccgggtgacggcggccggggcggagagagggggc

SEQ ID NO: 33906 - DNA, 2300 bp, Homo sapien
tagactacatacataacattggagaaagtgttggaattatggccggaggacagaatttagagtcctggctctgtcccgtcctaactacaactttacacaaggcgcatcatttctctggatgtcaggtaccttctttgtattacaggggtattaaactaggggacactgagggtccctcccagctccactggtccataatacagtcaatttgaacactgtcaactgagactaccattattttcttttcttttttttttctttttctttttttttttttttttttttgagacacagtttcgctctgtcacccaggctggagtgtagtggcgcgatctcggctcactgcaagctccgcctcccgggttcacgccattctcctgcctcagactccggagtagctgggactacaggcgcccgcgaccacgcccggctaattttttgtgtttttagtagagacggggtttcaccgtgttagccaggatggtctcgatcttctgacctcgtgatccacccgcctcggcctcccaaagtgctgggattacaggcgtgagccaccgtgcccggcgagactaccattattttctaagaaagcgctctcacctctaaaataacaaaataacaagaagcagagtgccataagacttctcaacacaactggatagtggaagatagtggagtactgcccttaaaattacccagccaaaccatgaatcaagtatgtgggtggaccaaaccaaggaaaagaattcactggatccagaaaaaggagccccaacagaaaagaaacagtgtggtagtacagaagatctcagggtgacagcttgtgcactagggctttgcagcacctggtccaggctgcagcagtgggaaaggcactgtgggagggaggactccaagaaaatatggaaacgatcaattacctaatatgcttcagcatggtgggggaaaaaaaccctcaaaaattgacagagcagatggaccacttcaggaaacattaaagataggtacatggaatacataatgtcttaaactattaattccagaaaaaataaaaatttgtacaagataaaatatacaacgaataggatcatcaccaaaccatagttacattgacattacatatttacatattacacggaccactgatttatccaagatttttttaaactgtgggaaaagaggaggagaagtagagggtagtaatataacagacaaagtgatccatccacctaataggaaattagtagtttcaagttgataagtcaagaaataatataagtatactacttagaaatatgaaagttaatgtcagggttttttgggttttttttgtttttttttgtttttttttttaagctaagttagttcaaaatagttgcctccaggaatagaggacagatatttccttttcttttttttcttttttttttttttttgagacagtcttcctctgtgaccaggctggagtgcagtagcatgatcttggctcactgtaacctccgcctcctgggttcaagccattctcctggctctgactcccaagtagctgggattacaggcgcccaccaccacatccagctattttttgtatttttagtagacacggagtttcaccatgttgcccaggatggtctcgatcttcaaggacagatatcattaacgcctctcagtactattttgagcacctagtatatgccatgcatataactccctctccccaagaccccaatcatcagaaccagcccactcccaaggagacatacggcgatccttttgatcgcctcccccaggaccctgccccatccattactgcttctctcagtttcatcatcagtcaatctctccctctctactggcttctttccctttgcttataaccgtgtccaagaacttccagcttggcaacagactagccaagtttggcttcattccctggattctgatctcatttcttggcgcagagtattgttggaatgctatctactgctaatgagccctctttgggcacagctccaggacctcccacatatgggtacttgttgggtactctgtataccacagcttagggcatataaagccaggcctacctgcagcaatgggcattaggagtcagaagtacaataactgtggaaataacttcaaacaatagagaaagaagaaggaagagtcaagcataacaccaaaggatagcagggccattattgacattggaatctcaggagcagaggcatttggtgagggaggtaagtaagatgataaatttggttttaaacaaattgtatgtgaagcttatagaactg

SEQ ID NO: 33907 - DNA, 2300 bp, Homo sapien
tttgagttagaccccttccaattctagccatttctgtaagctacatactatttatacctaataaccatgaattaatcacacacacacacacacacacacacacacacacacacacacacacacacacccctatttgggattgattagtcttctactgtaccacaacacccaattctacacatgtgcccaggcttctggagttgcagtgagttgccttgtgtgtcaggcaagggagtggggacagttttccacagctttagaacaactggcaagaaccctggccttgagcctgagtgatgggaccctgttcagtgtgctttggaggagcaaaaagctgagaccagtcaacagaccctgggctatgagcctgaccaggagtctcttaacctgggtgctgatgcagcaaagatgctgtctggacttggcagcggggatggagaagaaaggatggatttgaggcacatttatgaggtgataggttgacatgggtatgagtgaaatggacaagttgggtaactctagtttcaaacatgggccatgagtggatggtcttgccataagttgagacagaagacgcaggcgaggtgatgatgtcgagttcagttttggactcgtggaggctgagtgcctgtgggatatcaggaagcaatgtccatccagcaactgcaggtccacctctgaggcttgggcaagaggtgaaggctggagggaaaggtgttggaatatggaaaggcatcagtgtggaaggtggaatctggagatgggggcaagtatgcaggagaagagaagtgagcagaggataggagcctggggcagtccacagaggagagacgagatgtggctggagaggtgggattctgcagtacagttgatggtggtgaaggtgtggttctttaaacagagggatttaagcggaggtgaatgaggaaggtgggatctcattcccaggggagagttttgtcaatgggtctgtatagatgaaatctacaaaattaaactgggttccaagttcttggcaattctcttgaatgaaattggatacaatgattgtcttccatttaaggtttattgagatatgttaggaaattgcacaggggtgctcagaccccaccaggtctcagtatctgagcctcctgaagcagccctaggagctctgccagctttcctgtcctggagccttgggctagtacttcctgggccgcccttcttgctgctccctataagtacatctgtaccctcctcctagtcagcctgttttcatctgaaaaagtaatataatcatttttaaatgcaaatgatactaaaagatattcagtgataagtaaatcctcctcctacctaggccccattcctcagtcctttcccactctaccctgcaaagcaattcccgttaccagtgttgtgtgtatacaatatccttttggaaacactacagctgtgggctgaatccagccagctgcctgtttttgtaaataaagtattattggaactcagccacacccactcattgaaatataatctctggctgctttcctaccataacgggcggaattgagtagttgtgactgagacaatatggcccacagagccaaaaatatttactatctggtcctttaagaaaaagtttaggctgagggtggtggctcatgcctgtaatcccagcactttgggaggctgaagtaggaggatcacttgagaccaggtgttcacgaccagcctgggcagcacagtgagactccgtccctactaaagaaaaaattagccgggcatggtggcacacacctgtggttctagctactcaggagtctgaggcaggaggatcgcttgagcccaggagttcaaggctgcattgagccatgattgtaccactgcactctggcctgggtaacacagcaagaccttgtctcaaaaaaaaaaaaagagagaaaaagtttgctaatgtatgttctttgtatgtatagacatgtaagcatactagacatgcttctgcattttgcttatttttatttcacagtatatcttagagattgttccccattggcatgtacatgcagagtggtctcaggccttttcacatattatagcatggatgtaatttaatcaatgcactgttcaaggatgtttgagagattttctgtcttgcctgaatacaaaacactgtagggaacctctttgtgcttgactttgcacacacacgggatcttcagggtgggtacatttaaaactgacaagtattgccaaattgccccccaacgtagtttttacaccccacctactactctcagtgaaaaatcaggccc

SEQ ID NO: 33908 - DNA, 2300 bp, Homo sapien
tatttaagatatttcttaaatatatatatttaataaatatatatatagctcacgtttatttcaatgtttaatagtaaaggtgttttggtgtttatttacaagtttggtaatgtttttgtgaccagaaatatgttgtaagaacttaactctcatatatatcaattagacaatggtaaaattggtttccttgtaagtcattttgttttaggttgcagtttccaagaccctaccgacagacattaagtgaggacttattgcacttagcttgttaccagctgtttggagcaagtactgttactagtggagtcatctttccctctggggcaaatggagccactcaccaccatttactgggtatgcatcccccaattcctgtgaaagcagagttggataattaaaagaatgggtgaagtgggcatagtggcatgagattgtagttccggctatttgggagggtgaggtgggaggacagcttgagcccaggagttggagattagcttgggcaacacagaagaatgcgctaatgaattaattaaacagtgggtgagcaggaaaggtgataggaatttaggtctgatttagacacggagggtataaatggactactgttaaaaaaaataaaaaagaggtctagttctttgcatatttattattgctctgcctaatttacagagttgaggcgaggaattttatttaagtaagttacttattcaagtaagtttatttttttattttttgagacatggtatgactctgttgctcaggctggagtgcgtttgctcaatcatagctcattataacctcaaactcctgggctcaagcgatcctcccgcctcaacctgagtagctgggactacaggcccatgctaccatgccctgctaattaaaaacaaattttttgcagagataggggtctcaccatgttgcccaggctggtcttgaacttctggtctcaagcaatcctcctgcctcggcctccaatgcattgaggttacaggtagagccaccacccccagcctcaagttaagtttagaagataatcaccaatcaagcattttaaatagcagtggcttgaatatacatagtaaaaacacaaaataataataatgataataatggcaaagctactccatatagtgaaaagggcaatgaattgggaagtcagaaatctctagctccatccatttatgacaaaacttagactttatatgtgctagatgctggagactccaaggtgaatactaaacacttgctatgggaaaacaacttggtcttttcttgaatcttcttctcacttggcaagtggaagctcacttggctttgttttgaattagtttgaattaaaaatgttcaactagactgaaacacatcaaatatataaaattctagtacttcattaaaacgcaattgactacttttggaggttgctaggcattactattattataaaaattgataaaagaggaaaaaataaagcatttatcctgcctttcctgcataatctgtatttcaggtaaccaaagcgttgttgagagaaaaaaaaaatgcaaaatacatcactgagattagttgatgagctaaaacttctgataaacgtatctgttttgtctacctcagaggacacttgaggagaggctgtcaagggattaaagggaaaggaagcacttggtgggctgcaaaaactctctttaggtctaaggtcgcattctggctccagaatgccagggctgctggggcgggcaggagctgacagctcttcccgtatctggggctcacaagcatcaggtgcatggcaggtcaccctcccggccaagggtgttaagcaggctcggtctgagttctgggtgcgccacgcctgcctttctggtctctgcagcagcaaccccagcaccctcaaagcctagcgaccgagaatgagaaaccgtgaaaaaaacacgcagcggcaggccacgcccagagtaggcctgcgcgcgcgcgcgcggcctcccacttccggccacgggagctgggggcggggccgagcgctgcgcagggctccgtcgtgtggcgagcggctgccccctgtctgcgacgagcggcgggacccgcgggccgcctcgcagactgctaccccgccgcgctcgcggccgcctgcgtcctcctcagcagccctgcgacaagtcccggctcctgctgcgattatattatttttatttttaattcacaatttcccctggccctcaaagcgtttttttgtttgcgggcaagagggagttagaggagggtaaaaaagactttgaatgtgaggcaaagatggagga

SEQ ID NO: 33909 - DNA, 2300 bp, Homo sapien
aaggtctgcagcttcactcctgagccagcgagaccacgaacccaccagaagaaagaaactccgaacacatctgaacatcacaagggacagactccagacgcgccaccttaagagctgttaacactcaccgcgagagtccacggcttcattcttgaagtcagtgagaccaagaaccctccaattccggacccattactgcacgcccgcctgggctctgtctctaaaaataaaaaaattatacttttataaactctttccttgaagggttaaatgcatatgaggaagcggcacatggacttccttggcgcttcccccaccctccctttctaccttgtgtccataccaaattttgtgatttatcactaagtacaaattattagttaagtgctataaagattcttttgaaataccttttgggaaggatatagaatttattttaagagcataaaactagacaactggtgtttctttattgcttgctttggaactcatattcctattggagttcccaattaggcagtttgcgaatgaaaatttctaaatcttgggctaaagcctgttttggtaacaactttagtccttatttgaattacattagtaggcatgtgtacaacctgtaacttctgagatatttggtccttgagacttctagcggcattaaaaatatgacaggttctaggctctcggtacttacacacttttctctcttttttttttttttttttgacaaggctgctaagagaacactgcaatctttgggtagttcacccgttttctttactgtgcaaggttcataaaggcaggcactatgtctgtcatgtttgtcactatatctcccatgccaaccacagtgtgtacttcacataatgagcatttcaaaggcaacatttggtaaagagatatgaatgaaggtcttacactgaagcagtggggaacagtagaaccagcctaagcattagatctgggttcaaattccagttttgctcattatctatgtgatctacagcaagttgcttgacaaactttaatttttacttttttgtaaaatgggaataatacctattatataaggattataagaatctataatcatttattaaaactaaggagtgtttagtgttttcttcgtaatgtgtttcaaaatatgggctttaaaaattgagtgaaatacaattcctgtccttaataaatttccacatacgatagtaagacaaataaaaaaatactacggaaattttatgggttttcaaggtcgggagtgatgatgtgtttgagggaattaggaaaggaggtggcatatgaaaaagtccttaagggatatttaggatctcagcagttaaaatgggtaggcatatccaaggtaaacaaagagaacataagcagggaggtaaaaaggtactgagtgtgactgaagaagggccagttactcctggctgaactgtaaggttcgcacaggaaagtagagatacgtcagaaatgtgtggtggggccatattagtggtgacaggttctttctttaatccagtagacaatgagaaacgctgatttgggtctatggcataataggaagtagtatgccacatactgcatgtgggagttctgcaggacagattgggaagtgcatgcgtgtaagactgggaagaccagttaggagaggctattgcactgttttaagtaagacataataaagccctgcaccaggcggagagcagaaggaacgcacagaagacgcaggagaggcacatttcagagagaatccagtatgcaatggatgtcgcacacaagagagagagacgcaggtgaccggagccatttacactaatgggtaaatctcgggaaagcgctggtttcggctaccggccagttacaggtttgaggtgcccgtcgccgccaccttccctttttttatattcctctttttctcatggccgcctccgcttccctccatctctcccgcgctagtaactgagctttcagtcatcgacctgaccctgcgttttccctcacgctccgattctgcttcctatcactgcctcctactgtactatcacagccaggacgagcacgggtcaggcactgaggctgtgggacactccacccgcctggtcccctatcgcctccgcctaggcagctgccatgcgtgcgcccccacagctctaggaccaataggcaggccctagtgctgggactcgaacggctattggttggccgagccgtggtgagagatggtgcggtgcctgttcttggccctgcagagagctgtgggcggttgttaaggcgaccgttcgtgacgtagcgcc

SEQ ID NO: 33910 - DNA, 2300 bp, Homo sapien
tctagtatctgggccttggttctttcttagtgctcacacatacctttttacctctaattacagcaaaagtgtagtcaataattttctgtaaattactgactcacagtaatttctaaagaggccatcctcagctataccaagctgtacaaattcccctctccaattcagctcacacagcttaaatgcttgcaatggctgtttggttgtggctgcccctcttctccttaactagccctcccactctcactatccaaaagatgtctagttgagatgataaatctgaactaatcaaaccctctaagagagctcattttaatgtaatagaatactgctatcaatcaatgttgtagaatttgagaataaatggtcatgtgagtcctagcatgaattacaggttactactatgaccagactttacaagcttccagacctcagggctagggttaatccaaagaaaaaaggttactgcttacacttattggtattaacttccttttcattatttactgaaactagaaaaaagtattctataacaaaatgtatacaatttagtaattgtacaaaacattaatccagcaagatattaattacagtcactaaaatgaacactcaacatatttttcactgccacttccatgaaaagctcagaaaaagtcactggctaaaaagtcacaacaaaagcaatttaagctttacgtacaacagaaaaggtaaatcttccacaataacaatgcagacacaatcactaagaggctctccatgctgccatggtttcctggaatgtttttcagagtccatcttctacaagagacatcatcagctttccaagagcaacacttgaagcattagatgtaatacaaaataaggagttctttattatttatacaaaacttgtacattaaaaaaaattaagattcaataactctgctgaccccctgagaaagctaagagcgttcgtgggtccatcaaagagccctgtgtgaatgtttcagtcaccaacctcctggccacaggaactaggcacagttctagggccattcacgtggctccttcactggctctgaaagctgactttccctttcattaggctcggcaagcaagccagggtttcctggacaacattaaagaacattatcttctctggcccaggctagagtattttatcagtacacaagttgatttttatttcttgaacacttccaataaactagcataagttttattacaacatatacagatttgatacagtttacaaaaaaaactagatttttcaactaaataaaaatgtcttttaagcaattaaagttggcttagagacatggtatttttctttcaaaactgtgtttctacaatgatttctaaggtcccagtcttgcttgtacttgacagtcaccctcatctaagcaacattaagagctctgatatctttagtaaagaatacaaaaccctgtgtttcttaaaagcctaatgctgaaagacatgttatagccaatccagacaaacatttatatttaaacatttatatttaaacaaaaggcctctctgaacaaatagcctgcggagataaatacagtgatttgttttcctgatagaactatttagcatgtttaacacattattctgtagtttgggaataagagtgtttcttcccttgaagaaaacaggtccccttctgaagaataatgctgattaccccccaaaatcaaaatagaccagcaccaaatgaagtattaatttacaaacatgaacttagaacttagctcttacttcttgaagttctacatcccagacttaataaattaactacaaaatcaggagtttcatcagctacagtataatttaaaaatccattttcaactggcaggagtgagggagaaggtcaattgcactgatcaccatgaacttcaagaatttcatcaaaacttttttcccagcttatatttgccttcagaggtgagctgtagattaccatctctgatgctttaacatacaatattcttgttgaaatctcttcaaagagcacagcatgtaaagcactaaactgtgttcagatctgaggagtctgcatggaaagaacctgagacctctctgaaagagccaaaaaccaagtggctgtctcagtgatcacatctattcatcctccacaagacaatgcattgagcttttttaattcacagattttatgttagtcctttagaacccaatgcccatgttccagttcagaactgtcgggctattcaggctgtcttcttggtgcaagctccttggaggtcttgtaaattgatcttcgacctatggta

SEQ ID NO: 33911 - DNA, 2300 bp, Homo sapien
ccttctgagtagccgggattacaggtgcccgccaccatgcccggctaatttttgtatttttagtagagacagggtttcaccatattggccaggctggtctcagactccttacctcaagtgatccacccaccttggcctcccaaagttctgggattacaggcatgcctgagccaccgcgcctggcctaattcaccgtacttttaaaaagtaacagtagaaaataatcagagatccaaaatacctggttttagttacttggaagttcaaatgttttaatttctttgtctatattgttatattgcatttgtattagagaaggtaagatataaaatttatgctctgaagagtatcatccccatcagttatcttccatgggatgctgacttaacagactagcaaaattggaaacttcgtgccatgaactgtcgaggtggttacaaaaatttaaaagatacaagctgcttccagaaagatccaagtccagtagtaataacaaaacacaaactattgtgaatggtaaatgctgtaattgtgatgtgttaagaatgggtgagaatacataaaattaccattttgaccactgttaagtgtacagttctgtggtattaagtacattcacactattgttcaaccgtcaccatcatccatcttcagagcttttttatcttccccagctgaaactctgtgtccattaaataataactacccattcttcttttccctgcccctggtaacaactattctgctttctgtctatgaatttgactactttagttttcctattattaaacagtctttgtgaccactagcccagcacatagtaggtattcaataaatttctaaattaaatggcatttaggaattgaaaggcattgcttatgtcagtggattgactatatatcttatgtgcacccagactgccaattgttataataaccttgttaattcataggaaaccttttgttttctcaagtattttttatttaaattcttttcacatagtttacttttttttttagactgaatctggatatggatctgaatccagcttgcgtcgacatggctcaatggtgtccctggtgtctggagcaagtggctactctgcaacatccacctcttcattcaaggtgtgtagttaatggatgccttaagttaaacaacataaattgagtttagtattggatgttgtgaacagaacatatgtgataattttttgaacaaacttttttatagtataatttatttgaagttattagagaagtactttttaaggtataaaataataactcatatagatgaacacatgtcactgattttatttcattcattcattaatgaggtaaaatataaaaaaactggttcaaaggaaaatctgaagaatactgaaatgatttgtgaatatgggaaaaactggtcagtatccacagattaataatcagtgcttctgcaccagacaaaattcatttgcatctctatgaacaagaattatttatactactcagttttttactaaaagagttgtaaaatagctcaaatgcagtgaaaggcaaaagtgtctatatgatcaaatagtactctcccaagggtaccataaatgacagctcaccattactttgaaaggacacaagtaatattttttcccatttcaaagtctttcacagttgttccacacaattttgtttaatttgaaaataccaaatgttatatttgcaaactgtcaggtattactgctttcttgttttctataaaaaatagggcttatttataagtgatatcacgaggttatcatcattcataagtggcttatcgctatcaagccaatagattcatcagtttcaagcctattcctagaagtattatattgaactagacagctctccttatcccatgccctcagttataaggtgcagaccttaaaagttgatgaaataccataggaccacatgaaatccagttttgttttacttgaattacatccccctattttatgttttgcagaaaggccacagtttacgtgagaagttggctgaaatggaaacatttagagacatcttatgtagacaagttgacacgctacagaagtactttgatgcctgtgctgatgctgtctctaaggatgaacttcaaagggataaaggttaattaggctattaccactatttttacttggagaatgaatggattaaaagcctcttgatctcaaagggtaatgtctttaagtgataaaggtgtttatagtcattttttgctgcaaacccccagtgaaacagatttcagtgtccttgtaacttgggtacttc

SEQ ID NO: 33912 - DNA, 2300 bp, Homo sapien
ggtcaaaagtacaatttgtttcgtaaaatacttaacacatcacaatactaatatggcagtcagcttcccatcttatgagcagtgatgaaactaccaaaatcactgagaagcaagtaacccacttcctattaccaactgaaaatgtatacctactacacaatgtgttcaatagagattcctaaattacaggatacatttaatctaaagaaatcctgaggagcttctcgttactgaaaaccttgcactgaaatttcaagaatgatcacagcatcaatatacaacataattttgctgctatacaaataaaagtcaacacttgcaatccttagttctgactactcatgcctttcctggcccccttctcattagctttctagacattataaaagcctaatatgaaacaattccacaaataatgtccaagtgatttgccaaatatgaatactggaaacagggtgatttcttaatagccactggctgcacatgacatagtatcttatgaccagcttgttgagggactggcccagctccccctctccaagttaactgctagctccagccatgtctaaaaaagtttaacaggaagggagagagaagtcaaaaaggctacgtgaatcttcttacagcaaaaacttaaaaaaaaaatccccacaactatgtaatatcaagagatcatccacctgcagtcctataatgactgctttgctaaaattttgatacagggattttaaaaaatatataaaagataaaacatcttttccttaccctcgaccccttaccgcaaaaatattttattattaagtaatgctcttcctggactaaagatcagtctccattctcacatgttccaagttactatgaatatttcctgtacccatcatgtgccgattcaatatctctattctgaactaaggtacagggtgagggagaaagtcctccacattcatctgtctcactacatctaacctagcagaattcaacacctcaaatttcaacaccaagctgagtcgctccagcttctgtcgaaagagttgcgtccgcagtgccccccaacctactcggcttggcatcctcagagagaccaacctcttttaagaggtccgacttgaaccgctcccatgcccagtcgttcggacaccgctgaagcccaacccggattccttacacccgggacagctgccgccctaagtcccaagtcacggcgcgcatctggcctcccaaactggatctcaggtttatacaccctttccctggtcctcggctgcccccgacgagcccccgggcaacaaggacagtgcccctatatccccgcctcatccctagtcgctgcagcaacactcagcctcgcaccccggcacgttccgcgcctcccgccagccccaccccaccgcctcagcggattgcctcgctgcaggtgagtctggccaggggtcccttggcaccaggggttgctcaccttactgaggaccccgcagcgctccacaggcggcccagactccgtctctggatcctcctccgagcccgacgagttccagctctgattatccgacatggaggctcgacaaccgagcaggagaccggcccccgctccctcagctgcgccggaggaggcgcccagtcctcggggtgaagggtcgggggatggcgaagcgaagagtgcccgctccggtgtgggggggagcaggaggagggacgaagtccgcccgccgcgccgccgccgcgcctgacaccgagcggagcgaggaaggaggacgagcggtgaaggaagcctacccttccagccgtcagccgccgccgccgtcgccgtgacccctgcgttgcgcccggcgctgccacccgaacttagccccctcgatgccaatttcaaatagggaaggaaaagggaaaagaagggaagagaaaatccggccgctgagtcccgcgtccactcacacctccgctaccgccgccatcttcctgcctggcccactatttaccctcccctcccctgtcctttcccctccccttcgtcctcccattctcccccactactccccgccccgtccccctcccggcgtctgacgcgacacgccgagccttcgggatcctcctcccgaaccctacctccggctctcccgggtgacgacgggtagaaaagcaggaggagcggagaaaggagagggcggggtagggatgcagctgtgctgcattctgggaagggcgttggtccgtcgctcgcgcagcctcctgggagttgtagtcgcgatcctgaggtaacgggtgagtatcccgcgcggggatcgcttgtccccttggggcct

SEQ ID NO: 33913 - DNA, 2300 bp, Homo sapien
agtgaagcctatgaaataccaactactctaacaagtttttatcccataaaccaaacagataggagtaaaagatatgggaatacattttcaatttcattgaatagtaagaatatttctgcttgaaacattcctagcctggctctcatttctacaataggaaacaggataaaaagggtggcctacacaccctttgaaattccatttctgaaatcactgtcttattctcgaatgttagaactttttatgagatctgacatattctcaagcagctgtgaagtgcattaaggtatcaatgagtatccccatctacctcttccctcccacttttccaaaaatacagctgtctttggagacttaaatggtaaaaatcaacagataaaggagtcctagacagatatgcaaagtcaccttaaggatcaaagctgcagaataagacatggcagtatgagcataatataataataattgatattagtaaaagaactcatcaatataaatggagtgtggatggtcagaaaaagaagaaagtaaaagaaagcaagataaatattggcaatgcctacttaaatatccattgccacgatagggataacctagcttcatgctaccaaccattcagaatcgtaattaatcccccatgcaggaagaaaaaaatatgatactgggatatgggagaaggtcatcaagcctagatttgaaaccaggatataaagagctggagttacaggcacctaccaccatgctcggctaatctttgtatttttagtagagacggggttttaccttgttgcccaggctggtctcaaactcccggcctcaggtgatccacccacctcggcctcccgaagtgctgggattacaggcgtgagccaccacactcggccagcgttttcccttagactcgaaatttcgctcctatcgtcccatccttgtagtaagaaagtactctttctaaggtttaataacaaattttactcttggcaattacaaggaaatcgactatattaaaatagctaacgagaggaaattactgaagctacaaagtcaaagtctcataatcaaagttatccttgacaactgacaagagttgttagatcttctattggtctttctgctaattcaaccctagtcttaaaacaaaaatagcctcctattgcctaatcccttgtacacacaaaaccactgcacttcggtatttctaatacgagaaagtttctatatatccaacctttcctatctttgaggggcaggcatggttaacgtggttctcagtaagatattcatttacaaccaagagaaaatcccaggctatcatctcacattcttgttttactttaaaaacctttctaacgtcatttattctctgacaacctcaaaattactttctacaaagcaaactctagaaatctaaaaatgcgaagtgcgtgcttgtgagaaggtactaaggaaattcttcctttaaacgtcaaatgtgaattctaacttctaatgagtaagaccctcgagatttacagcggtggtctggtggaaagaaaacccttggcactagtagctcacaaaaccccagcccatggttgaggcggaagcggccagatgctcccgggctttcgacaagccgccctggaaagcaggcccgtcatcttcagcggaaagctctctcacgtctgggcccgcaagcccggagggttcgtcataaacacacaaggcaaggatagaagcgaggccgaggggctggtcacgcaactgtcaaacgaagcccacccaccgactgacaaggccccaaggggacaagcgatccccgcgcgggatactcacccgttacctcaggatcgcgactacaactcccaggaggctgcgcgagcgacggaccaacgcccttcccagaatgcagcacagctgcatccctaccccgccctctcctttctccgctcctcctgcttttctacccgtcgtcacccgggagagccggaggtagggttcgggaggaggatcccgaaggctcggcgtgtcgcgtcagacgccgggagggggacggggcggggagtagtgggggagaatgggaggacgaaggggaggggaaaggacaggggaggggagggtaaatagtgggccaggcaggaagatggcggcggtagcggaggtgtgagtggacgcgggactcagcggccggattttctcttcccttcttttcccttttccttccctatttgaaattggcatcgagggggctaagttcgggtggcagcgccgggcgcaacgcaggggtcacggcgacggcggcggcggctgacggctggaag

SEQ ID NO: 33914 - DNA, 2300 bp, Homo sapien
cctagacagaaaaatgctagaaaacaatgaatctacagaagaagtggtttatatcttacttttatagcaccccagtcagattatcatatagcaagatcttaataaagatcttaaacagggataaagtatattttcataaactatcaccatagcaacatgttctataaaaatatattttttcaacttatttgactaagaagaaaaggatgtgaaattatagtagaagtgaaacaataaaaaggttagaaaaaaacaggaagcaaaacacgtttactaaataactatcaagaggattctactgatacctaatataccaccacactgctttatatagtatgcctttaaaatattaataaaagaatttctcacagtaacaggaagagactcaaaagctaagcaaaataaaaacgacagaaagaacatgtgtacatgccaagagtgggcactaatactgttcattggtgtaccgtactgtgtgctttttagactaaaagattttccaatgttatagtgaagcctatgaaataccaactactctaacaagtttttatcccataaaccaaacagataggagtaaaagatatgggaatacattttcaatttcattgaatagtaagaatatttctgcttgaaacattcctagcctggctctcatttctacaataggaaacaggataaaaagggtggcctacacaccctttgaaattccatttctgaaatcactgtcttattctcgaatgttagaactttttatgagatctgacatattctcaagcagctgtgaagtgcattaaggtatcaatgagtatccccatctacctcttccctcccacttttccaaaaatacagctgtctttggagacttaaatggtaaaaatcaacagataaaggagtcctagacagatatgcaaagtcaccttaaggatcaaagctgcagaataagacatggcagtatgagcataatataataataattgatattagtaaaagaactcatcaatataaatggagtgtggatggtcagaaaaagaagaaagtaaaagaaagcaagataaatattggcaatgcctacttaaatatccattgccacgatagggataacctagcttcatgctaccaaccattcagaatcgtaattaatcccccatgcaggaagaaaaaaatatgatactgggatatgggagaaggtcatcaagcctagatttgaaaccaggatataaagagctggagttacaggcacctaccaccatgctcggctaatctttgtatttttagtagagacggggttttaccttgttgcccaggctggtctcaaactcccggcctcaggtgatccacccacctcggcctcccgaagtgctgggattacaggcgtgagccaccacactcggccagcgttttcccttagactcgaaatttcgctcctatcgtcccatccttgtagtaagaaagtactctttctaaggtttaataacaaattttactcttggcaattacaaggaaatcgactatattaaaatagctaacgagaggaaattactgaagctacaaagtcaaagtctcataatcaaagttatccttgacaactgacaagagttgttagatcttctattggtctttctgctaattcaaccctagtcttaaaacaaaaatagcctcctattgcctaatcccttgtacacacaaaaccactgcacttcggtatttctaatacgagaaagtttctatatatccaacctttcctatctttgaggggcaggcatggttaacgtggttctcagtaagatattcatttacaaccaagagaaaatcccaggctatcatctcacattcttgttttactttaaaaacctttctaacgtcatttattctctgacaacctcaaaattactttctacaaagcaaactctagaaatctaaaaatgcgaagtgcgtgcttgtgagaaggtactaaggaaattcttcctttaaacgtcaaatgtgaattctaacttctaatgagtaagaccctcgagatttacagcggtggtctggtggaaagaaaacccttggcactagtagctcacaaaaccccagcccatggttgaggcggaagcggccagatgctcccgggctttcgacaagccgccctggaaagcaggcccgtcatcttcagcggaaagctctctcacgtctgggcccgcaagcccggagggttcgtcataaacacacaaggcaaggatagaagcgaggccgaggggctggtcacgcaactgtcaaacgaagcccacccaccgactgacaaggccccaaggggacaa

SEQ ID NO: 33915 - DNA, 2300 bp, Homo sapien
aaaaccaacctatattcccctgggcactacgaaataacatctataccagtggttcttgtactttgggacacattggaattacctgggcatctctttaaaatactcctatctggcttctactcccagaccttctgatttatttggtatgggaggagctttggcgtcacagctctccaggtgggcctaatgtgcagcaaagtttgagaactaccatgatgtatactttttttcctagtgaaactaccactaatagtcacagtattcagagtcccttccaaaattctttttattctttgctggtgccaaaaacagaagcaacattgttaagggaagatcctcaaggcagagtggagtaaatgagtgccctctctaaatcatacaaataagtcacaatcgtaatttattttagattcatgacagctgttcatctggccacttatttatagcatacatgatccccaaattggaggcaaccgtaatgtcatggagtgcatcagagttgaagtaaaaaggcttgcattcaaatcccaattcttccacttactaacagttatgatgggcaattcattcaatcttgctgaagttctcatttttttctccctaatatgaaaataaccagatctgttttgcatggttgtaaatatctttaaaagctaatgtatgtgaagataaactataaagtatataaagatattaaataattattatctgaaaggatttttcttaaccttagagatgacgtaactttctaggtttttttttctgtattttttcattgccttaagaaggagatctgcatacagtagataataaatgcatttgaacttaacgtgtatagtagaggaagtattattttgtatttctataccatgttttaatctgggtagaaacgtaagttttctactcatgcctgggttccaacacatgtgttgccacttgttagcaaatttgtgtcagtagacatgttctaagagtcaggtttgttatctttttgtatggcgaataatatctatctttcagggctgttatggccctcacatgtagtgccgtaagcatagtagctagaatggagcatgcagaaaatgctaattcctttcttctctccaagaatatcataatcttgtgatagtacagatgacctttgaacaccacaggggctagggaccctgcccacacacaatcaaaaattcacatataatttttgactcctgaagaacgtaactactaatagcctattgtaaactggaagccttactaataaggtatacagttgattaatatgtattttgtatgttatatttgttctgtactgtatttttacaataaagaaagccagagaaaggaaaatgttattaagaaaatcataaaggagacaaaatatatttattattcattaagtggaagtagatcataaagatcttcatcttgtcttcatgttgaataaactaaggaggagaaagcagtggggttggtctttctgtcttgagggtggcagaaacggaagaaattcaaatataagtggatcctctcagttcaaacccgtgttgtctaagagtcacctgtaatttttaaaatctgagtaataatttttagtagctaaaaattcttaactgtcatttaaaaattttgttttgctgatttctatatcatttaacgttttaaaacttttttattgatgcataacggatgtacatggtcctcctgccccaccccaccccccacccccacaacatgttttttggagttttttctggtttttgtttgtttgtgttttggagacaaagtctcgctctgtcccccaggctggagtgcggtagcgcaatctcggctcactgcaacctctgcctcccgggttcaagcaattctcctgcctcagcctccctagtagctgggactacaggcgcatgccgtcatgcctggctaatttttttgtattttagtagagacagggtttcaccatgttgcccaggctggtgtcgaacccctgagctcagtcaatctgcccgcctcggcctcccaaagtgctaggattacgggcatgagccaccacgcctggccacagatggttttaaaagcagtgtttatctttatgctttttcagataagtttataccatggatagcacaaaggagaagtgtgacagttacaaagatgatcttctgcttaggatgggacttaatgataataaagcaggaatggaaggattagataaagagaaaattaacaaaattataatggaagccacgaaggtatgtttcttgtttcttttgatgtgtgtaatttaatgaccttttaacttt

SEQ ID NO: 33916 - DNA, 2300 bp, Homo sapien
tgtcacttcctcagaggagccttctcggatcatcttattctaaaagtgtcccctaccttcatgttccattcccttatgctgttgtctctttcctttgtaacacttaccactgaaatgtctatttgtttagtgtcggtttccacaactagaatgtaaacttcataaatacagtgatttttaaaactttgttgggccaggcgtggtgtctcatgcctataatcccagcaatttgagaggccgaagtgggaggatggcttgaggccaggagtttgaggccaacctgggcaacttagtgagactccagtctccacaaaaaatttaaaaattagctggtggtggtggggcagacctgtagtcttagctacttgggaagctgagatgggagtatggcctgagccacggaggtcaaggctgcagcaagctgttatcatgtcactgcattccaacctgggtgacagagcaagactctgtctcaaaaaaaaaaaaaattaattaagtttcttactgcatctccagtggctaaaacagtacccgacctgcaataagtatttgtcaaataaatatggaatgcaatttagccatgggaacagtaacttgtctttgagtcctgaaagctttaagtttttcccctaaaggtctagactaaaaaaatatgttcaattctgaagtaaacctttaaaaccaggtcctgttcaaggattccatatttttaaaaacatcttcctagatttctctttgccctcctctaccagacgatttctccctagactcccactttgtatattcatctattatagccctccctacattgaatagaaactgtccctggggtggctctccattttttgaggacaaacatgtcttaataatctttatgtcctttatcagctaggattcagctataattaataggaaaacccaagtaactatggcttaaacaattttttaatttgtttcttgtgaaagtctcaaagtgtgcaggccagtgctgatatgtctctgttttacaaagccccaagaatcagcccctgcagcccactactctaccatccccctgtgcaacccttatgttcaggtgtaaacggcagcatctgcttccaggcagcaggatggaacagagaaatagaaagaagaggcaaacagaatgctacagctgcaagaaaggaaggttcccagaagcaaccacacacagtacttcctttttttttttttttttttgagacaaggtctcgctttgtcacccaggttggagtgcagtggtgcaatctcagctcactgcaacctccgtctcccgggttcaagcgattctcttgcctcagcctcctgagtagctgggatcacaagtgtgtgccaccacgcccagctacttttttgtattttgagtagagacggggtttcaccatcttggccaggctggtctcgaactcctgacctcaggtgatccacccgccttggcctcccaaagtgctgagattacaggcgtgagacaccgcacccggccagtacttccttttatatcccattagtcaaaactcagtcacatggctacccctagctgggagggtgtgagcttcaaggatgggagatacattgtagtcatcaattctgtaacacctatttttcacattatcacatctttttaattgagatactaagttgtctgcctgaattgaagttgagttcttccatagaggatttgcatatgcttctgccagtcactaggggcaatactaacctcactttaattacattttctgcttgagctctttaggatgataccatttgtgtgaattcagattacaagcctacatgtgtactggtttatggttcaaattctcactggcagtccctccttccaaccagtgccaaggctgagcatgcaaattgctttgctgtggggaaaagcaagagagatcagattgttactgtgtctgtgtagaaagaagtagacataggagactccattttgttatgtactaagaaaaattcttctgccttgagattctgtgaccttacccccaaccccgtgctctctgaaacatgtgctgtgtcaactcagagttgaatggattaagggcggtgcaggatgtgctttgttaaacagatgcttgaaggcagcatgctccttaagagtcatcaccactccctaatctcaagtacccagggacacaaaaactgcggaaggccgcagggacctctgcctaggaaagccaggtattgtccaaggtttctccccatgtgatagtctgaaatatggcctcgtgggaagggaaagacctgaccgtcccccagcccgacac

SEQ ID NO: 33917 - DNA, 2300 bp, Homo sapien
tgtcttgtagtcataccctccatccccttcccattgctacttcctagacttaggtcatcatttatcttcttaattactatcaaagagaacatttatctcttagactactgcagtcagctctcaattgatctctctctcttttttttttgagacggagtctctgtcacccaggctggagtgcagtggtgcgatcttggctcactgcagcctccacccccagggttctagctattctcctgcctcagcctcccaagtagctgggattacaggcacctgccaccaggctcggctaattgttttgtatttttaatagagacagggtttcgccatgttggccaggctggtctcaaactcctgacctcaggtgatccacctacctcagcctcccaaagtgctaggattacaggcatgattcactgcacccagcctgatctctcttaatatccaaattcatcctcaacgctgctggaatgatctttctgatcatgtaacttttaaaaaatatttcaataacttgtctagaataaacacccagatttttaatatgacaagttttgaccttccatgatctggctgctccttactttttgtttcatccttagccaatcctttgcacccattgctttgtccttaccaaactgcttgctgttcgtggcatacatgtccatggctctgtctttgcttatattgctctactgcctagaatatctacacctgtgtttataccttttatccatctttcaggatgagacctactcatctttcagatctcaacacctgggtcatcttctctaaaaactttctgtgcctcctttcctgcttatttacagtcatgcaatcttaccccatgaaaaatagctactcctatctctctactttgtatctgttattttagggcctatcagcagtttattcatcagtcggtcacttatataatatacatgcctggccctctctacagattgtaaactccttaagaatgaggacttcattttacattcctcaccaatgtcttacatattactggtattcagatagttcgaatagtcactatttgttctttgaataattcggttacttgttactaaaagtacttttaatgattttttgattaggactttcaacaaattctctatgcatatatttgattctgttgttctgtataagctcacttttcttaaaataatatttccaaaggtaagtttcccaagaagggaatttgcacaaattgtttgttctctcttggttctgtgtcttagaggaaagtacacagcacccaggttgtcacacattgctcaagaacagtgatcacaatctattatgctcaacaggccccgctggggatttttctgaagacctgactacgttataaactcactaatattgggactgggtcttcaactgttttttgcccagtgattttttgcctgtaggtactcaatatgttgaatgaatgattttagcatatcacaggaagattgcagatttggatactgttgcacttatatatatctggaaaggattttatcttaaatatcaaggaaaaaagctaaagttagcttctactgttttagagcatttgtgcagaatgtcatcagatgaggagaaatactcacttccagttgtgcaaaatgactccagtcgaggcagttctgtctcttcgaatcttcaggtaggaaaaaatttctaaatttaccatgactttttttattttaaacaaatgaatgtaagggaaaactaggattttttaataattttttcatccatttacaagggagtttttcaatttataataatatcaaacttcaggaattactgtacacattttaggagtgactttacattgttttaacttttcagaaaatattgatgaactcttcatacactctgtacaaaggcttcaaccaacacagtaagaggtgaaacaaatgttcaagaaacatttttttgtttaaatttttttcattttagctacctctcatgaatgctactttcacttttaatgcaaattaatacaatatcaaaccatccaaagttctagagctcaagattcccttgtgttctacttgctgaggtttggtctctgttgtcacaacattcagtacaatctgctgcccaggacctggacattgacagataaaatgaagtgggtcagttaactacagagggtgtggtatttacatgaaatgttttaaatttctcttatttctaaatatttcatcatcaaaaatatggatttagatttctggagtagattttaaatatgagaataatgacatggtatatcttaaattttacag

SEQ ID NO: 33918 - DNA, 2300 bp, Homo sapien
gagaacagcacgggggaaatcgcccttataatccaatcacttcccttcccctacatgtggagattacaattgaagatgggatttgagtggggacacaagacctaaccatatcaggtccctatacccgactcgtatgcaatatttttatcataaatgtgaatgtgtatttttctagaaagaagatctttcgctttaaatatgcgttcagaggggaccatagccctaatagagttaaggactacgactgtgaatgagaagagggttaaagccagaaccactaacatctaaagggcaagagaagaacagtcagcaaagaagaggagtcagcaaaggaagtcagaacattagaactatggaagcaatatcacaactttgagaagaaaatagaattagatgccaaagaaccatgaggattggatagaatttggagattaggaggttgctgagacgtttgcttgaacaatttcactggaaagtaaaacaattacaggtcttagtcacagtgggctgaaaaataaatgagagatgaggaaattgaaatagaaaaggaagatacagggaaaagtgcaaaaatagaatggaaacacaggctggaactaaattgtggaaaggaaagttcaactttttccagtgagtatcactgtgcatacacatgttaagtaaactaaatctcagcatgactgtctttagttaagccaattagggaggataaaataagtgcatgtatctgcagcaaggaatggctgcttcactgacttcaaatctaccactgtgataacttggtccatttatatttttattcacttcttccttcaggatttgagaccaggcaggtaacaggggtgggggggggggggtgctgattatttaaaaatgagctagtaagtatggtcagatctcaaaaattgtttcttaatatggacacactgcagacacaaaaaaacccaccgcactcttggaaaatatgctatcttccatctgccctgctttatgtcaacaaggtatgagttatttgaaactctagaacagtagcattttccttactgtttctaggttcagaaacaaaggagaaaaatgaaaactgctttaatgggtggcggacgcacattagttcactacattttcagtagtctctaatccaaggtatcagaaaacaagatcaaaacttttgtgtgcttctctgttgccagaaacataaaataacatcttggtaattatctggctgacagcaaaacaggggtctgggaattcaaatggaacccccaagaggcaaaggaagagcgaattaacatgcaaactagcagcagggtgatgtcgcctgtgcctttcaccaggcctagctgcactcaaggaaaggggcgcgccagcccctccccaaagcagggactagaagcagaggagaaaagccattgcagtaagcaaaaggccataagttttcttccatcaccttccgacccagcctgttttaagaaaaatcttacttaagcacaacagagctttatacatggttattttttctcaacgttttaagtgaccggaacctctgatgacagtaatcgctcagcatccctcactcctgctcacttcctcttcctgcacgcctcggaggggaaactttgggaccttccggcacaacagctgaatcactcgcggtctggggaagagcccagggggaggaaacacgcgccaaggaactttaaatctccctccactactttcgccagggatgcagggacgcaggatctgcccggagcgctgctacccaccgtcgccgctcgcgaccaaatcccgactcctcgctctgcgcctcttagccgcgtcgcagctgcagtgtcagcaagtgcagcctcagcaagcacaaccgctacctagacggcaacctgacagtttcaaactgcagggaggaattaaggaccgccctgggcattggtcctttgtttcagcaatctgccgtttgattggtccgagagctgggggcggggatttgggccgctgccgggagaagccggaattactttggagagccccgccccctggctccgcaggttggtagggggcggggtcctagggagccccacccagcgcccgtggggattaaatattgcgcgtgctcagttctgttcagcggctgcaggctgctaagcggctccgggagctgatttggatagaggctgttgagcagggctgaagttggctaatgccgtgtgctgttggctttcaacaattccggtaacctagatatgagtcctaatgctttcgtctgcataagaacaatccgaaattctgggccaggtgtggtg

SEQ ID NO: 33919 - DNA, 2300 bp, Homo sapien
aaattctctctctctctctttccctccctctctaggaaccttgggaaaagatatcagttctaaattcataacatccagacaaggttctgtctctttctctctatagttttacaggagaatgggattgtttactaaatggtttgcgataaaaatctctcctccccaaaaaggaagacagaaaagagaaacttggagcctagtggcaggagggcaccagaagagtgattcagtatcaattatagtgtatggggtcaccaaaaggcaattcaattaaaaaacaaatactagaaccaagtatgaatttgcagctattaataggaacttgtcctctataataagcatgaaaaaaaagggggagaacaaacataatttatgccaaagaaacttctggtgctcttcttacttgtttgtgtaagtagaagtctggttctgccaacataaaagtaagtgagacccaggttatgtcatttctatctacagaaaaagaaaccttatactggaggtaacagaagggagcctgaaaactcacccagatctcagtatctgttcttcagattgcagaaccccagtctgggctacttaggtacctttgccatctgggtcctcatacctctagcctatctgttgccaatgtaagttgaaagactatatgtttgtgtgttcggtgttttagatatattaattcctttaatctcctaccaccttagtatgtgagtagtattatccaaggtgacagcgagtagatggtaaagctagattataattatgatctgattctaaggccaatacttcaccagaaggctctatcttgaagtctgacacgtttgagattagttaaaactagactaccaattttggttttttctttgttttttgagacagagtctcactatcacccaggcaggagtgcagtggcgatatcttggctcactgcaacctctgcctcctgggtttaagggattctcctgcctcagccttcggagtagctgggactacaggcgtaagccaccacacccggctaatttttgtatttttagtagagatggggtttcaccatgttggccagcctggtctcgaactcctgaccgcaggtgatccgcctgcctcgtcctcccaaagtgttgggattacaggcgtgagccaacgcgcccagcctagactagcaatttctcaaagggtggtctgcagactcctgcatcagaatcactggcagtgtgtgttaaaaattcagatttcctgacggtgtccatgaccgaaggaatcaacaccttcggccgggcgtggtggctcacgcctgtaatcccagcactttgggaggccgaggtgggcggaacacctgaggtcaggagttcgagaccagcctggccaacatggtgaaactccatctctactaaaaatacaaaaattagccaggcgtggtggcggtcgtctgtaatcccagctactcgggaggctgaggcaggagaatcccttgaacctgggaggcggaggttgcagtgagccgagatagtgccactgcacaccagcctggacggcagagcaagactccatctcaaaaaaaaaaaaagcacctccaagtgattctgttgcaggggatctgtggatgatgcagattttttttttgtttttaattttttatagagaaagggtctccctatgttccccagactagtctcgaactcccgggctcaagcgatcctcccacttcggcctcccaaagtgccgggattactggcatgaaccaccacacctggcccagaatttcggattgttcttatgcagacgaaagcattaggactcatatctaggttaccggaattgttgaaagccaacagcacacggcattagccaacttcagccctgctcaacagcctctatccaaatcagctcccggagccgcttagcagcctgcagccgctgaacagaactgagcacgcgcaatatttaatccccacgggcgctgggtggggctccctaggaccccgccccctaccaacctgcggagccagggggcggggctctccaaagtaattccggcttctcccggcagcggcccaaatccccgcccccagctctcggaccaatcaaacggcagattgctgaaacaaaggaccaatgcccagggcggtccttaattcctccctgcagtttgaaactgtcaggttgccgtctaggtagcggttgtgcttgctgaggctgcacttgctgacactgcagctgcgacgcggctaagaggcgcagagcgaggagtcgggatttggtcgcgagcggcgacggtgggtagcagcgctccgggcaga

SEQ ID NO: 33920 - DNA, 2300 bp, Homo sapien
gttctcaaaaaggtaaccgtttgagaactcagtgaattgccagcacattttgcagttggaagctcaaatttttataaataacatgcggggaatccagataggatttattttttaatttcacaattgtatttccaatgctggattcataggcacttccttgtcatagtagcagcacattaattttagcctaaataattatttaaattatttaactatttaaattatttaactatttaaataattattttactaagaagaatccacgaaatgaaaatgagcacgttcactaattttcatattgcctgaccatctcatagcaccatggtcacagactgcaaagcctctcaccggaacaagacagaccagcaaggaagtgtaggttcaacagcacatgagaatcataacttttagtgccagagtgtctgaaccagagaggagggaaaatgagaggccaagagttgtctccattttcttctcttcacagtatcctgcatagtggcacaaatcgaactggaaagcccaagctaacaacaccgccctgggcgaaccgcctgtctccaccggctcctctgggcaggaggctccagcctgggggtgcctgacagctctccttccccggcgcctgtattatacatgtaacatttatatttctatccacacagcgttcattcagccatccattcaatcacccaggcatatttacacggatggaacacattcgcggagagatgtgtgtgtttgagttccaatcactgcagcccgtattggcgcggcgctttgtctcgctttgggtcaccaccacaggagcaacgatttcggggacggcacacgcctgtgtgaccgcttcccactccacttgggttccgtgagcgcgcggagccggaggagtcagggacgtgaggatgccctacttcccgcagcatccggatggcagggtctgcgtcggaaggcccgggagggcgacgccctccactgctgccgcggggtgggtgcgccaggcctgggtgtggcctcacgggagcgagtttctctccagccgcctggcccaccgctttggaacagtgaagctcgagttggggtctcctgcacgccaaggggagaaatgtttgtttctgacaacacaagcaaaattctctctcctgcacgccaaggggagaaatgtttgtttctaacaacacaagcaaaattctctctctctctccctctctctctctcttctctcctctctctttctccctcctcctcctttctttctttctctttttctttctttctttctttcttcctcctcctcctctctctctctctatctctctctccaccccccccccctcatatttggttgtttcccctctaaggggccactttcaatatctgcctgtgagcccagctgtctggccctatgtagcattggggagacagtagacttaacccagcgaagttttcttctgtttgctcttgctgtgcccaagtttcctctggacttgtcttccagcgtcggggtgggggctgggggaagtaggcaacctagctctgcctggttgctccctggaagccaagtcgaagtgaacaagtcagtcccaggcccggaaatagaatacaaaccctctttttgtccggtgctaacagagtccagcagtcagaactccctcgcgtctcacgctggacctgacccggggcgccgccaagtgcgcaacgcacagtcacagttggtgactaattaaggactgccgcccctctccttcacctgctacaaactcagagccctgacttctccagaagtacctaccacttggaggtggctctccttccccgccccctgccccagtcccacaccgcagcagcgcctcagcaccgcgacttgccggagcaccgcgagtggcgcgcgggtcccgcctcccccgcgcgccgtgactccctgcgcaccgctggtactctcgccacgccgccgcccggcactgcagcaccagggggaggaggcaggcggaggagaggaggaggaccgcagcgtgcaagccgggagccactttcccgcccctcctctcgccgctgacacgctcagaggagtcaccactccgcgcgctgcaggcgagagtggcagacggaggcagcccggggaagcgagccggagcggcgcccgcactgaggcggctgcagtgctgacaccactcagggcaagggtgtccgacggctggagcggtgagtgggggaggtgaagcgggcatccgcggggagactttcccccgctgctggatttctcttcccgactggtggccgggcgctgcagcctggggaagttt

SEQ ID NO: 33921 - DNA, 2300 bp, Homo sapien
catagctccaatccagtccaaccaatccagctccaacccaaccttgtgctccacctcattgtttctttcccttggatgctctccatccagcttttaccacacttccacttcaagccacactttcaaaccctgtcaccttcctggaccattttagttcagagtgattttttcacccacctctaaatatatagactactcatttatttgggctctaagtcatacactcatacgaaaattgttatgtgtaaatacttaattgttaacacttgacaaatgcaacaacagaaatggaatgaactttagacatcatttaattcagcatctcctgacatgcacgaaaatccccttccacatttctcctttgggtgaatatcaattgacagggtgccgagcctcaaatgtggccatttcgcctctgaattgttcttagactgagaggcatctgctttttaagaaaggaaaactccattcatcccattccaaacaggtgagaatctaatgccatcagggaaaaaaaaaaaatattttgctatcccgtctgaattgagagttccctgtgtacagtttacgtccctgtgagcatctaccactcacagagccaccctaagcacgctctgcagtgtcagcatcacctggcagtatgctagaaattagaaatgcaaattcatgagcaccagcccagacccattgagtcggaaattctgagggtggggcccaagaatgtgagtttcaacaagtttgagaaggactgcgtctcctatatgaaatggaaaacagctgctcatcctctgtatccttgcataataaaaaatgattagtgtcactatgccaccatttcctcagcgaaataatttccatccccccaccgcctccgagggtcttgcactctcacccaggctggagtgcactggtgcaatcacaacccacagcagccttgtcctctcgggctcaagcaatcctcccacctcagcttcctgagtagcttgggactgcaggcgcaaccaccacgcccggctaatacggctaatattattttttcattttttggagagacggggtctcgctatgttgcccaggctggtctggaactcttgggctcaagggatccttgtgcctcggcttcacaaagtgctgggattacaggcgtgagccgccgcgcccggctctaaataatttcttatcgccctccctcagtttgtttttcctgttatcgggtcacccacacattccacaattgtcaaataggtgagggcacaggtacggaagcgtcccgcattccctccagattttatcacgctgagacacaaagagaaaaatagctcctggcgaccgcatgaaaaccccgatttcaaaacagccacatgcagtttaatttccttaaaagcttagccggaaaaggtttctgtggcttgcgaccccagctgggcttgagagaaggctctgcacactggggcgggggcgggcacaaggtgatcggagggagggggatgactcgcagttgtgttttgagtggttgccttgggttatcttgttcctccagcacacacacactcagtttcttgtcataaggggaaccctgttattttgtagacaaaaagtgacagaagcaactttcgaagcaaaaaaaaaaaaaaaacaaaaaaaaacaaaaccaaaaagacgaagaagaagaacaaaagtcaacgtgaaatctccccagaggaaaaggaaccgcgctgtttgtccctcagtaactgagcaacaccccggacacgaagggctccctgtgacttctgcggtttttcttgcacttctccgcgttggttcacttccaccctcgaaactctccagaagcgagaaataaggcggggtggccgccacccccaggccaccagctgtgcgggggccccagctgcagggggtcccggcccagcgtccctctcggccccttccctctcccccgggggagaaggggcgggtccacgcggcctgggcgctgcgcccgacacgcggtaggggtcgctgcgtctcggcgcgcgctcccaccgcggtgaataacggggcctggctggaggagaaaggaaacctgctgcgggaggcggcggcgaccggccagggagcgagggaggagagttcacttttacttcagtgtcagcgcgcggcggccgtggctggctctggcgagagagcaccgagggagtgggtcgcagatcttcgggcggctaggggaaatcggcgagaggcgggatccgagcgcgccggcggggcgcagagcccgcgagcctggccagcgagggtagccgcggggggcgcgccccggg

SEQ ID NO: 33922 - DNA, 2300 bp, Homo sapien
gacttgtcagcaacagtgggtgagtgttgctaaaatcattgatctctcctccaccttccagctttgacttttctaactcatttgctccaagctcgcggatagagtgggcagatacttctctcacagtttattatgttttattttagtgtgtttgggtaaggtcttaggtctggtcttctaatgctgtatttaacttaggaatactaagatcactcttgaaataaaacatatgactttgttaattaattgcatttgcaaagttttcttctttttctttgctgtttcctgtgagtgctgggccaaaagtcaaggccagttttggttcttgttttttaaacatattctcactttaagcccctactataaaacaggatccaggtgtgctaccctatatacggtaccatggatgtaccactgttacactgatccctggacactttcattttgtccttttcaagttgtgcacaaatctaaatttctttcgagacggcacagcttccctgttgcctctgcatttcctttcagtgaagcatttaaagtctctgcggtgagacggcttgctcacaccccacttagctcttttctgatacttggcttgggagtttatggttcttgccagacgttagtcaagacgcaagctctaatttgagcagatgttcaacatcatcaggtgggggttgggggaccaccactgctcctagtgtcccgctacagagctcagtcccccaggcttctgcccttctccacaacctccgtcttaatgctctgaatctcctttagcagtggtttggttgctacagcaactgccacccaagaagtaggactcctttcttttggtaggcaaaacaaagactcacgtcccatctttgctttctaactttttccccaattcttggcaatacccatgcttcagttctgctttggttatttctgtatgtgctgcttacacaaatgaaggtatgttagttctcagtgctgaaagattgtagggttgacattgattaacagggggaaaatgccagttttgttcttggctatcaagtacagcctttgctttagttggttactggggggaaaaaaagcaagtaacatttgcataacttagaaaatagtcttttgtaagtagatattatttttaagcaaaaatctcatttgattgctgtggcttttatctatcaaggtaacagcactactaagttattctccctaggacatttcacacagccactataacacttctgttaagtatcttgtcataaaggacatataccataaccagaaaaggtatttcagacactaatatttcctttctggaatttgggaactttaatacagagtatttaatttatctgtgtcttggttttatttttttcttttgtcagaatgagttcctgaagtattgagtttgatatcatgtttaggcaattcttcaaaatctaaaatttctaaaatacaccattgtaaccaggcaggaattgctcagtatagtaattaagtcatctgaggagctgagaatttttcatggacgttttgaaggtgcattactcttgcctccccaccttattcttgccacatgctctgagatctaattccatatctgagttgtgatgtgggtgaggtaagcagctaatggaaaatgagaaatatagaaggtgaatttaatggagaagctagctgctgaatgcatttcctcaggctctgttgatttcttactgaaaagtttacttttcccagtagaaccataaaggagcattattttaaccttatagcctacatcaggaagttttcttctttgagtttttgctctttaaatttggtaggtacaattctgtgtaggttacctcatctgctgcctcaaatacatgaactctaaaagaacgcccactctcttgtggactagaatgttatagtaacatgtgttgatgtaaagaagtggaccgtgggctgagtgaagctcagcaatctttcttcaaataggatttcccttttatttataaacagaggaagtgatgcatatgttcccagagggcttctgggtaatctttcagctcctatgatgtcattcactatgacctcagcagcttgtattcttagaaacgcagcagacagcaactttagcaggtgatttcaatcaagtcagctgaaatgcactcacttccaggtgatcggccttggttctgttaagaccatttttggatggggtgttttaaaggtatttagaacagcttacccaaggggggtgaccagagaatggcactaaatattccatgcactccagtttataaatcctatagggtaaa

SEQ ID NO: 33923 - DNA, 2300 bp, Homo sapien
aggattcccttcatcaatagcttcattgatgtaccctacagctacaactcctagaaaatgaagaagtagttttccttttaagtcacagtacattataacttctttagtatcaccgattgcaaaaggctaattaactagtacagcaaggctataggatgcaagatgcaagcacaaaaccaattatgtgtctatacgctcataataagcaatctgaaaataaaattaagaacacattcaattcataagactgcaactacaaatacattataattataaataaatatttagacataatttaatgaaagaaacataagacatgtacactgaaaactatacaacaccatgggaaaaaacttaaagacaaataaatgaaaagagccaatgttcatgaattggaagatttagtattgttaagatggaaatacttcttaaattgacctacagattcaatgcaacttctatcaaggtcccagctgctggtttttatttttattttttttttttgagagattcttgctctgtcccccaggctggagtgctgtggcatgatcttggctcactgccacctccgcctcctgtgttcaagtgattcttgtgcctcagcctcctgagtagctctctacattctgaccaacacttgttattgtctttttcattacagccatcctagtgggtgtgaagtggtatcatactgtggtttggatttgtatttttctagtgactaatgattttgagcatcttttcatgtgtttattttccctttgtacatcatctttaaagaaatgaagtgtctattcaagtcccagctacttgggaggctgaggtaggagaatcacttgaatccaggaggcagaggttgcagtgagccaagattgcaccactgcactctagcctgggtgacagagtaagactctgttccccccaccaaaaaaaaaaaaaaaaaaaaaaaaaaaaatatatatatatatatatatatatatatatatatatatagagagagagagagagagagagagagaaagagagaacaagactgactatagggttcacaaatgaaaagcacagaagtcaaactatgaaacctgcttttacaattctaatgaaacggatctatctggaggttacttctcaataccttattattaaaaaataaactatcatccattcataaaaaaatgcatttagatagacatgcacacacagacacacacacacacacacacacacatatatatataaaacacacatatacacacactgccaaggagcttttgcttcctaggttagtactgatggataagaactgttaaagaaactagatattaatgaacaataagcttagaatataagcatttttaaggtcaaacttcatatttctcattttttccattagatttaatctaaaatgatcacccgtcacttcacaactgtgatatgccatgaaatagaatgagtacttctcatttttaaaaaaagtatctccagcttgacattcaagtaaagataaaatatttagctaaatatttcttgaatagatgagcccataaccaccacttcgttaagaatgaaaagatttacctgtaagaagaatgaaaccatctaaaactcctagaaatcattccagactataatacttaaatatgtttgaagaaaaagcagaagtatttctctaatgtgcaggttatattatctgtaaacattgacagaactctggaaagtctaagtattatctatatacaaggtactgtcgttttaccctataggatttataaactggagtgcatggaatatttagtgccattctctggtcaccccccttgggtaagctgttctaaatacctttaaaacaccccatccaaaaatggtcttaacagaaccaaggccgatcacctggaagtgagtgcatttcagctgacttgattgaaatcacctgctaaagttgctgtctgctgcgtttctaagaatacaagctgctgaggtcatagtgaatgacatcataggagctgaaagattacccagaagccctctgggaacatatgcatcacttcctctgtttataaataaaagggaaatcctatttgaagaaagattgctgagcttcactcagcccacggtccacttctttacatcaacacatgttactataacattctagtccacaagagagtgggcgttcttttagagttcatgtatttgaggcagcagatgaggtaacctacacagaattgtacctaccaaatttaaagagcaaaaactcaaagaagaaaacttcctgatgtaggctataaggttaaaataat

SEQ ID NO: 33924 - DNA, 2300 bp, Homo sapien
aagaatggatgggggaggctcaaacaggaagccgggtggaaaggggaagactagaggaggaaaaaaagagacagggaagcaggagctaatttttctctgtttacaagatctaagagaacccaacactccccagctataacctaaaaactaagctctatgagttcatttatgtgtctcagttcttttgaagggtatttgccttccttcataacttatcactgtagaagatacaccacacagatttctacccagatgagaaggcagtaacaatcttacttcaaagcttaaagtattagtcttataggccaaactgaagagagaaattacaaatcagatgaatttaagtcaacggtttaaattatgaaacattgaactaacgattactagagttaaatgtaaaaccaaaagtaaaagctgaatcttatcaatgtaaagtctgctttttcttatttattttatttttgagatggagtgttgctctgtcacccaggcttgctcactgcaacctccgcctctcagggtcaagctattctcctgcctcagcctcccaagtagctgggataacaggcgcccgccaccacgctcagctaatttttgcatttttagtagagatggggtttcaccatgttggtcaggctggtctcaaactcctgacctcaagtgatccccccacctcagccttacaaagtgctgggattacaggcatgagccactgtgcccagccaagtctgctttttcagttgttcaccagaagactgaaaataatagtatatttatgggacggccacacctccacttcagttaaacagccaggttcaacataagagttacaaatgaattaaatgaccagaaactaggccatgtgcaaatcaagtcataaattcctgaatttagataactcccagaaaagttctaatgaaacaaaaaaaacctttgtcaatattttaggttttatatttctgcaatataataacattctatctcagtttgtataaccatatattatgtagttgaagtattaaacactgacctttgtaaaaatcttggtctaatgtaatttaatcaagatgtgaaaggtttccgcagatcaatttcttcctagcatatccctagcctttaagtctcatgtgaaatttgtattttctgattcttgctgcattttgtaaagagcaggctgtgggatggtcaggcttcaagtttaagttttattaactacagaaaaatgtgttataatgcatttttttactgtatattaagtcatactctacagaatataacaattcataaaagcttatatgttgtacaacaatgtgaatgtatttaacattactgaactgtacacttaatactggttaagatagtaaattttatgttacgtatattttaccactattaaaaatatcttattgtagacttattcaccaacactcatggaataaagggagtcctcattttcatgatgtgctatgattttagtttaactgaacagcgttgtttgggaggttcctccagttatctgaccctaagggttattgaatggctcaaaacacatcaagataaggcaaaaaaaaaaaaaaaagcctgaacaaacgccatcctcacccggcgaagaaaaaccaccaccactcaaaagccaggttctggccaggcactgacgacaaactgaaatcaatattacattgatggaaaattttcaaagtgattcaccgctcaatttgaatttcttaaaagtttgttttccatgattaatttataattatgtaaagtgtttaaggattaagatttgaaatagctgggaagataaaggaaaggataatttattaagtagaaattacactctggaactgcatttttaaaacggataagaaatgaaatgtgggacagattcaaaacttactgctgttcaacatctgtttttggcttagttctgtaaaggcctgtgtaatttctgccattctttaaaagcaaatctactaggggagaattacagcacctattcagaatagattgttgggggtgggtaagagttaaatgcctttctccagggataacgtaacacgttcagaggcttggcctgagtcatgcttactgaagcatcgagtggattacatcctttccctgcggaggaccagggcaagtttcctgcctgcacggcacaggagagcaaacttctacagacagaccaaggcttccatttgctgctgacacatggaactgaggtgaaattgtgctccatgattttacagatttcataacgtttaagagacgggactcaggtcatcaaaatgaaagccctcatc

SEQ ID NO: 33925 - DNA, 2300 bp, Homo sapien
ctcgggaggctgaggcaggagaatcgcttgaacccaggagacggaggttgctgtgagccgagtccgcgccattgcactccagcctgggcaacaagagtgaaactccgcctcaggaaaaaaaagaaagaaagaaaataagaaagacagagagagagagagaggaaggaaggaagagaggaaggaaggaaggaagagagggagggaggaaggaaggaaggaaggaaggaaggaaggaaggaaggaaggaggggaaacttagtggtcagatggcaactaggggaggggaggcagaaggtaatttatttttcatttcatatccttcaactatcagaaattttgtcatatgtgtttatattttccactgtgtttcattgattctaaaatgccttttcttcataaccctgaaattggagtgtttcttacaatcattggtatgtcacatttttttctggcttgtggtaatgggttaaaatgataaattgtaaaatcaatgacgtcttaggaataatgaaaaatagtttaatagtgaatgaagaactatgtaattttaactgttcacatttactcttgggtatgtttccagaggataactgaacggggatagattttaaaaagctttatttaactgggtacttccgcaatttagtgatcaacttctgtgtacaacaaggtactgtcctttgaggatgatgggagaatacagggaagaacgaaatcgcctctgatcgtactttctccacggatgtaagtgtccgggctctagtgggggaatgatactcttcgtgcgaaattcacttttaaaaaaggcttagaaaactgaccaccggctctcagctgcagcttatcaaccacagaactccgaatatgcccgcacatcagtgcgctgggttaagaggagaaggggctgcggctgagctttcctagaaacagctatttggggacccatttcctgttggagtctgaaaggcgcacgcaccagagccagtggcaaagcaacttaagctgcaggctcctcctgcccacccccagccgcgacgcccctgggggcccttagcagactgccaagcgagtgtccccgccctgtgccttgaatttagccaaactcctttaatatcaggcctggcgcggtgattcacgcctgtaatccccgcactttaggaggctgaggcaggaggatcgcttgaggccagcagtgaaattagccggacatggtggcgcgcgcctttctgtggtcccaggtaatccggaggctggggcgaaagggtggcctgagccagggagatcgaggctgcagtgagccgtgttggcgccactgcactccagcctgggcgacagggcaagaccctgcctcaaaaacaaaacaaactgtaatatcgttcaagaacgtgtgaaggacacttggaaagttaccaggccatttctctcctgggcgcccgcggccctagaacgccggcctcaccggcagacgcgcgccctcctcccagatgcgcaggtgaccccggcgggcggcgcgggaaagggaagagctccgcgaggccgcgcgggggggaagcgggagaagccgctcttcctattccactcgcagtctgcgtgtgggggaaacgagtgcccggcgtatgaaacgcctaacttcgcgaaataaagagagacgtataaaagttcaagaattctgtccagactcaagggccctttctcatttaggggcaaccctgtcactacatcataaacttttaaatccgtgatccccacgttacaaaagcagaagtcccttttagacttttagcgaaaactgaactttgccggtgtcccacacggagggagggaggacgggaggccacgccagggctgcggggctgcagggcgtggacgcatcctggccggggcgtccactgtcgacgtctccacatcccaggagggtcgagacggccgcgggaagcagcctgcgagccgtgcggccccattccaaggaccccgccagtgtgagtcactgacagcttcgcgaatcaacggtgcccagaggaaaaaacttctcatttggacttctaggcccggcagtggccggcggccagggccccccagtagggcagggcggggcggggcggggcgcacagagccagaggggcttgcgagcggcggctgagggaccgcggggagggggcgccgagcggctccagcgcagagactctcactgcacgccggagggcgcccttcctcgctcgcgcccgcgcgaccgcgcgccccagtcccgccccgccccgctaaccgccccagacacagcgctcgccgagggtcgcttggac

SEQ ID NO: 33926 - DNA, 2300 bp, Homo sapien
ggtgcttactatataccagaaacggtactaagaagtgctttatggacatttagcaaagtgaatcctcacaaccaccctacgagagaggtactagtatcattcccagatgatagatgtaatattaataagctacagatgaggaaatggatgcttgaaaagtttgaagggacatcttaggaatcagttatctcccctggggagggaccttcaggaatggcctgatccctatcaggagagctgtccgctgttcaggatgtcaaaggttcctgttctgcttctagaagtcagcttttcctgggaggaaaagtgggcatgggctgaggtgagagctggggtgcaggtggagtatgaagactcctcagagaaaggaaataaacaaaaaatatttattgagcttctaccatgtatcaaacccagtcactagtcactattttatcctcagacagacacctataaacctttaaaccacgtgtgtgtgtatatatatatatattataagaaagcttagagaggataagtaaacttgggatcacacagatgtcaacaaggggagaagcctgtccgggtgtggtggctcattcctgtaatcccagcactttgggaggctgagtggggaggatcacatgaagccaggagttccagaccagactggacaagatagggagaccccacttctattttctaatagaaattaaaataaaaaataaagaaaatttctttatacattgagctgaaattaaaccccactgtggcttccaccaatttttgctctctggagcaactcaaaacacatctaaatcctcttctacaagcgaatcctttaaatatttgaaaatacctatgtctctcttctgtgctcttctggtaccaatagtttaaatgggtaacagtagactttgttttattcaatcttttaaaaagcaaataaaaagtaagacatgctgggtgcggtggctcacgcctgtaatcgcagcactttgggaggcggaggtgggctgatcacgaggtcaggagttcgagactagccagaccaacatggtgaaaccccgcctctactaaaaatacaaaaattagccagatgtggtgcacgcctgtaactccagctactcgggaggctgcggccagagaattgcttgaacccaggagacaaagtttgcagtgagccgagatcacgccactgcactccagcctgggagacagagcgagactccgtctcaaaaacaaaaagtaagacattaccaatatgatgccaaccctcatgcactcatccccaaccccacacttctcttctcccaccccttctatctgcttttgtatttatttagcctatgggatcccaatgcagaggagccctggtggacgcatttatagtgcagcgatgaatagaagacagtgatagtcttatactggagttgaaatgtgataaacatttatacactgtgtttataagtcgtgtaactctggccaatttatctggtctttctaagctcactttcctcgtctgtaaaatgggaagaataatcatacttattgcgctggttgttatggggattaagcaagataattctctaaagctttggcacttggcgctgaaagtagccattccatgtcttctttcccgccccgcctcttgtgctccccaccgctttcgtgatgtccgcagttgcccacctgcctctacaataaaaaacgcatccctcctcctgcagggtccaccgcaccgggaagccctgtctgtatcagttaccaaccacaattgcagtgagtacgaatcgtggctttcccacagtcaggaaaggcaagggagaccgacgacccgcttctctaggagtaagtaaagattaaaggtagttcgcggtatagcctaggcagggattaacccgtggtcccagcgctcctgctatttgcattccaaagcagacacctcatgcgctcaaccccgcccgcaggcggctcccgcagtctaagggacctggcgcgagtccgggaagcggagggcgcagctgcgcagggaagggggccgggggcgggaccagggcgcgcgttccggtcccggggcgtggcctcccgcaggtgagtacgctgctccttcggtttccctgaaacctaacccgccctggggaggcgcgcagcagaggctccgattcggggcaggtgagaggctgactttctctcggtgcgtccagtggagctctgagtttcgaatcggcggcggcggattccccgcgcgcccggcgtcggggcttccaggaggatgcggagccccagcgcggcgtggctgctgggggccgccatcctgc

SEQ ID NO: 33927 - DNA, 2300 bp, Homo sapien
aagactagtaattaattaattaattaattaatgcttttatagagacagggtctggctctgtcacctaggctggagagtagtggttgcaatcacagctcactgcagcctcaaactcctgggctgaagtgatactctcaaccccagcctcctgagtagctggaaccacaggtgtgcaccaccatgcccagctaatttttaaaaaaaaatttgtagagatggtgtctccctatgttgcccaggctgtgttgaactcttgggctcaagtgatcctcccacctctgcctcccaaagtgctgggattacaggcttgaggcacagcacccagtcaagaggtttttgggttttgtttgttttttgagacggagtctcactcttgcccaggctggagtgcagtggaacaatcttggctcactgcaacctctgcctcccggattcaaacaattctcctgcctcagcctcccgagtagctgggattacaggcgcacaccaccatacctggccaagagtagttattttggaaagagagacgtttcaatcttcagaacatatctttggccgggtgcggtggctggtgcctgtaatcccagcactctgggaagccaggctgggaggatcacttgagcccaggagttcaagactagactgggcaagcaacatggtgaaaccccatctctacaaaaaaatacaagtattagccaggttgtggtggcataccctgcagtcctagctatttgggaggctgaagtgggaggatcacttgagcctgggaggttgaggttgcagagagctgtgattgtgtctctgtactctaccctaggcaatggagcaagactctgtctccaaaaaaaaaaaaaaaaaatttatctttgaattctttctttcaatatattgttatctgtatttctgtactgagtgctgtgcttcttgacctgtctctgcccttttctgtgtatttatttatttaattgacaagtaaaaattgtatatattatggtatacaaatacagcttgatgttttaatttatgtatacattgtggaattattaagtcaagctatttgacttaattgccccatatacttgtcattttttgggggtgataaagacacttaacatctactgtcttagcaattttcgatacacgatatattgttattaactatagatagcatgctgtacaatgggagctcttaaacttattcctcctgggccaggcgcagtgtctcacgcctataatcccagcacattgggaggccaaggtgggcggatcacttgaggtcaggaattcaagaccagcctcaccaacatggtgaaaccccatctctactgaaaatacaaaaattagccaggcttagtggtgggcgcttgtaatctcagctacttgggaggctgaggcagaagcttgaaccagggaggtggaggttgcagtgagctgagatgatgccactgcactccagcctgggtgacagagcaagactctgtctcaaaaaaaaaaaagaaaaaaagaaatgctgtgaggaattattagccatgaagcttcagcaggcaggttaggtagcttttccagtcacatactggtgaagtaaggatttgaaccccaagactctggtgccagagtaattgctcttcaccatgaggaggcaccagtgggggagtgttggatcacaagcagtttctttttcttttttttttgtttttttgagacggaatctggctctgtcacctagtctggagggcagcggcgagctcagctcactacaacctctgcctctcaggttcaagcgttctcctgcttcagcctcacgagtagctggaattacaggcgcccgccaccatgcctggctaatttttatatttttagtagagatggggtttcgccacgttgaccaggctggtctcaaactcctgaccgcaagtgatccacccacctcagcctctcaaagtgctgggattagaggcatgagccactgcacccagcgcaatttcgttagagacttggtgccttcccatttcttttactcagcaatataccagctttaggtcctaaattaaacctcttcctgctttcccacctgatgaagaaacgtgcctgcagtgtggtgagtctggaccacgcagactcagaacagcactactcacagcagggcctcttgctcgctctagctgctgggaggaaaacggcttgctaatctccacgcccagaaattcagacaagagcattctccttatctcatctgcacaggaagcaggtctaaggtaaaagattatttttgtggaagattcttgcttttcagtctagtg

SEQ ID NO: 33928 - DNA, 2300 bp, Homo sapien
gcttgaacaaacaactttcaaatattaagctaattgtttgaatgaccaaagcagtccatgaaaataatttatccttagtcttcacacataggcctacttattgcccagaaaatttttcttcggcctaatccaaattactcttccatttctctcacctatttttaatactttctctcagagagaatggctacctggcttctccttgtcttccaatttaatcttcttagtttttctcgatagcttgtagtttccatcttttaattaccattaatttttttttttttagaaaaggtagtttccactggcttagtagatatttaccaaactggtgaaaactacacattaatttatccacctagaatttggtgggaatgaggtccatcttgtactataatttgtggattaagtaaaatcagatgctatgctatgatgtttgtaaaatcagtcactatgttagtgctcattcatcccagctcttgctgtgtgtggttcctgaggagtgggcatcatgacagcagggtgggaacatcactgttgtctgtgcacgtgcatgcgtgcatgtgtgtgtgcacatgtgcacatgtgcatatgcttgtaaaggggctggctggagaagaatgtctccttggtgatgctaacaaagcaacattgagctggagtgacatcaggtgccagaccccctaagaggtaaaggcagaggtctccaaggtgggtgctggactgaattctgggaacaggccaagggctgtggctacatcaatgggaaagagaagagggcctgtggcatgcctggtgagtgggcctaaggctccctctaggcacaaaaagggtgggagatagagctgaagatggcctggcatgtttgaggccagcaagttggggttaagttgtttgtttttctcctcttttattcctcccaggtttctttataaccttttcaaaattcaggcatctaaacagcccttgggatgagaaggacatggtggccagtgtccatgagctttaggtactcttttccctctcactgtctgtggtctgaggactgcttacaaagttggactgtggcacgaaggcctcctgattaaaccaacaaagaggccgcctctccagagctcagaattgtcctgacatgaaaataatcaagttctgacactgccaggataattactgtttaatttcgagtattttaaaactgaaaatatagccattccttcctttataactctgtattatggtctatttgtaataattgtaataacaatgcttggtgcagagactggaaaggggtaggaaagccaatagtggagcatcctcatgtttcccacagttttggacacaaagaagaaattctcttctctcctgataagcagagataagcttatacttatttccggatccctaagtcatctttttagccctgcaaatttgctggtgagcagttacaataaagcttcctggcagttccttctaccagagtgttaaagtaatccaggtatttgaaggcacgaaatggaatgacttaatctcatctctcagtggttcagatggatgcgaaggtcatggctacagctacctggtctaggagtgtgtacatcatgtaaacatccaggtcaagtgacagagctcagctaaaatccagaagtcccctgacaccagagttagttttccatgaaagaaatgcctataagaaactggaccaggataaagcaaagagtaaggggcaggaagaaagcttataattgcattactgcaatcttctgcaaaatcagacttctgcttctgttccacctctttaaagctgaaaatgcctcaagtttcttactgagagacatgagaaattccatgaatactaaattctttgacaatttctagcatggtttcatccaaggttatgtgatgaggctgcataatataggctctatatgtttgggtattttatgcgtgtatgtaactttgtcactttgatttgcaaaatggaaaattccctgaatgcccacagaaaagtataatgtagcatttagcaggtcaacaaaatgcactcccttattctttgtctccgcctcattctccaacactttagtgcactaagttgtagtgactgaaatcattcttggtgaataatgctgggccacgctgaaaatttgtggctgagagctggaccctcgtcatcgccacgtactctgtcaatgagacagggtaacccatggttactgagctccgatcagttaaggggcagagagcctccgctccccactgctctataaaagagacccagcaaagggaccctaccagcttctagc

SEQ ID NO: 33929 - DNA, 2300 bp, Homo sapien
acaccaagccacacaaggcaatgtggagaagcaccaaggtccaaaggaggcagaaggagtgggaggaaacatggcaaaaaacattatgtgatttttgcaggaaggaatggacaaatcaggataagcaggtttagtttgcataatttcagtgggatctgagatgtaggagttgttcctagttgtctggtactttgccctggagtgattagggcaggggaatattggcatggagtgtaacagcctgataaagaaggtagatgatcagtgtgtggcatgctgggtgagttgtttgctatgtctaggaattagctaacccttggaggggttatctccctggtcagggagaccccagatgccagagcatcaagaatacaaaaaataagaaaatatagttaatggaagtggccactgatctaagacaccaaacaggattctcttgttcagctgtgttcagcatttacggatactgctctgcgacaggcactgtgctgggccctgagagaggagcatctgcatgacacagctgctgacctccacaaatctcaggcccaggactctgagctcatgatctaattctaaatgactttggcaaaggaaggaagtgtgttccaaagaaggccacatcagtttaaatattggcaaaccaatgccagggtcatgcagacaaaagaccaaataaatgcaccaaaccagagcatttttctccccttttccacagaatattgtctctctcttattttcccaccagggatgctcctttttgcgactcagacctaatgtacttgctctattttcccggggggtctaaactcaggaaccagaagaatgactaaatgagaaataaaagtaaaattctgagcccctgaactgactgaatagacccattgttcactacatagaaagccagtcattgagacaaggagtattgccagggaagaaggttctatttgggtgctgcagccaaggagaataggaaatcagtctcaaatccatctcctcaaccaactaaaattagaggtttatatggcaagggagaaatgtgactacatgtgagaaaacaggaattagtgagcggtaaggatgaggacttgttcaacaggcagcaggtggctggttaggcaatcatgatgggtgaggggtatggtgcctcattgtccagatgcagtgatctggtaagtttcaattccttgatactatctgggaggcctcatggttggtttcccaagaaaggaactcagataagaaagatgtaactttctgaagttttaagactgggagggtaaatttccaggtttattcaaaagaaaccataaacatcagttctataggacagttgggctgatttcacaccaaccagcattccttcctgataagagaccaccaaccacagagaagttctggccaatctaccagggactcacagcgagggttttcatgtcctctgctttgccatttgacatcagagggctgaaaacttcacactgggatcatgctaacaccaccattttttgaatatgggtcccatagagaggcaggaagcttaattgtgcatgtgcatatttctcctttcataaatattcatgaatcctcctacagctcattgaatatatttggccaccctgctcagcataaatttctgttccctttgtccttccttccaagtgtctgttctcagcttctgaccagaggctatgcttccaagcctgtcagaaaggccaccctgcaggctgtaacccttcatgagaaataaagcccttttctaaatttattaacctcctcattcttcagttgacataagtagagcatcatagtccccacaaatcatttctgggatactctgttcttatttgtaaaacaaggagataggaaatgcatgctatactaaaagtttgttcaaagaacatccgcacgtgcaaatgtctgagaccagaggctgcaagcctccctgtcgctcttagggcttcggtagccacattgccacagctctccacgccctcaggtaacgcccctccgcaggccgagacgtcggcacgtacactgtcaggtcttcccgctttccgtcgcttcctgttccgtcttggtcccgcctgccgctggcgccgttgtttccggctcaactggggagctgctggagctcttctggcctctggttttccgactgcttatccgacgctcctccctctgtctctgtagctggagaaggtagtttccaggaaagttttccggtttgcaggccgcgcacatcgggcaggggccatcctcggtccccttgctcgttgctcgcagccccgttcggctac

SEQ ID NO: 33930 - DNA, 2300 bp, Homo sapien
cccgggcggggcggctggccgggcggggggccgacccccccacctccctcccggacggggcggctggccgggcggggggccgacccccccacctccctcccggacggggcggctggccgggcagaggggctcctcacttcccagtaggggcggccgggcagaggcgcccctcacctcccagacggggcggctggccgggcggagggctgacccccccacctccctcccggacagggcggctggccgggcggggggctgacccccccacctccctcccggacggggcggctggctgggcagaggggctcctcacttcccagtaggggcggccgggcagaggcgcccctcacctcccagacggggcggctggccgggcggagggctgacccccccacctccctcccggacagggcggctggccgggcgggggtctgacccccccacctccctcccggacggggcggctggccgggcagaggggctcctcacttcccagtaggggcggccgggcagaggcgcccctcacctcccagacggggcggttggccgggcggagggctgacccccccacctccctcccggacggggcggctggccgggcggggggctgacccccccacctccctcccggacggcacggctggccaggcggggggctgacccccccccccccggatggcacggctggccgggcgggggggctgaccccccacctccctcccggatggggcggctggccgggcggggggctgatcccccccacctccctcccggacggggtggctgccgggcggagacgctcctcacttcccagatggggtggctgccgggcggagaggctcctcacttctcagagtgggcagctgccgggcggaggggctcctcacttctcagacggggtggttgccaggcagagggtctcctcacttctcagacggggcggccgggcagagacgctcgtcacctcccagacggggtctcggccgggcagaggcgctcctcacatcccagatggggcggcggggcagaggcgctccccacatctcagacaatgggcggccgggcagagacgctcctcacttcctagatgtgatggcggctgggaagagacgctcctcacttcctagatgggatggcggccgggcggagacgctcctcactttccagactgggcagccaggcagaggggctcctcacatcccagacgatgggcggccaggcagagacactcctcacttcccagacagggtggcggccgggcagaggctgcaatctcggcactttgggaggccagggcaggcggctgggaggtgtaggttgtagtgagccgagatcacgccactgcactccagcctgggcaccattgagcactcgacaagaacttttaagaaaaatcctgttggaattttgagaatttcctgaggattctaaaaggtacctgtgaggccaagagagtatcttcatctgttttctttatttttaaagatatttttgagcctcactttttgtaggtgaaggttatgtggaaggaagacagtaggggagataggagtaaataatttgaaatatacatatgtgcctcagtgcccataaataagccctcctttcttttcacttaatgactatctaatgttctgtactggcaaatagctttccctgcatatgttgttcagtaagtaataaatatacaagattggaaactgcttttttaagagtatatacagatagggaacttttttgctataattttataatgtaaaagctcctcatggtttttcagctccttgcccttgttcttgttctgggtgaatttgtattgctagaagtgtgtataatttatcacactgtgaatgtttagccagtctccaagctgaacttacgctgttatcaaagataggtatgtgaggtggatggatcatgaggtcaagagatcgagaccagtctggccaacatggtgaaaccccatctctactaaaaataaaaaaattacctgggtatggtggtgcgcatgcctgtagtcccagctactcgggaggctgaggcagtagaatctcttgaacctgggaggtggaggttggagcgagccgagatcgcgccactgcactccagcctgggcgacagagcgagactccgtctcaaaaaaaaaaaaaaagaaagaaaggtgtgtgagatgctctcatattttataaaataacagaagagcatatgaattcgcctcatgttgctctgaggtagaaagaaaagtgagagtgcgttagaaaccaagggaaaaaaatggaaaataattatttactttttct

SEQ ID NO: 33931 - DNA, 2300 bp, Homo sapien
ttgtagtgagccgagatcacgccactgcactccagcctgggcaccattgagcactcgacaagaacttttaagaaaaatcctgttggaattttgagaatttcctgaggattctaaaaggtacctgtgaggccaagagagtatcttcatctgttttctttatttttaaagatatttttgagcctcactttttgtaggtgaaggttatgtggaaggaagacagtaggggagataggagtaaataatttgaaatatacatatgtgcctcagtgcccataaataagccctcctttcttttcacttaatgactatctaatgttctgtactggcaaatagctttccctgcatatgttgttcagtaagtaataaatatacaagattggaaactgcttttttaagagtatatacagatagggaacttttttgctataattttataatgtaaaagctcctcatggtttttcagctccttgcccttgttcttgttctgggtgaatttgtattgctagaagtgtgtataatttatcacactgtgaatgtttagccagtctccaagctgaacttacgctgttatcaaagataggtatgtgaggtggatggatcatgaggtcaagagatcgagaccagtctggccaacatggtgaaaccccatctctactaaaaataaaaaaattacctgggtatggtggtgcgcatgcctgtagtcccagctactcgggaggctgaggcagtagaatctcttgaacctgggaggtggaggttggagcgagccgagatcgcgccactgcactccagcctgggcgacagagcgagactccgtctcaaaaaaaaaaaaaaagaaagaaaggtgtgtgagatgctctcatattttataaaataacagaagagcatatgaattcgcctcatgttgctctgaggtagaaagaaaagtgagagtgcgttagaaaccaagggaaaaaaatggaaaataattatttactttttctaaggctgaaatgatagatttgaccattgtataacacggtgactattgttaataacaatgtgttgtattattgcaaactgctgagagcaaattttaagtttcttaccacagaaaaataagtatttgaggtaatgtacatgttaattagctcaatttaaccactgtacattgtgtacgtatttcaaaacttcatgttgtacatgataaaaatacatcatttttgttaattaaaaaatgttcatttattataaggcatatcaactataaatgtacaataaataataaaagacttatgccaggcaagttaaaattttggaataagatagtcacagttaatttgtactttaaacttttatgtattatcaagctgaatctgaagtactaaattttagcaaaactacaattttgctacatattgagtacatttggatctttaaattcatgtcataagtaaagctaattctgtattttatttgtgttgactagctaattgattaccagtttaaaaagaaaatttagaataggtattctttaggcctgcactatccagtaaggtagccagcagctccatgtggctgttgagcacttgaagttttgctaatccaaactcaaatgtgctgttaagtgtaaaatacactctggatgttgcagactatgtaaactatctcattaataattttactttttaaatgtggctactagaaaatgtaaaagtacaaatatggtttgtgttacatttttattggacaccattggtctaggctatcccatagtccaggcagtatgtgatgagggcctgaactaggaatgttaagacattgagaatagagagacagatttggatatattttgagaaaagtctgtagcacttcgtaattttatatatggttaaggggatctcagagataactataggatttttaatttggataataagaagatggtaatatcattaaccaagaaaggaaatgtgagaaggagagggggaacagattgtaaccattgttattttactgacacatatcttcacgaattcgttgaaacttgatgtaatgttataagatagtgatgtttaagagtattctcccctgttccctcgtatctacccacccttctccaggatttgaactcagaggatcaaaaagccttcagtgttgaacatacaagctgcaatgaggaagaaaatttcgcaaatatgaaaaagaaggccaaaataggcattcatcacaaaaatagtccccccaaagtcactgttccaactagtggaaatactatagagtctcctcttcatgaaaacatctctaattcaacatcattt

SEQ ID NO: 33932 - DNA, 2300 bp, Homo sapien
tcttagagagtaggatgtgaataaatgactaatacttagaccttcagaaggtttcattgtattgaatggcatagtcagtagaatacaaagccaggttacctggattctaatcttaaaatatagattaaggctgttttagtgggttagatatttgtagtctacttttgtaactgagagagaaaaacaagttgtctttaaaaagtatacattatgaattcagctacatggatattatggtaaatctaatttttttttacttgaatatataaagacatacttttaaaacacaggatttcatattacagttggccttctgtatccatgggttctactttagtggattcaagcaacctcagatcaaaaatattcagggaaaaaaatggatagctacatctgtactgaacatgtacacactttttttcttgttattgtcccctaaatatggtgtacctatttatatagcatttacattgtattaggtgtaagtaatctagagatgatttaagttatacagaaggatgcacataagttatatgcaaatacgatacaatttatataaggacttgaacatccatagattttggcatatgaggagggatcttggaactaatcccccacagataccgagggccaactgtgtagtatatgagcttactttgttctttggttctcaatggcatttctcttgcattttttttgagacagagccttgctctattgcccaggctggagtgcagtggcgcagtctcggcttactgtaacctccgcctcctgggttcaagtgattctcttgcctcagcctcccaagttgctgggactacaggcgcatgtcaccacgcacacccagctaatttttgtatttttagtagagacagggtttgaccatgttggccagggtggtcttgaactcctgacctcaggtgatctgcctgcgtcggccccccaaagtgctgggattataggtgtggaccactgtgcctggcctttttttttttttttttaatggactcaatttttataacttaaaataatataaaaatatttgggattttttcagattctgaaaccttaaaaaagaaagagttgattatttgataactgtgatagatgctaaatatgcagcaacctttatgtggatcactttaataacagtgttaagccttacccattgctgcgtattatacagcagaatttaagaagtttgttttagtcagaattaagatttttgaccaacacatttttattttatggatgcctcctagttatccctatgaagttctttttcatagtagttaaattaatatttactcacttctttccttggcagatgaagacaaaatttggcccccatgtattagagtaattgtcattagatcacctgtgttgcagataggatcactctttatcattactgctgtaaaccctgctacaattggaaggtaaaatggttaatattattatatcattctttcagttatttcagaaaggctttattaagagcatgtatttttgtttgtttgtttgttttttgtttttgagacagagttgtgctctgttgtccaggctggagtgcagtggcacgatctcggctcattgcaacctccgcctcctgggttcaagcagttctcctgcctcagcctcctgagtagctgggattacaggcgtgcaccaccacgcccagctgatttttgtgtttttagtagagacgggggtttcaccatgttggccagactggtctcgaactcctcaagtgatccacccacctcaggctcccaaagtgctaggattacaggcacataagctgccacgcctggccattatgttaagcattattctatgtgctgtggatacaaagaggactaatgcaaaatgtctacccaaaggaagcacagtctagggggaaagaagacatgagtaaataatcactgtgtgaaagcacaggaaatctagagtagcagtaaggaaactggataatccataaccaggagatttactgttgatagacgtgtattttaacattatctgttttttaaaattctttccatgtcactttatataatatgcttcaaaaattattaaagacactttacttaactctgcagagaaaaggatatggaacatactctccgaatccctgaagttggtgtcagtaaggtaagctctttgatttatcaaatatagtcccctagatgtaattttttatattattattacagtagaaagcttagggatttttctcatttaataggaaggttaacatgcagtgtagtaatggtaataaaggcagtgcagatctgttt

SEQ ID NO: 33933 - DNA, 2300 bp, Homo sapien
atgacagggaccccagaatccttgggaaattacccactgtctaatttaaaggtaaaaatttagaatgctgctttggatattgctatttcctaaatgtgcatatcttaaaagcattgctttcagtactgccgattttctcataagtagattgtttttataatcacaaaaacatatttttatcttgaaaaacatacagtctttgaaagctttttaaaaggctgttcaccactggctcttccactcctgaagtttaagaaacaaaattttcattcccaaagctgtcttttctggtcattgctcaagtgtgctgtgcagcacccagagaagactgcataagggagcctagctgttattctgaagacagtaccttttttattgttgtcgttgttgttattaagaaagcagagactagttaaagctaatacagacacagcacggagttagctagttctttctgttcaagcagcttagcctcccgctattagaataaatacttgttgactggggacccacttgatttcaaagaggattcctagtataggaagggctagatatttttaacagttttttctgaggaatcaacacttaatactgaagattaattagaaagaaacttagactatctacacacactataggcttttcatcggtaagaaaatggagggcggcatggtttcttaggctaactgtagtctaggagctgtgtgcgtgatcctaacactcattattattcttcccctgctccccagcgtgcgggcgccgcagaatgaggagtggcgagccggcctgcaccatggaccaggcccgcgggctggacgacgcggcggcgcggggcggtcagtgtccgggactggggccggcgccgacgccgacgcctcccggccgcctgggggcgccatactccgaggcctggggctacttccacctggcgccggggcgccccgggcatccgtcgggccactgggccacctgccgtctgtgcggggagcaggtgggccgcggcccgggcttccacgcggggacctcggcgttgtggaggcacctgaggagcgcgcaccggcgggagctggagagcagcggcgccgggagctccccacctgccgcgccctgcccgccgccgcccggccccgctgcggcccccgagggcgactgggcgcgcctgctggaacagatgggcgcgctggccgtgcgcggcagccggcgggagcgggagctggagcggcgcgagctggccgtggagcagggcgagcgcgccctggagcggaggcggagggcgctgcaggaggaagagcgcgccgcggcccaggcgcgccgggaactgcaggccgagcgggaggcgctgcaggcgcggctgcgggatgtgagccgccgtgagggcgccctgggctgggcccccgctgcgccgccgccgctcaaggacgaccccgagggtgacagggacggctgcgtcatcacaaaggtcctcctgtaggggtgtggccacttccccaccccaggacagcgcttctccgtccaatgccaatgccttcagaccccgctgggaccgaagccgtaaccgaagccaggcccgcagccgctactcactcggaagctccagctaactgtaggatcttccacaccctaaggcttcagcttgagaagcacttcgaagccagagcagaaccaaaactcacttccatggggtcaccgggggtgcctgggcggcctttcgtgggcatgcacgcaaggaattggggtggcacacgggacacccgagagctccaggagccccgtgaacccagaccacccagtgccatggccacttagggctgggaacccgaacctggtgactttgaaaggatagagcttcattccataccaaagacttatcacaccatgtgcctatacacccagcagcccaaggtggagggtgcgtggaaatgagaaagctttttacccaaaaaaaaaaaaaaaagagttcctaatgcataatctgcccaacaccaagttctgaagggtgggtgagggacgtcccctctagtttccatgactgctgtagacccgcatcatctctagccctcatcggggcagtcccagagcccgcttttttactgcccatattattcaaccaataccaggtgcactctgtctcccctcggccatccttcccttgcttcagacctaatgacaagtgtggcacatatgtccactttcaggcctcacatctgccaccttagcaagacatcacctcatccccttgtcactaggaagagggcttcttccccacatgtcgtcatagtgctcacctctgggctgaaggg

SEQ ID NO: 33934 - DNA, 2300 bp, Homo sapien
gaaattaacagtggaaatttttgagtgtaatttcagggtgaaaaaaactgaaaagacaaatgtagattttagatatttcaaggaaggagagagagtagtgttgctggtaccatgcctctgcacttgctatagctgagtttcatttgagtatccattatttggaaggagttcttaaatctaagcctgtggaagacaataaattcacattaattatctctccatttgactcaatttctgaagaagttctatccttctgatgaactatcagattaaatcccagattcctcagtatgatgtccctgaataccaatataaagaataaaggaagagatcaaaacctggatgaataatctgtataaacatgggcatatacacaaggtatgactataatattgagactcatcctataaagcacctacaaaagttgattgtattattttatacttatgcttgtgcacataaaaaatatttggcaggctaaaggccaaagaaccaggcactgttctcaaaaggacatagcagattaactacacctctatttgtccttctatactcaaggctacttactgtagttgggttgaccaggcagagtttaaatcaatatatgttggttgagcctggatcttagatgagaaattcacactaacgtgaaattcacacagacatatgtggaaacactaaaaacattttcttttacttcatccaccagtgactttaatgaaagcagagcataataattaatacaagtaattagagttgacaactgaagtgtcaagaaaaccacagttcatctgttatccgtccatctctgttgaaatattagtttactgccatatattaatctatttataaagagatccagacaattagaaaaattagtctggaatcaccaggctgaaggcttagctgaagttaaaagacaagtaaaaatgcctccaaactgtaaaacctgagttggggaataaatggtaaaatgtgtaaaaatttagaaaaaggttatatgtggactgtaaaaaatacactggactcacaggtaattaaggggtgaatcagagttgtttcctaaatggcataagccaaactcttagatatttctaccattagctaaaaggcagagaagcactctctctctctattaatgcacttttaaaaatgaaaattgtgaagtgttctgcccttaaagtggacctttatttcaggtctgcattactttgcttaatagatatggtcctaaagattaaggtggtgatccattttatcttgtaaaaatgcataatttaatctgagttataggaatttaaagctgccctactttgaaggcctttgtgactcaaagatttttttaatttaatttttaaattgagaattacctggcttgggcttttggtctttttataatacgtattgctgtctacttttttttttattcttggctgcctcaagctattcttgcctccaaaaggtgtcagcatatgaataaaaacagcagaaaataattaccctaattaggtcaatgtattaagctgtttctacaactgtttctcttaaacaccttatctttgtagtcttggctcattagaaattcgactagtggtaagtatttatttttttccttcaagggggtttttgctttgctaagcctcgggcatttggttcgtgcaagaaatcacagaaactgctccagcggactccgaaaggagcggaaaattcttttgtttgggggccatgaggggtgggggaggggtggggattctggtgtaagcttttggcttgcattcgctttctccctccgaaagtgggcgacatcaagcaagtcccagttacagaaagaacccactgcagggcgtccagtcacttgcccagtgaaaagactgtaatcagacaactttaataaagggagagcaggagagtggtgacgaatttccacattccgaacaagcttgtcgaaagaggagtgcagggaaggagcaagaatgaggcactggaagacggtgagcggggccttgccacagaatcccgggcccacctgctttctcacagtcgcgacagccggcccggagaagggcagcccagcgaagggcacgccccgcgcgggtgccagggaggccggcaggggcgtccgcggtcgctgctcacctgcgctccccgctgcccggcccagcccgcctcgccaccgagtctggaagcccacactcacccctttacccgggaaacgcggccggagccggcggcgggtcgggagtccgagatggtagatccccctccaggcgcctcgctgacattttgtcccggacggaaaa

SEQ ID NO: 33935 - DNA, 2300 bp, Homo sapien
tgaatcagagttgtttcctaaatggcataagccaaactcttagatatttctaccattagctaaaaggcagagaagcactctctctctctattaatgcacttttaaaaatgaaaattgtgaagtgttctgcccttaaagtggacctttatttcaggtctgcattactttgcttaatagatatggtcctaaagattaaggtggtgatccattttatcttgtaaaaatgcataatttaatctgagttataggaatttaaagctgccctactttgaaggcctttgtgactcaaagatttttttaatttaatttttaaattgagaattacctggcttgggcttttggtctttttataatacgtattgctgtctacttttttttttattcttggctgcctcaagctattcttgcctccaaaaggtgtcagcatatgaataaaaacagcagaaaataattaccctaattaggtcaatgtattaagctgtttctacaactgtttctcttaaacaccttatctttgtagtcttggctcattagaaattcgactagtggtaagtatttatttttttccttcaagggggtttttgctttgctaagcctcgggcatttggttcgtgcaagaaatcacagaaactgctccagcggactccgaaaggagcggaaaattcttttgtttgggggccatgaggggtgggggaggggtggggattctggtgtaagcttttggcttgcattcgctttctccctccgaaagtgggcgacatcaagcaagtcccagttacagaaagaacccactgcagggcgtccagtcacttgcccagtgaaaagactgtaatcagacaactttaataaagggagagcaggagagtggtgacgaatttccacattccgaacaagcttgtcgaaagaggagtgcagggaaggagcaagaatgaggcactggaagacggtgagcggggccttgccacagaatcccgggcccacctgctttctcacagtcgcgacagccggcccggagaagggcagcccagcgaagggcacgccccgcgcgggtgccagggaggccggcaggggcgtccgcggtcgctgctcacctgcgctccccgctgcccggcccagcccgcctcgccaccgagtctggaagcccacactcacccctttacccgggaaacgcggccggagccggcggcgggtcgggagtccgagatggtagatccccctccaggcgcctcgctgacattttgtcccggacggaaaacctccgcgcgtgccccttaaagacacagcgctgcattcacacgtctgcggggaaaggggggccgtcacgtgtggccttcgcccgaaagcggtaggggagtcgctctgaaaccgccaaggatcgcgagcgacagatttgtgttggccagggttttaagatgacgcaatagctgagtgtggttgaaatgtaactattgttttacaactttgcattaaccttccaagacctgaattcccgggcctgagtctcagagcgcggtttgcatctttgcaggctgtaggcgcatgatgtcacaagttattggaagaaatccctccaacctaggttgggacagatgaaggcggcgcttattggtgttcaccaaaacaccagcatggtgtaccagctttggctagatgatgctcaggtaacgaacaacccctgcaactcagtggcttaaaggtccatttctcaagcgaattactgtggctgcagggagctttggcagtactccaccagttttcttcactccaggctgaaaggtcaacttttctgggccatgctccctgctgggctggtaaaccaactttgagggagaagggggaagtccagatatgtagtgtttgctatttctatgatgtaaatgctcccacaatggccgatttcaagctacaaacagtccaacaagtggcttgccaagttcctggaaatttaacaattagctcctgtacatgactggcacaagctgctttccaaactcacattccgcatgcctcagttctgctcactttctattggtcaaaacttgctgtcagtgggtggggaagtgtacccctctcttaaggaagccttgcaagtcttgtgacaatgaaacaggagagttccctgatttcctcccggcccccgccctcccacagccctttgcaggacgtgcaacagggttgtggctcgtgtgttcggtctctgcctgctgaaaccccttatgggaggtggagcatgcagacggacgggtgcaggagccagggtgcaaaagctggggcgctgggcttccagccccacggcagtg

SEQ ID NO: 33936 - DNA, 2300 bp, Homo sapien
atcatcaggcattagattctcacaaggggcacacaacctagatcccttgaatgtgcacagttcacaattgtgctcctatgagaatctaatgccccagctgatgtgacaggaggtggagctcaggcggcaatgctagtcatggggagcggatgtaaatacagatgaagcttccctcatttgcttgccccttactcaactcctgctgtgccaccaggttcctaacagggtacaaagggtactggttcatggcccggggttggggacctctgcctttgaagatacccaaccagtttcttcctccaaaaccattattggaatggtggattgtattattgtacccagttatttcttgttcttcttttaaggatattattcagctcacttattgttgatagggacagtagacagggaactactgggtagaataaggccgttccctggcaaaggccccaccctcaagcctggaaacccatggccctaaatgaagagaggcattcccgttcttgtgcccaaaagttaccttttggccctccatgaccccctatcctgtacccgtataaactccagacaccaggctccagcagcaaaagatgagcagatgaacagaagagcagaagagcagaagagccgcagataaagagaaaagagaaggaatattgggtggagttcagctggggacagttagagaatccaccgctggacggttaaactccaggggaagatcatctccctactccaccccctttccagctccccatccatcctactgagtgccacccctaccacctaataaacacccccaaccttcccccaactcctctacccccgcccccaccccggcactcaccatccttcaagtccatgtgtgacctgattcttctgggaggtgagacaagagctgagatacagaaactgtcacactgaccctctgcgcttgcaaaaaggcagagggtctattgagctggttaacacttaagccgtcagctgatggtaaggctaaaagagcacactgtaacacacgcccatttgggctccgggaatcacgggatcctgcccctggacactgccgtggggctggaagcccagcgccccagcttttgcaccctggctcctgcacccgtccgtctgcatgctccacctcccataaggggtttcagcaggcagagaccgaacacacgagccacaaccctgttgcacgtcctgcaaagggctgtgggagggcgggggccgggaggaaatcagggaactctcctgtttcattgtcacaagacttgcaaggcttccttaagagaggggtacacttccccacccactgacagcaagttttgaccaatagaaagtgagcagaactgaggcatgcggaatgtgagtttggaaagcagcttgtgccagtcatgtacaggagctaattgttaaatttccaggaacttggcaagccacttgttggactgtttgtagcttgaaatcggccattgtgggagcatttacatcatagaaatagcaaacactacatatctggacttcccccttctccctcaaagttggtttaccagcccagcagggagcatggcccagaaaagttgacctttcagcctggagtgaagaaaactggtggagtactgccaaagctccctgcagccacagtaattcgcttgagaaatggacctttaagccactgagttgcaggggttgttcgttacctgagcatcatctagccaaagctggtacaccatgctggtgttttggtgaacaccaataagcgccgccttcatctgtcccaacctaggttggagggatttcttccaataacttgtgacatcatgcgcctacagcctgcaaagatgcaaaccgcgctctgagactcaggcccgggaattcaggtcttggaaggttaatgcaaagttgtaaaacaatagttacatttcaaccacactcagctattgcgtcatcttaaaaccctggccaacacaaatctgtcgctcgcgatccttggcggtttcagagcgactcccctaccgctttcgggcgaaggccacacgtgacggcccccctttccccgcagacgtgtgaatgcagcgctgtgtctttaaggggcacgcgcggaggttttccgtccgggacaaaatgtcagcgaggcgcctggagggggatctaccatctcggactcccgacccgccgccggctccggccgcgtttcccgggtaaaggggtgagtgtgggcttccagactcggtggcgaggcgggctgggccgggcagcggggagcgcaggtgagcagcgaccgcggacgcccctgccgg

SEQ ID NO: 33937 - DNA, 2300 bp, Homo sapien
ctttttgctgacaggggaaaggagagataaggtcttttctccatcatcttaagctgaaagtcttccaggttattttcatgttaaaagagagcatgcctaattcatagctagcttgtgcagaacaccccaggagagactggcctagcagggctgggaggacccacaggggtgaacaaatgcagctggattgaaagacaagagcagaaagcatgattgagctgggaaagagctcttttccaaatggcctattcaaaaatgggatgggaactgcaagtgggttgaggtgcactcagtcaactagagaagaagaaacagatatgagatgctctggccaaggcagagtcaaggtggacgcagtttatttgaactcctgtccaagctattctagtggccatgtcagatccgccttgatgccatctgttctcagtgtcttcacgcaaagtaagaagcacaagcagtggaattccagtgtcagcaagtggccctctgtgtaccctgcagaaaaaggctccctacggaaacataaagtcacacctttgctccagctaagagctccactttgccctcatattttgtggatcttgtccaacttgagcatttttcacctgaaggattaaaatagggtgtggtttatgtgggggtaaaatggctacagattgatcatcattaaagccaaggagagactttttttcattaaagcaaaggggagacttcaaagtctgagaaaggcaaggaggacaccaaatctacagactaaccatagcaaaagcacagacatgctgcccacccagaagcactggaaataagcatggttgccaaggtagctggaaagaccctttctattaggttggtacaaaagtaattgcggtttttgctattaaaagtaatacttaaaaaaagtaataacttccctactccccttggacttcccatgataatagtgacacaatttttaaaactatttatctgaacatctagtaatacaagtccaagggcatttatgaggagaaggagacaagtgaatatttgaaatagatattgtccttggaaatttggagtccggggggtggcttctcttcagccccctcccatcctgaagccacatggatggtttcttgtccccacccttccctacaccttccctctggccctgcttttaggtcttaaatggattaaatttttgggacaggtgacacttttccctcttgtccctcagggtggtttttctgttgtttttgtttttgctttctcccatagcttgtatatttcaagtataaaaattatgtgaggatgatccgcctggaagccctttccagagctgagtatttccagaacagaagtaagcaggcttctttcattctaaagtctactgtgatttttaacagggtttccttatttcctatcagtttgtttatcaaagactccagcatggagtttatttaggaaaaacaaatgactttttaggttccactacttggctgagaggaattcatgttttaggaagccccagatgggaaagccttgttgttttcttctttgaaatgatctgcattttcaatttttttctacttgcttttatttcccacaatccagactcgccttttctactttgcctatccaacgatctaaaacactatgtaaagatacagataagtcttgttgattcttttaaacattagccataatccaaaaaagaaaaaagtcttaggactatagtcctaacagcacaaattttaaccctgaccaaagcaatttctattttaatttaggttatttgagctgaatttgcagggcgaagtggtcatgggtaaaactaaccattagttacctcaagcttgcaacaatggcaaagaaatgtcaagccattaattaaaatgactcccacggcccctcctggaatcaagtcgttcccagttagtcaacatctgtcacaatctgtgtaaaagggcagaacacgctataccccagcacattaagttagaacacagaggtcttgggtcactgccagagtaacttgtctgtggcatgatggttgctaagcgaaacagagcattctctgcagggagcccccctggactgaggctccttctcttcccctttatttcttgctaggccagcaggagccaggccgtggcctgctgactgcatctgccagatgactaccaatgtgtgagtaaacccattctcaagcccaagagaacctctcagctgaaccaggcccaagttgctcacccactgaactgccagttaaataaatggtggttgttttaatccactaaatgctgggatggtttgttata

SEQ ID NO: 33938 - DNA, 2300 bp, Homo sapien
gccaccttgcccaaggtcgctgaggtggcctgcatgtaaagactggtccatgctggggtataaaggcccaccagaacaactcagaacccagccccaactcagaacaactctgaagcatcatcccaccttcagaatcctccctgcagggatgcctgaggcttggtcaatttctccctctgctcaagcttgcctccctccattccctccctttatttcctcccacaaatgttgactacaagagcacttcctaaaaagcctccctctgcctgctaaacaccatctcagaatctgcttctaggaggacccaacctgtgcagaaattttatgagcaatttgcctgtccattaaaaaatacagcatagactttttccaggttagctggagatggagtttttttgtatcaaaaaaagagagctaaactgagaagagaagcaaaggtagaagaataaggttagactctccctgtataactgaatttgggattgggaatgatatcttgcttctctatgaaatttagaaactgtcttttgaagtcttcatccagtcacatccaagagtggtccaggaagaaaaaggaaaataagaatgaaaaaaaaacaaaaaacaaaccttaaaattggatacttctttgtgccttgcattaagcctctatgttactgcccttgtccgtataagcaactctagataaaatcctttcttagaccatctaatttatctccccgtgccattgtgaaaatcgggcaggaattactgcgggaaccagtgactgaatgggcagtggtgtctcgcagctgtaactcagagtttacaagggaaggatgaacagcagccatccttctaaaggcattcttcctctcctccagcacagctcagtctgtgcatgcctcaccaaggagaatgagggaaggccttgttgactgcccagcccagagtgtgaggaacagcagttgacatgggcggctggacgggatagaaaccagcatgaacatttagtgacacctaaggaagaggtgaaaatgggggagaaagccaagaaccatcagacagcttctttctgttcttgccttggatcttaggggaacgtatgtgttcaagggtgccttcctccgcagggcctcccatcccttggcacaaacttccaaacgatgagtagacatggaatgggcttcttctgaagactgggtcaccatccaactcagccttcggagtaggcggtggggctgggggaagaggacggaaccatgaggtctctccatcacttcccgggtgtgttgagaggcaagcaaatgcggtgggtgggcctgggctgtagggcccctgccatttcgggaggggcctcctggtgtttagctctgggatgtgtgaaaatgtgttggtgaaaagcgagaggcttacacagcccttcaggggaagaggggctggggcgctgggggcggcgtcgggatgagtgcagaagagacgaggcctctggacagcggaggaggaggggagggcgccgaggcgcggtgccagctgccgcgcacaggggccccgcggcggagccgagccgcgggcacgctctgccctgtcgggagagctccgggagcggcgggaggggcggaggggcgcagtggggcccgggcggctgcggccgcggagccggggcacctgaggaggaaggagggtgggagcgagggagggaggggacgggcgcagaccgaaagtggggaaagaaggtgcaggcaggcgggcaggcgggcgggcgccctggcccagggccgcgggtgcgggagcccggcgaggtcgagctgggcggcggcgggggccgcgccgagggaggaggggaaggcggaggcgcggggagcgtgtttggggcgccgcggcggggagggtggcggccgctggtgcgcgcggggcgctgtgtatgcgcgctcccccgctcggggaggaagatggcccaaaagggaaagttggggtgacgcgcgcggtccccggaggctcggcggggggcaccgcggccagcccgacggagcggcggacacacaggccggggggcgcgcagtccgggcgccgccgcggccgccccctcactgcaggtggcagcgggtgcgctgggtcccggcggccgcgggcgcgggcgggcgcgcgggggagcccggccgagggatgggctgcgcccccagcatccatgtctcgcagagcggcgtgatctactgccgggactcggacgagtccagctcgccccgccagaccaccagcgtgtcgcagggcccggcggcacccctgcccggcctcttcgtccagaccgacgccgccgacgc

SEQ ID NO: 33939 - DNA, 2300 bp, Homo sapien
aacagtgtcgtgatatacatacatatctttctatgttattccagcattttcaaaacatattttatcatggttttttcatgtttttacaaaacatgagctaacaactccctgagttctgttataggctgatatatagcttttatccatctaaaagctcaaatggaatctaaccatgtttaactttgctctgtaaatcaaacagaaagtatttcccttatgtgtatgtttatggcttcctctccttccttagctcttcccagcttccacgtaagaattgtggaggaccagaggcccagggaaagccagggagaagccaaccactccagatatgtggagccaaccactccagtgtatatgtggggtgtgtgtgtgtgtgtgtgtgtgtgtgtgtgtgagagagagaggaaggagtgaggagagggattgatttttttctctggccaacttgggtgaaggaaatctaagaaatacatctttcagcagggcctagtattctcctcctccacttatatagctaccggagaagcaaaagtatgtgactagtagtttggaatactttggaattctgcttatctttctacttaatagtttgccagccatatgcttagaaaggtttgcatgatatgtttttttaatcaattaaaatgcataacatttcccctttcctaagtagaattgtccttaaatctcttcccttactattttttacttgcttttttttctgatttcattatttctcattaagtattgatgtgatcatgtcagagaagtgctcaatttcctatataccctacactgaatcacatagcatatataagaaatgtaaaccaaattactttgggattaagtgaaaaagggcctactcctctttaaacgcgggacttgagcagctcatgcctagcataaataggtgcttcgtagttctttgatgaatgacaatgtgtgctgcattttcttctatgttattatttgcttatctatctgttcattcattcactaagtttatttataaatacatgaaagccttttttttcaattgagatgaaactaaaattagccattttaaagtgaacaattcagtgacacttagcacatacacagtgttgtacagccaccacctctctctagttagagtgagaacctgttgcaaaacaaacaagcaaaaagccattttcatcattcccaaatgtgttcccattaagcggtcactcctagtcctcctccccacagccctgacaaccaccagtctgcattctggctcaatcaattgacctattctagatatttcatatacatggaatcatacaatatgtgaatttttctgtctggattctttcacttaatacatttttcgggttcatacatgttgtagcatgtatcagtattttattcccattttatggtcaagtaataatccattgtatgtatacaccacaatttgtttatctgttcaaatgttggacatttgggctgtttctgccttttggctatggtgaatgatgctgctatgaacacacatgtatgagtatttatttgagtacttgttttcagttcttttgagtatatacctaggagtggaattgctggatcatatgagaattctgtgtttaacttttcccctgcattaggcactcagaaaattaggaaggaagtaaagagtaggctctcccttccaaagagatcattgataatgtggtgcacactgaacatgctgagtgttgggttttagatgattttattagtgcaatatgaagcaaagtgtttcagtcatttacatggctgggcaggcattccgtgctctagagcattcataatgtagtttattctacctttgttatgcaggaagtgaagtgtacagtattacttgctctgttgtttctcatacatttaaacaagcactttgaacaccttgacagctgtttcatctcatcttacctactaattgtcttatataacggagttacctggggataggaacaactgttaagtttctctatttgactctctaagaagtaattatatatgtcttatgtattgtctttgctttcttttcagagatttatggagaatagcagcataattgcttgctataatgaactgattcaaatagaacatggggaagttcgctcccagttcaaattacggtatgtagcaaaatgatacagtaacatgaggttaacaattctttagaaaatcttatctgtcaacaggctgatgttcaggggttcatagctgaatcccagggattttgaagcttttaaacaggcaatgaatggcagctggccaacagcagtatctaa

SEQ ID NO: 33940 - DNA, 2300 bp, Homo sapien
atgcaaatgaacggatgtaattaatagcccccatatactacatgctcactatgtggcagacactgttctaaatgctatgcatatattaactcacttatttctcaaaacagcctataaatgagatgctatcattacccccacttcatagacaaggataatgagacccagagaagttaagtaacatttccaagattacacagctgctgagtggcacagtagaaatttgaatcttgacgatttggctctggacctggtttccttaactactaggcttcttgcacctgctgtcactaggcaattcttaaagaagtgttattgcatcttttttttattcttggaatatgatcacttattggcatctgagaagcgcattcttcctgctgaaatttgcatgtctgcctcctctcttagcctagtgaggagtaatctgtgttatggttaaatttctctactcgcttatgagttactctcacagaagcaaatgcgctgaaaatgtgtgtttctgaagccaacactgctgccttgtcattttttatatctcggcgctcactggtggcatatgctttttgttagtttttacattaacatgaccgtgcgttttcagtgttaaattcaagtctgcaaagatttaggccaaaattctttaaatgtttgcctgcccccaccaccctggaaaatagggacaagggtgaaggtttagttattgaaatgttgggggaatctaaaactgttttcttcctttcctgtgatcagcagtatgcatcatttgatgaaatccatccttaaagagaatctagaagcccatctagaggtctgacttttcagaggtgccaaaattcgtctgaattaatctcgtaatttaaatctctataagtttcattagtattatatttcctcaaatatccccatttaaaagccttccctatccagttgaatatattgtctttcaagtaaagatttaaagtactattatttatagataattttaaaaatatatattgaaacttttatgcatgataggaaaattactaaggaagataaaaattaggaaaagagatagtataataaatattttaagctagattatttaagataaggtgctatagctatggtgttcagattaactttataatagttccacctttactagttcaatagttcccccgagaatgtccctcaagttttaatgtttattttcttaaattctttttttttttggagacagagtttcactctttttgcccaggctggagtgcaatggcacaatctcagctcactgcaacctctgcctcccaggttcaagcgatcctcctgcctcagcctcccaagtagctggaattacaggcatgcaccaccatgcctggctaattttttgttggtttttttgagacagtctcgctctgtcacccaggctggagtgcagtggcacgatcttggctcattgcatgcaacctctgcgtgctgggttcaagcgagtctcctgcctcagcctcctgggtagctgggattacaggcatgctcaaccatgcccggctaatttttgtatttttagtagagatggggtttcaccatgttggtcagggtggtctcgaactcctgacttcgtgatctgcccgtctcagcctcccaaagtgctggacttataggcatgagccactgtgcccagcctaattttatgtatttttttagtagagacagggtttctccatgttggtcaggctggtctcgaaacctgacctcaggtgatccacccgcctgcctcagcctcccaaagtgctgggattacaggtgtgaggccctgcgcccggcctaatgtttattttcaaaattacattcatgtaactaaataacccttgatactaagctatattactatgatataacatggcattatcttaaaaaaccatcatttaactaatatgactataatttttgtctttcatgatttgaaaagaaagtggttgactgtttcttaaaattattttatagtgcttaaaaagtaaccttgttttctttagagaataaagaaaaaacatgtttgaatctcttctgtgaatacacggaaaactaatcaccttccctttctaatctgaaatccttagagcctcattcattcagatataagaacaggaggaaagagtccattgacgtgaaatcgatatcatctcgaggcagtgatggtaagatgtttttcagattcctctgacctttttaaaatgtagaaaatgatggaagaatatgttaaaaaattcatcagcgtataaactccaaagagtaagagttcaacaacaccgacttat

SEQ ID NO: 33941 - DNA, 2300 bp, Homo sapien
ccgccctgaccctaaccatgaactgcctcccctctcaagctggctgcacagtcatctggttacacggccagcagcttaggactgaaagtcatggaactgcaaaagttgggtttgggtgacttgggggaaagtgagccgtgtgggggtcattaagctgttggaatgaggcctttttggacctcatcaaccttctctgaaattccccttgtggacttggggctcagcaagccctcctgcctccaaagttccaggccagatcgcctttccagactcaggcaagtagcagttgggctaccagccttggcagaagagatgggtgaattcatggctttttaggtgggagggtggccctgtgagaagcgggccctggtccatgaagggactcctttgctgcacttagccacactgagccaccggaactggacacagctttcttgccttctctccagcaccaagcctgcagaatcgtcgctatccgtccatggcgaggatccactccatgaccatcgaggctcccatcacaaaggtgagtggcggctgctgcctgcactctgcagtcaggggccctcacacagggccgtgctctgaaaatacatcacactgacatcatggagctcagtctagtggaagaagcaaataacaggcaaataaacacatagcaaataaacacctcatcctaagtcacaatcagggcagtgaaggaaaacaagcgggttctgtgagagaaaattagagtagggcccttaagtaggttggaagagagggtggtcagggaaactctcagtcatgtttgaagcaagtcttgaagcataagatgttactcaggagaagaaggaagagaagactccgggtagcaggaacagccagggaaaaagcattgcaatgggcgaagagggactggaacatttaaggagctgaaagaaagtcggagtggccggagcttggtaagcaggtgagagaggaggaggatgtaggttgtacagggctcagctcattctggacagcagggacatagttaggagtttgtatcttagtttatgtgcactggaaaccactgaagagtttcaggtgtggggtgggtgatgtgaccagatatgtttgttgaaaagaacacccagcttctgtgcagagaatcgattggaggtggcaagagaacaggtcagttagggggctattctagaagtagctgagctagaattatagctgtggaggtggagagaaatgaatagatcaagaaatattttgaggcagaccaataggacttggtgatgaattatattgccagggtagggagaggaatgaggaaaagtattatgtcaggcatggccctcccaggtttttggtgtgagcatgaagtgctttcttgatagaaaatgacatgagatagaagtgctttcttttgcagtgtagaaaccacagaaggtgaacagcttttgtctttgatttttttgttgtgtgtgtttatgtgatttctatggagagaggggaacaagactgcagtttagtgttagacctgtgagatattccagtaggtatgtcaggtagggaattgaatgtacaagcctggaggtcaaaggaagttgagggctgggaggtatatcgaaagtccctagctataggtgtccaaagtcgtggagacaaaatatcatttctggaagcgagagagtgagagaggggcccagaacagatctctgagcaactccaatctgtagaggagggccaggggaggtgaatctgcaagggagcctgaggaagcctactcactgagacaggagaacattcaccaggagcccgcagggagaaaagcatgcttcaggaagaagggcggtgccgtgaaagcactggtcattttgaataagagatggttacccactgatttcttttggattctgggcatatatatgacttttgggaagtagaaccctattatcctcagatgtattctttcttcactccgttaggttataaatataatcaatgcagcccaagaaaacagcccagtcacagtagcggaagccttggacagagttctagagattttacggaccacagaactgtactcccctcagctgggtaccaaagatgaagatcctcacaccagtgatcttgttggaggcctgatgactgtgagtgatgaggcaaaacctgaaaagcaagagaggtatccggggcctctagagtgcagctgatgtggaaactgttacctgtggttgcagaagtacctgttatatagactaacgttagcataaccagaagcaactgcgtcagaatttatgtataacatgtgcagtggtatttga

SEQ ID NO: 33942 - DNA, 2300 bp, Homo sapien
ctttcttttgcagtgtagaaaccacagaaggtgaacagcttttgtctttgatttttttgttgtgtgtgtttatgtgatttctatggagagaggggaacaagactgcagtttagtgttagacctgtgagatattccagtaggtatgtcaggtagggaattgaatgtacaagcctggaggtcaaaggaagttgagggctgggaggtatatcgaaagtccctagctataggtgtccaaagtcgtggagacaaaatatcatttctggaagcgagagagtgagagaggggcccagaacagatctctgagcaactccaatctgtagaggagggccaggggaggtgaatctgcaagggagcctgaggaagcctactcactgagacaggagaacattcaccaggagcccgcagggagaaaagcatgcttcaggaagaagggcggtgccgtgaaagcactggtcattttgaataagagatggttacccactgatttcttttggattctgggcatatatatgacttttgggaagtagaaccctattatcctcagatgtattctttcttcactccgttaggttataaatataatcaatgcagcccaagaaaacagcccagtcacagtagcggaagccttggacagagttctagagattttacggaccacagaactgtactcccctcagctgggtaccaaagatgaagatcctcacaccagtgatcttgttggaggcctgatgactgtgagtgatgaggcaaaacctgaaaagcaagagaggtatccggggcctctagagtgcagctgatgtggaaactgttacctgtggttgcagaagtacctgttatatagactaacgttagcataaccagaagcaactgcgtcagaatttatgtataacatgtgcagtggtatttgagtgactcttgcatttgtctttccatgaggctggcctaccatagccatggggacagtgtttcagaattcctatgactgcagggagtcattgggcaactgatggagggctcaatgtgcaagatggggctttgcaggctcttgattattcctgctttcccttgatctggtatagtattggatttcatttccatggacctcagattcctcatgtaatgaaagggtttattgttagactatagcatttaatcttaactatagaatcctttatttaaagtttgtatagaagttccatttataaggtaaaagcagactggggctgttctggctcagggaggggaaggggagaaggaacctctcactgccacattccaaaaagaaccatttacaccaccaagagtagctggtttctagggactcaacctattctggtgttttgctgtgatctatttggctttcataattatctatcagcaagtaaagaaaaggaaaaaaattcaaattgtttatttgagttccccatcagagtctgaagctggaattctttagaaaaaaagtccagaagtcatgtatgagtttgactttgaaggtttctgtccagccctgcagccaaatgctgaatgttgactgcctttcccctccattctccacctggaacttgagggccttcttgtttctttcttgcccctgggctggcctgttaactccatctaatgcagtgcagacctcagcttctaggcagcactgccaagggctctgcaagaaggtggccaccgcagagctgcagtgggaggggtctggttctgggagcaagccatgttccctccctcccctgctgctgatgcaggacaggcaagtccccaaactggggctcagcccgggagggttcttggcctcgcccaggaaataattcaagggcaagctggtggtgttaaacagcaacttctattgaagcagcagttgtactgcagtggcagagggactgctgcttgcagagcggggctaccccatgggcagtgtgcccctggtagcagctcagaggcagcactgcactcatctttatacctacttttcattacatgcaaatgaaggggcagtttttgcagatatttctagaatgagggtggtaacttctgggttgttaccatggaaagggtggaaaggtctggatgttgtcatggcaacggtaaactgccgtggcatgctggtgggcatagcttatggggaggtgcttctgccctgttctacctagtcctcaatttggccccatgtccgagtcccttctcctacctcactgccataccatcgtgggtttcctctccagagaatgctgtgaggaaccagtgagtgattccacctcaattttatgtggttttggggaagcggagcgagagaa

SEQ ID NO: 33943 - DNA, 2300 bp, Homo sapien
ctgcaggacccattattggtatctttgtaagtcactgagggcatggtttaaatcagtgttagctggaaggaaaggcatgtttcatctagtgctatttatgttttctaccccagttacttgaatctatttcattgaagaattaaaaaataaacaggcctgagactccaagcaggattgaacataccacagtggcactagctggaggcccagagtttgggccccgtgggttctcactgctcaggtacagtcagtgaaggtggagcccaggttggggctgtcctgggtcctgagcttggagatcgctgaacgtgcctgcaggtgaccgtggcctctcctgaccagcagtgaaatgggccaaatgatgcttgcttgccctgggcactgcagaatcaatctctgagaacagctgagaagagtaacttctgctgtccctattcaggaagcctagttgtgttgattggggtcaccccagggttgctcaccagctccatggggtcagcgttgggaatggaaatgactcccttctggtggagacagagctttcagggaagcctgctaaaccagcacaagcaagtgcagccccttggccatcagggtgccgttgcaggacagggctgagctacaggttcaccttcctcacctgagtagcagctcttcctcctgcaggcctaggagagcaaattctgggaataccaaaaatgatgacctccccacccccaacatcttggggaccactttccctctcactatcccttcagccacagtgatgtcgcttacgtttcctgaacagaccttttttgtttgacttcaggaacgtcatgcaggctgttctttctgcctggaattgccctcttgctgcttgttgcctggacaattcctgcttctccttcaggctcagcagaaaaatcacttccttggaagtgaccaccctcgaaatccatgttatccgatatggtagccatcagcctcgcatggctactaaataaaatttaaaatgcagttcgtcagttgcactggctacctttcaagtgtccagtagctgcatgcaactaggagttactttatcagatagcacaaatagaacgcattcctgtcatggcaaaaaatacattggacagtgctgccctaaactagaccaggtcccatggttatactcccaaagcatctgtactttccttcttagcacgtctcacagcaagttacttccgtttgtgtttttaaatgtatttgtctctctccctctacattacaaactccattgtgcagactgtgccagtgtaaatcatcatggcagctctggcactatgcagtgataattggtacctggtaggcactcaataaataataaattcctagcacaacatctcttatataacagtagcccatctgataactcctaaagctgcaggctcagaaaacacttgtatccccggatgctctggtttgtttctttaattacataatgagagctttcgaattagggtttccctttttgcctttgctgcctgctagcccagagctgaattttgttcttatttgcaagaacccctttagccttaattttcctggcaaagttattctttcccttggtcttcttttactgcttggtcctcttttacctggtactcttttactcttctacagctctagtcatttcaccattgtatgaatagttttgttgtatctgagccatttgctaccagcacactcaaaatcttttcagagctaggcaaattggtaatagttgtgatcacaggccactttctgctgtggcagaaataccatacagtgggcaattcaaaaggcttgtttggcctcttcctgcagctgatggcccctggagaatgaattaagcgtctgctgtaactgtggctcaggttgccctccagataacagacagcacagtaaagcgatgctgcatgtccgaggccgcctctccacatctaggtcagaaggctcagctggctaaaaacgttctgaaaatctcaaatcccctgacccgaccctccgcacagacaaggatggatgtgggtctccaagatccagtgggtaatgctcaaccttgcctccccatatcccagggaagcctcgatcagttggatgaggtggcagccctcattgctgccacagtccatgacgtggatcacccgggaaggaccaactctttcctctgcaatgcaggcagtgagcttgctgtgctctacaatgacactgctgttctggagagtcaccacaccgccctggccttccagctcacggtcaaggacaccaaatgcaacattttcaagaatattgacagg

SEQ ID NO: 33944 - DNA, 2300 bp, Homo sapien
cttgctatattgactattttattaatatataacataatgtttctgtctttgaaaacttttttgatttaaagtctattttgtcagctgttagtacagccactccagttctcttttggttactatttgcatggaatatctttttctattctttcccttttgatctatttgtgtctttgatctaaagtcagtctttcatagacagcatatagttggattctagagtttggtttttttttgtcaatctgccttttctttggacagtttaatctatttatatttaaagtaattactgataaagaggaatttctatttttctatttgttttctatatgccttatagtttttttgtacctcattttctctattactgccatcttttgtatttagcttattttttgtagtaaatgttttgattccctgatcatttccatttatgtatattttacaggtatttttgtgtttaccatgagaattacatttaacatcctaacgttataacaatctcattttaatttataccaacgtaacttcaatagcatacaaagactctgctcctatattgctccacccccaccctttctattgatgccacaaattacatctttatacattgtgtgcccaataatatactaatcttgtaaaaaattctttcttagctgtcctaagaggaaccaagggaggaagtgttcaaccctggaccagtgctttaaagcatcagcagaatgtcccttacatcagagtaatgtggcattgggcaaaccctaaagagcatggggcaaaccctaaagaatgtggataatcagaagaataaaatgtaggctatttgggcaaccacattgtctcacgtgaagatattccttccagaactgaactcctgatgtctctgagttttgttttacttaaagataagtccctctttcccaggggatagtctctgttttggtctgtcttcaactgtatgcagactgcaatttggggctagcacacagaaggcaacatgctcctgatccttgggagtgtgttcttgccgagtgcactcaaaaggaatacaaagatgaattataggagatccgagttccagagggactgtaagtttgtgtagctgctcacaaccaacttagcttaaagtgggatgtatggctctctcttattggtgactgggacattatgccttgtccctccagagcagcattttatgtgattcctttctgcttctctagtgcatctgtgtccaatacatgtttgctgaattaatgcattagttgggacatttgtagattccctacaacaatttactgctaggaggattatttgaacctaatacatatgcaaatatatatatttatacttttgcaaacatgatatgtataagtagttcctagaccagtgattttcagaccttgctactcatcagaatcacctgaggagccttcccaaaaccccgattcctacgtcccaaccacaaagattattttaatgagtctgaggtggaagccaggaatctacattttcaaaagctacccaggtaattctgatatgcagtcagcatagataaccacagccctttgactacctaagaaaatgtagtagtcaaaaaaaggtatatgaactgccttctattctttagggagattctatgttaatatagcatacggtcaagaacactaccaatgtagccacttcctagctgttatctttagacaaattacctaatcattcagagctttagtttcttgatgtgtaaaatagaggatataggtttaccatgaggatttatgtaaagccttagcacagtagctgtactatagcacacagtaaatgttggccggatttattcggctgtacacatgagccactggatttgtctggatgcagaagtctactgcggtacaccttcttcagcaagctcttgggaaagcaggggagatttcctggtaccctaggaagtggaggatactaaagccatgtcacagggaggggcattattcttcgtgcgcgcttgctcgccggggtcgggttgctgctccgcgcgcgtccaccaggggccgctcgagctacctaagctccgtgcgctacccggcggcgctcccgcgcgtgctcactcggagcagcgcgcgccccgcaatcgccgcagccgcccccgccgtcggccgccgcaccccaagcgactgcccaaactaagcctccgtggctgggtacgggagcgctttggggacaaaaattctccctcaactgtggtctgcattccttcggcccgtgggctgatctggggcgggaagtattagcgtctcagttgcgct

SEQ ID NO: 33945 - DNA, 2300 bp, Homo sapien
tcccgagtcaccgtcctgagctcacgccgcccctccctgggctgctgtctggcctccttttgctgtgcgctcccagcgctctagcttctagatttgaggttttgtttgggggcaaagaaagcttttattggggagactttgtttgctttaggtctcggaattctcctcccaggcaaagcgtttctcagaagggctgcggccgcttgccaaaaaccctagcggctcccagacacgccgcgagcctgagtccacgaccccggcgcccagtcccacataggccgcgttggtagcagctgcagcagccgctgaaacccagtccggcccggagcttcccgggaagcggtctccgcagctcagaagaaactggtgtggccaataccctgcattcacacgtgtgtgcatatgtgtgcgcgcgcacgtgtgtgtgcaggagaggaggcgaacgggctgcaggagggaaggaggaaacaaaactgcccgagagttcgctttgccgcctcctttgtctccttgctcggtccctgtcacacatacagctgaggacacacacacacacacacacacacacacacacacacacaattcctctcgcatctgctctcagccagcattttcaatgttttgtctaagtcaattggacggcgaacaaaaaaagccatttgctcagtattatttaaaacagacttcattgggccacccttttgtggaaggtttatttgcactaaatgaataatcttaattgcatcactctcgaattaaaaatcaatgttaatcaagttgggagtagtaaatatcagttttcattgtgactgggtagagggcatttttcttgtgttgcaaataaaaatacaagtcaaataactttaaaagggcattatgttctgctacaaatacaattgaaacggattgtttaggagcagatcagaaatggtacagaattttgcacttaatttcctcagttatcatttacaataagaacctctaggcttgacagccaagtctaaacagtagtaaattagtacaaatttatactgattttactctaataatcgtaataaaagcttatagatttggcactaattacataaatgcctaatgatcttgaaaattactctggttagaaatatattactaatctaaactttgttgttggctggctctgaaaaatcagaacattagaaatggttcgcttcacttgtgcaaagcactttaaattgttcaagtagtttaacatattcaagaggaaaataaagagcatttaactttatttacagccttaagtggagttgggagccgagctgaacttagaaactttgaccaaaagagcgagttaggggcgaggatgcgggcgtgggccaagcggaagagcaggagccgggaagaagcccggtgagaagagtgcagagcgctcgaacccacactccgcgagggtccccaaagcagacagcgggcgctggcggtgccagggaagccgactcctctttgcgctctaggcccactgtggggttggggctcgtatagaccccagggcacagccagggcgcctggaccctaggcgcaggcctactgagccgcggcgaagtccaggcgttgtctgaaggccgcggtgtgccctcgtcgcgccctgggctggcgggccaatatgagcggcaggcccagagagcgcaggtgggggcgaccctcaggtcacgccagggtcatggcccgctctgacccctgctctgcccctgccctaggaagatgttagctcagaggcacagagctacgccttcgaagcgcgcagcgccggccaaggggaaggaaaggggagcctggagaaaatcgcagggaagaactagagggagccgggcccagaagctcagggcgaggccgaggcggctgaggctgctttagctcctgctccgggctggagctgccagggctgccgccgccgcctccttcaggcgggcgcaggcgagcgggcgggcggagtgggggactctccgggcgctgacatttgcaggctgccctcctgattggtcccctcgccgagctgctcacgggttcattcaactgttaagcacctccccgtctctctaaaggacattataatgcaagaagccccctttttaaccacaaaccgaattttctttcatttaggtgatctatatatatctatatcgtatagcttatagcttatatctattttaaataacttaaagccgctaaaatttgggggggaacagctttcgccctggagcggtgcgcgatgctgtctcatgccgacctcctggacgccaggctaggtgagtgcgcgcctc

SEQ ID NO: 33946 - DNA, 2300 bp, Homo sapien
agcagaggtcttttggctgctgacatttactgattattgatttatagtaaaggcacagatacaaatcaattaaaacaaagagaaagggggcaaaaggagggaggcagaattggggattggggggaaatagcaggtatttgtattgggaagcctagtttgagagaaactcctgcaaattagcacaaaactgagctctgagcttcttgaaaccaaagcaaaaaaggaaaatatgacgagttacatggtttttgctacctaatcaaaggaaagaccttaacggtagcaaaagccctagctgcaccatcttttggtttgtggcttgtagctgctgtttgtgtgtgtgtgtgtgtgtgtttgtgtgtgtgtgtgcatgtcattttgctttggtaagtttgctgttgtgttttatctacccctccctccagtatttcacagcgctgctgtgtgacttggaattgcacatcagtataccagccagcagaataaaaatatttattgaattctgtgcccattgtgcacaaaacacaggtggaggaggttggggaaggaagatttatggaagacaagaatcttgcctctaaacatgtttatgaaccaggatttataactacgaagctgaacaaaacccttacgaaggaccaaacaataatttgaaaaagaaatatactaaaaataatgatgactactgggtgactccaaagcatccagggaagattgaacaggtggggtgagtcatagtagactttgctcagttttgatcctggatttaaagtaacggccttgggctggcgggatagaaggggattccaggaccagtcatgaaagtgagaatgagtaagtcaggctagggaaggaaaaagacagtcatatgggtgtctttgaaggatggtaccaagaaattttaaaaagggggtgggctcggtggctcatgactgtaatcccagcacttttggagggtgaggtgggcctcacctgaggtcaggagttctagccagcctggccaacgtggtgaaaccccgtttctactaaaaatacaaaaaaaaaaaaaaaaaaaaattagccaggcatagtggaacgcgcctataattccagctactctaggggctgaggcaggagaatcacttgaacccaggaggcggaggttgcagtgagccgagatcaagccactgcacgacagagtgagaatctgtctcaaaaaaaaaaaaaagaaaaagaaaaagaaaagcaattttaaaaagggcgattctgccctgtattcctcaggagattctcttaggaagggactgctagagctcactgtagatgtgcctcattttatgcaacaaatatatttttgaacatataaaatagtcaaatgttgttcagcatctaccatgcgtcagacaatgagctaggtgttttaacccttatacctaatctgtaaaatggacattattatttccattttgcagactgatcagctgcaaggctaaacagcatacgtatcagtgttgtctagctaatagtctagctattaaagggtggaacctcgattgtaagccggtttgtctgattaggaagcccaaggttttgtgtgcgacacacattcttgtaagttaaatatttaggatacactataagtgatcatctgaagaagttctgttagtcatttcctttgaaaggcacgttatctacaaaccttcttgcagggatttgaggtaaagggcaaggattttcttgactgcgtgcatgatggcagtttgtttcactacacatgcatcactctgcctcatctgacaccagataacgacatcgaaaatacccttaatacattttttaggtcactccgtccattaagcagataatcccgcaaagcaacgtcccagagagacgttagtttccccaaaggcccaggctgtggagaccgggatagtgtaacttgcgcctgaagtaaaaagaggggcagtccgagagagaggaggagggcacgtttcactacgggtaaaggggcgcacgaggggtaaagggactggcgggagcagggtaccgccctctagtaaacccgccccgcggggcgtggcggggacgacgggccgcgcagcctgcgcatgcgcgccggcgaccacgcctaaatagccgcagcctctgcgcgtcgccctccacggttaccccggctctccgcccctccttctcgcggcgctcgagggaccatggccgatcctcgcgtgagacagatcaagatcaagaccggcgtggtgaagcggtaaggagccgggagcggcgccctgcacctcctcttcgtcacctcatggcggcccgcg

SEQ ID NO: 33947 - DNA, 2300 bp, Homo sapien
aaaaactactcagtgtaaaagtggataaataggttcatgtgcaattcccaggaaataaaatgcaaatggagtaacaatcacataaaatattctcaagttcattatggccatgagaatgaaaattaattacaatacaaataatattcatttgtatcatattgatgacaattaaacatttttagaaagctaaacgtttgtgagaatgtgaagaaagaagattatccactgctaaaagtatgctggaaaaaaatttaggatatctggtaaaagtgtacatgctctaaaaccaagaaattctgtaatcaggtatgtgtccgagattttccaggctatgtgtatatcaatgttctcattttacaaataaagtaatcaaagcctagctctttttactattaatatatataaaactacttagaacttttaatatatattaaaagttaactattttaacttaaaagtatttattttaacttaaaataaatttttttatattaaaagttaactactttaactatttatatatataaaactacttagaagttttaatatatataaaactacttatatcctggtatatattaaggattatataataatatatagttatctatgatcatcctcatcctcatcatcaatagtcagttgtaggtgaaattctattaattaatactgacaaataacacattttaggtgctcatcattggctctccggaggagtattctaacagctgaattaaaaacctgccaatatttgaccagacgatcaagtttggaggacgtcccttcctctcccacccagagccacgctcttgcgtgcttccacagtgacagtgtgaccttttgaaatttggagatcatactctcatccttgaaaacgccccaccgccttccctggggcggccggcctccaggttcgcgttctacctggtagaatcccttgacagtttcagtacctggccgccagggctttgggtgttaatgccttccttggacgggaggcactggggagaagagagggaaggcgctgaaacccacctgagaaggcgggctgggggaaggcaccccgggaaagaggttttctcgggtgccagcacccggagagagctactctggggccaggcaagcatcccgcctaggctccctagtgcatattagtgagtaacacgactggcgcgcgaggtggtccattttatttttggtagctagacgccaataggacgcaccacttcagctccaaacgggaactggtggccccaagatgttttcttttctttttcatttttttgagacagggtctcgctctgtcgcccaggctggaatgcagtggagagatctcaactcatcgctaccccctccttctgggttcgagtgatcctcccacctcagcctcagtagctgggaccacagacacgcgccaccacgccggctaatttttatattttttgcagagaaagggtctcgctatgttgcctaggctggtctcgaactcctggcctcaagtgatccacccgcctcggcctcccaaagtgctggaattactggcgtgagccaccgcgcccggtctgcccccaagactttcattgaaaagatggaatggtcgcttctgtgcggatcctccaaaccatcgttgggagaggcctccttaaagtctaggagaaaagttgtttgggaccgatatgaaagtaaggcaaagccggatggaagagagtagccgaaacaagcaagaaaaggaaaagcgatcgtgatgggtttaggaaaggtgatctggcgtgctaaatggcatttccggagaaatctgaaaactattgctttactgaagtatagcaaagagctgtccgggctctggaaactccttaacggatcaaaacggatgcaatgggtatccttctccaaagacacacctcaaacgggccgggagccgggcagttagccacccgctgcctccccttccgcagtccggctcgcagccgctcagctacctctaaagcccggagcaggaaagtccgcgcaggcctggatggcccgggtggtaatctagcaggcctgcacactgcgcatgcgcagggggtggactgccaggtcggctcagggagccgtgacgagtccggaagcgcctgcgcgcgctcctccgtacgagaactagttttgttccgtgccctctggactggaaccttttggagagaacccccggcaggaccaaccccgcacccgccagcaccgcggcaatgtccagcaatagttttccttacaatgagcagtccggaggaggggaggcgacggagctgggtcaggaggcgacc

SEQ ID NO: 33948 - DNA, 2300 bp, Homo sapien
tgtctgcatcttcaacaggtattccaaatgattctataacagtaaagtctgtaaacctttgcattaggtgcaaatatcattagctgtaaacagaacatagttggaaatttccatcctgcaatgcgggctcagctgaccctcattgtcttggaacatagtagatgcataataaatagtgcagattattttgagtcatttggaggacaggtggagggagtgagggcaaaagtggtgagagaagcagatgagctgggcaaggacatgcttgctcaggagaagggaggcaaagcgtataagaacatactgagcctccttgccactttcgacgttcaaccaatatttgttaggcactaaatatacatgcaggacacttttctgtatgttgtttcatttaattcttaaataatcctttacagactcagagaggtgaagagagtagcacaggtagtatcagaattgggattcaaacctgacacatacactgagcactaagttaaaaccgggcactgggcagctgctgaggatgcgatggtgagtacaacagactgcttgctctttttgatatctagaatcgtacagctctgctgtgctcatccttgtctgttgtcatttactagttgacatcttcgttgactacctagaagcagctgcttcgacatctatcccaacctgaatcccgtcaaagggagattacaacaaatgtgctttttgtctatcatctctagctagtgtttcacagtggggggagtatcatttcctgggtgactttgcatagagcaagctccccaaaggccaaggaatactcaatctagattcttccaatcctccggtacccaccaagtcaaaagaattctggctccctgtagcttcatctaagtgcttttctgttagaggagaaaagtgaggaaagcgatgctctttcaataagttcggcagggtggggcaaggaatggtacaaattgattttttttttttcttgagacagagtctcgctctgtctcccaggctggagtgcagtggcccggtctcggctcactgcgacctccacctcccggattcaagcgattctcctgccttagcctccagagtagctgggactacaggcgtacgccaccactcccggctaatttctgtatttttagtagagacgggggtttcaccatattggccaggctggtttcgaactcatgaccttgtgattcgcccgcctcggcctcccaaagtgttgggattacaggcgtaagccaccgcgcccggccggtacaaattaatttaacacatcttttgataatctcatccttggtgttggaaaagacgggaaaatccaaaagtgtctattttgtgcccaaatgctcaagttaatactcgagggccttgatctctggcctcttgccatccctctccccattatttctgaagaagtagccattttgcagattccggaggatgggagccacggccggcccctggtactgaatctcatctccttctcaaggctccttggatcaagttgggaccggcagcgccaaggctgctctccgtgatttagcagcaacctagagtcagagagaccggaagatgggaggccgggattctcaggtggggtcaggggtatgcaaaaatccttagcagcggccgcgcccccgccccggggaggtaatttgcggagggcggtgcagtagcctctccagtgcccgcgtcccacggtctaacggcactgctcccggggtgcgcggcccacgactcaggctgcctcccccaacctgacaagtgtgcgtccttaccacaaaatgccaccacttccctaagtgacgctgggccccgaggacctgatttgaaatcggtgttcagaagaccgagcccggctggacgcagctggcctccggctgagagcggaggggaagggttccatactctccgaggatcccgcgggctcgtggcgtgtggaacgcttttcatcgctttcagttcccgtttccttcgccccgactgcctactcggtcgcagctaaagcccggagcgtgggatccgggcccggaggaacgggatggcgaacgcgagctgcgccgcggccaggagcccgccgcaccgggcatgctcagtggcgcggccggctgggtggcccgcgagctgcacccggatctgctcggcggcggcgacgtgagcgcgcaggggggcggcggcctcgcctcgtctctctctctgcgcctgggtcgggtgggtgacgccgagagccagagagatgtcggatttcgacagtaacccgtttgccgacccggatctcaacaatcccttcaagg

SEQ ID NO: 33949 - DNA, 2300 bp, Homo sapien
tcctgggtttagaattactacagcaactttatgaatgtcagaagaggaaaagtgtcatggcaatatcagatgtcacaaaaggacagtctgggctaagatgaagacaatgttttgccctaacaagagagccagttaatatgaaatgaaccatgaaatggaatgaccaagtagaaaatacactgccaaatcgtcagatgctgaataaacagcgtcagtgaattatctgaattaggaaaggctaaaaggttcttgatgttttatcttcaaaatattttaaaataacacccatttaacaatttatgaacggtctctttagaaagtctaccatttaagaactacctgattttccacaacatggaagcaagtccaatactaattgaaacaaaactgccaggaaaaaaaaaaaagtcttaaaatgcaaccatgtcactgaaaggtacaggccagttgtactgaattttaagtgacattagggacaatgaaacagtgactgagtctaattctacactgctacaaagtgagtcgagttgtcaataataatcagggtcatttcattaaaataatcctccttggaattatcaggcatttaataatcagagcagaaatagttttcctcttccaggattcttaatgaaagataaaaccaggagtaaaaagatgtaaactcaacaagccagaagtgacacttgtgtgaccacaaattagagttcctgttttattctgtgtgactgcaaattaaagttactactgcacatggccggggggattgagaaacaacttcaaccaacagttggaaacaaattacacgtgctaacagttacactcattaggaaattcagaatactttcaaagagagagttatttagatgttgcattcatttaaacgcagacgatgaatatctcagccgccttcctttgcaggattctgtgccaagcccttccgaagccggggttgataaggtcgactccaagaagaaaagcagctcaagtaggaaatggtatcctcacatagcccagagaaccggtgacgcactaggagcttggaaaatatcccatcgtttaccttgctagaagcagctgggtagggaagaggtcgtccacgtgcactattgttttccagatatgtttatttttaagttttgctttggtatcaataacctcaacctcaacctaacagaaagaggggggatggcagcgccactggtggtatttgggtgcaacacaagtttaaaaaataaaaacataacctttttttttttaattgcagcatactcggtgccctcacctctctcctcctccacacctctgccatcaccccacgcagctctccgccgccgccacctcgggtccccatgacaaccccaccccagggcgggcccccctccgccgactcccggccctgccagccacacttgcttggcaaggggcgactctacctgccctcggctttctctcctgagaggcgggccaggacccctccgggcgcgcgggcccagtcccggctgcagacacgaccctcaccagtcggggacgtgtggaagggcgaccgggcacgagctgaggaggttccacccccaagccccaaaacccaaaggagtgacacggggccggggcgcgaccccaaatggaggacggcggccccgcgcccctctctgggctgctaaggggagccgaggggcagacgcagtgggcgcgaaggaactcgtccgttttcacaaacaacgacgcgtcgcggcggcaggagatgctggggccgaagctcaccttgaagggattgttgagatccgggtcggcaaacgggttactgtcgaaatccgacatctctctggctctcggcgtcacccacccgacccaggcgcagagagagagacgaggcgaggccgccgcccccctgcgcgctcacgtcgccgccgccgagcagatccgggtgcagctcgcgggccacccagccggccgcgccactgagcatgcccggtgcggcgggctcctggccgcggcgcagctcgcgttcgccatcccgttcctccgggcccggatcccacgctccgggctttagctgcgaccgagtaggcagtcggggcgaaggaaacgggaactgaaagcgatgaaaagcgttccacacgccacgagcccgcgggatcctcggagagtatggaacccttcccctccgctctcagccggaggccagctgcgtccagccgggctcggtcttctgaacaccgatttcaaatcaggtcctcggggcccagcgtcacttagggaagtggtggcattttgtggtaaggacgcacacttgtcag

SEQ ID NO: 33950 - DNA, 2300 bp, Homo sapien
attaatgagactaccacccttcccttaatggatgagataattttccttaaaatcttttaggagcattcttcatgtatgtcaagttgttttggaatgtgagaagtgtttcctaatggatagtctatttttaactcttcattagtatttttcgagatattcttgatctaatatcttttgctgaatcctcagtgtcagtagtatatatttttaatattaaatgtctgattccatatatgtacatgctaaccaactcttatttaatcaatataatatatgcatttatattttatatatgtttatttttttaaatgggcagaaattgtcctagcattttattttattttgagacagagtcttgctttgttgcctaggctggagtgcaatggcacgatcttggttcactgcaacctccgcttcccgggttcaagtgattctcgtgcctcagcctcctgagtagctgggactacaggcacatgccatcacgcctggctaatttttgtattttcatctatacttggaataattttcatgaactttaaagtgtaattatacatatattttatctttctttcagtggattaggaaataacctaatttgaaaattgaaatttaagttagaatgttcttaaggtctaaaactttttaaggcagctggatgctatttaatgctgcagagtaataattttctatttcacaatcttcaattctgtttttaagatcttaacacaaccacccttattttgaggccaagggttttgagtaaatttattatgagcaagcattcctgagagttaaaaatcctaatgggactagagtaatgagtgagagtgtctcttttgtgatagaattgaatgggattttaaagtgggaaaagctcctgcatttctatggctgaaaaattgaagcttacagaggttgagtgattggcttaatattagatgactacaacctaagtgacttcatctggagctctttttaaaaaaaaacaaaaaacaaaactctagagcttgtttacttatctggtgggttaggtaagagcaaatttaggcatcccagaatgtgtgtgtgtatcctgtttcattaattattaacttatttgatttgtaaagaaatcttaaagtttgagatttaaaaaactagatccaataggttttcccagttgttaattttaattcaagtaatttgttggcatatttttattgatttgataatttacattaaacatcattttagcttatataagaatgtacttactataataaattcagcctgtgaataaatttttaaaaaatcctttgaaacagttattaattacaatgggtcaaagtagttctttaggatcatggtatagttagatgttactcagattttttgtttttggtctgtcagggaaagcaattattaacagcatatgatgaatttgtcaacatctatttgtgttaaccaaaagaaaagcctgccacagtagctaaaatgtatcatgttgtgtgggggagtgaggaggggacttaataaatttaatcctctaccaaaacgcaagtttttttcaggattttacaaatggacagctctatgaagttgaatgaacaatccttatacattgactatatagtcactagaaattgctactgtattagtatttttagtccagtgtttagtctgcagccccattctgtaaagatatggtttttcctcctaagtcctgggtcttttcctggcagacactgcttttcttcttgggcttcagatcaagagacatcacgtttccttttcgggaagaagcccttaaggtagtgcgcctctggtttagctacatcattgcctgtgaggaggagagggccaacagaatttttgccaaacagtacatgtattaagactcgctttcctgtgtatactctgttttcaaatcaaatatgtaagatacaacagtgttttgaaaaatataaatggaaacatggagtagaatacatttgctcttaggaagtatttttttatttacaattttttgttggatgaattcataaattgaatgtaaatctttctttttctattttgttttctgattccacagtccatgcagtaacactgtttctaaatatcttcggatgcttggcttggttttgtgttgattctgcaagagcggttgattttggattgagtatcctgtggttcttgctttttactccttgttcatttgtctgttggtacagaccactttatggagctttcaggtaaaatgtgtgtactttaaaatacactctttaaaacctgtgaagtaaataattcgtagtatacattaa

SEQ ID NO: 33951 - DNA, 2300 bp, Homo sapien
taggtctgcttggtgcagagctgagttcaattcctgggtatccttattgactttctgtcttgttgatctgtctaatgttgacagtggggtgttaaagtctcccattattaatgtgtgggagtctaagtctctttgtaggtcactcaggacttgctttatgaatctgggtgctcctgtattgggtgcatatatatttaggatagttagctcttcttgttgaattgatccctttaccattatgtaatggccttctttgtctcttttgatctttgttggtttaaagtctgttttatcagagagtaggattgcaacccctgcctttttttgttttccatttgcttggtagatcttcctccatccttttattttgagcctatgtgtgtctctgcacatgagatgggtttcctgaatacagcacactgatgggtcttgactctttatccaatttgccagtctgtgtcttttaattggagcatttagtccatttacatttaaagttaatattgttatgtgtgaatttgatcctgtcattatgatgttagctggtgattttgctcgttagttgatgcagtttcttcctagtctcgatggtctttacattttggcatgattttgcagcggctggtaccggttgttcttttccatgtttagcgtttccttcaggaactcttttagggcaggcctggtggtgacaaaatctctcagcatttgcttgtttgtaaagtattttatttctccttcacttatgaagtttagtttggctggatatgaaattctgggttgaaaattcttttctttaagaatgttgaatattggcccccactctcttctggcttgtagggtttctgccgacagatctgctgttagtctgatgggcttccctttgagggtaacccgacctttctctctggctgcccttaacattttttccttcatttcaactttggtgaatctgacaataatgtgtcttggagttgctcttcttgaggagtatctttgtggtggtctctgtatttcctgaatctgagcgttggcctgccttgctagattggggaagttctcctggataatatcctgcagagtgttttccaacttggttccattctccccatcactttcaggtacaccaatcagacgtagattaggtcttttcacatagtcccatatttcttggaggctttgctcatttctttttattcttttttctctaaacttcccttcttgcttcatttcattcatttcatcttccattgctgataccctttcttccagttgatcgcatgggctcctgaggcttctgcattcttcacgtagttctcgagccttggttttcagctccatcagctcctttaagcacttctctgtattggttattctagttatgcattcttctaaatttttttcaaagttttcaacttctttgcctttggtttgaatgtcctcccgtagctcagagtaatttgatcgtctgaagccttcttctctcaactcgtcaaagtcattctccatccagctttgttccgttgctggtgaggaactgcgttcctttggtagaggagaggcgctctgcgttttagagtttccagtttttctgttctgttttttccccgtctttgtggttttatctacttttggtctttgatgatggtgatgtacagatgggtttttggtgtggatgtcctttctgtttgttagttttccttctaacagacaggaccctcagctgcaggtctgttggaataccctgtcgtgtaaggtgtcagtgtgcccctgctggggggtgcctcccagttaggctgctcgggggtcaggggtcagggacccagttgaggaggcagtctgcccgttctcagatctccagctgcgtgctgggagaaccactgctctcttcaaagctgtcagacagggacatttaagtctgcagaggttactgctgactttttgtttgtctgtgccctgcccccagaggtggagccttcagaggcaggcagtcctccttgagctgtggtgggctccacccagttcgagcttcccggctgctttgtttacctaagcaagcctgggcaatggtgggcgcccctcccccagcctcgctgccgccttgcagtttgatctcagattgctgtgctagcaatcagcgagactccgtgggcgtaggaccctccgagccaggtgcaggatataatctcgtggtgcgccattttttaagccggtccgaaaggcgcaatattcgggtgggagtgacccgattttccaggtgcgtctgtcacccctttctttgactcggaaagggaactccc

SEQ ID NO: 33952 - DNA, 2300 bp, Homo sapien
tgtttggtactatctggaggagggagctgagaatgagtgagtcggagtaggatataccttctggctgaatgctaatttatctccaccagttggatataaattatccagcttgtggagataaattagcattcagccagaaggtatatccaatataaaaacaccagctgagttaggtagtggggaaacaggaagaccaggactctgcccttgaaggctgcaaggtaagtttagacatgaatgacttcgtccatctctaagtagcctgtgcttaatgttttctgtgtgcagtggccaggtttctgtaatctgctgggcacctcagttggatcaatagttgtctgaacggtgtcatctatgttacaggaaaagcttcggagggcagggagttgatatttgttgagcacttactctgccaggcactgtgctgggtgcttcagtaggttcttgttcattccttgcaacaatctggtgaggtaggctacccttaccggctcagacgagggagctctgagaagttaggcatccatatggtcagtgctggagctggctttggaacccatacctgatggactcccttcccttacccagtgcttggcacagcgctgtgacacacgcacacacaccctgacaattaagtgcatatgttcctagtagtgcactagctgtgtccccaaaatagcatcttgtatagcaactaccatgatatgaggattttaaaatacatcatgtttcaagggatgggtagagtcacatgctcactaggaagtcagccagcaggcagacagctggtgcagggtgtagaaacgggcattttaagctttgacactgggcttccttatttctccgcttctcttcctcttcgataactccctgcctcaccccactcccaacatgccagggggctctttgcagttctcatggagttgatttgacctcggttaatgagatctaatcattcagagcagggccatgtgcccagatgtgagctatgtgattgttcctggccttggaatggggcagaaaatggggctgcaaaccagccctgctggcccccatttcagggtccagactcctctgaagaaggcttgagccactggagcaatgtcttctggtaatgaagtcattcctccgtggagacagaatgaggcctctgtgaaatgagaaacaatgggcatgttgagttcccgacctggggtgaatcgaagcttaggcagaggcacatgggatgaattgggacaattcaagggatgcattcttcatagacaaggttctgttgtcaacaagtccactcagttgtaatgatgcttagttaacggtcattaatgtcttttaaaaataatttccccaagtaagtcatgaactcttaaggttttttttttttcccctctgagttttaattagtgtaaattattttgtctaaaaatcaccctgtgaaaaatggataaagtataggtatgggagcaatgttttgtttattcttttacatgtgattctttcctatttacctatgaagcaaacacacttatgtctctgctagtaatttaatttcgaggaaataaaagcggggtgttgctactctctactgttaagcaaaagcgcttggtccaagtttctcaaaacttagctcacctagtaccaaaacagcaggcaaaaagtcttgcaaacttaaaaacaaaacaaaacatccactaatagagttgattgccagtcttgcctcctcctctctggatccctgtgctgtttgactttttccagtaaaagatgagggagcgggagccctgtcctaaaagtgcagcagcaaccaggacagtgccccctgggttgggagcaggacctggcactggccgcctccttccatggtgctccctagagataaggttaactgccacatagagttctaagtgcagtgaggtcaggaagaacttgaaacaaacgcagccagtgcaacaaccgcctggcatgctagccaggcccggggcttgctggcagggttctgcgggcacgggccggacttggacggtgtcgctgcgcggcgggaaggcggggcggggcctggcggcgctgctaaccgccctccctctcccctaggtgaggccgcaggcggtgctctgggtccgggagcgctgtccccagcatgaacgcggccggcggcgggagtgaatgactgcagctgcgacttccttcccgggccgcccgagcctccttccccaccgactttcttgttttgattaactccgtggactcctgactctttcttcgcccggaacatcaatatgtgtcatgtcattgtcacctgtcgc

SEQ ID NO: 33953 - DNA, 2300 bp, Homo sapien
acaattccttagaaatttctacttcctcttttatcatttatgaggtgttttttcccacggaattccccgttcctctagattcacttttattccatcctttgaaattgcagttaggcttccaggagatgtttccctgatgattttacaatgtaagaaaagggtttaaaaatatttgacacccaagaaggaatggtaggatgttttgagtccaagttagtaaattggccactgactgctctgtcttttggtgaatcaccattgtttagtgaatgaggtaagaatcactaattctaagaagctgtttcagcagcaagataaaaataaattctctctattccctttgtcagacattctgtccaatatgagaataaatacagaagtatggctgggcacggtgactgacgcctgtaatcccagcactttgggaggctgagatgggcagatcacttgagatgaggagttccagaccagcctggccaacatggcaaaacctcgtgtctaccaaaaatacaaaaattagccgagcctggtggtgggaacctgtaatcccagccattcagggggctgaggcaagagaatttcttgaacccgggaggcggagattgcagtgagccgagatcatgccactgcactccagcttgggcaacagagtgagaatccatctcaaaataaataaataaataaataaaaataaataaaacagaagtaaagaggatcctttttcagtcttgtgttcagcatccagtgtctccctgtgccttcactgcattccggcgctctccctctccatgcatagggactattttggagtttgggccctgaattgagactgctcttgactgttcttggtcttgtgagagctctcttcataacggcctgaatccttggtttgagtttgccctcctctcatgaatcttcacccactattgggatcatcatgttctcatgactagagtattagttcaatgtcttccgtgccatggctgttgaaagtggagaacctggttgtgaagatggatgagccttttcttttcaaaggagtagaaaattgtatgggaggctccagattggtggccaacaggcaggtaagaagtagcgtggtttgctagtggtccagtagcctgtgtgcaagcttggcctcctgatccactatgggttatattatttattgttattgaatttcaaacgtggaatttattcagagtgaattgtaacatttgttctgtaggaatcaagacttctgtcaatgctcagaaatactgtacctgaagaaaacaacccccagttttttgcatataacttctaggaaagtttttcaaggatcaagatgattttgagtggaagtttcttaatgtctaattactggagagctgcactgtggtgacctttagagtcataacccccactcaggaattaccatattgtgtgctacttccacatattggaaggtattttagacatggatgcaacatttatgggacatgtattaaggcagcaagacaaaatatattcaactggaactgttctaaaaatccagaactcatgaccagactttccaaaatcgtgttacaggaaagtggtcttcctccgcctctataaacttactcctgatgaaagaaaatcgagcagaatttattgttattggagggctactcagagtcttcagcatgccaatgtgtgttgtggctcttcaaggggatacaggactcagtgtctgtcctgggattgctttgatctcagagtacctatggccctgccccagaactcctataactctgacccagttggggagatgctgacatgtggtaggttaaaaatggttgcacattctttttcactctgccattaataactggagtcttatttccctgccccttgggtctgggctggccttctgacttcccttcatggctgaaatgtggcagaagtattgtgtaagttctagagtctcagcctcaaagggtctgactacttccactttcaccttcttggaactctgctctgagacctctgtgtaagtaagccagtctcgccccagaaggataaggggcctgcagaggagagccaaggttcccctgttggcaggcagcattcatgaccagacacgtgaaggaagcctttgtgggccttcctgcgcagctgactagctgaaagccatcgtgagccagcccaggagaaaccagcagaggaacagccagccgaaccctgggattgtgagaaataatcaggtattttaagctatgaaatgttaaggcactttgttactcaacaatagttaacagatacaaccaacataagca

SEQ ID NO: 33954 - DNA, 2300 bp, Homo sapien
gttctagcacagtttttttttcttatctataaagcatttcaactccctgtatgcatttcacttcttttaaagaaattgaaatggaagactatgtaacaattgttttgaaattgtacattgtcttttttgtatagttaacacactaccaaatgttatctttagataccctgtgctggtggtattttattttattttccttttgagatgaagtctctctctgtcacccaggctggagtacaatggcatgatctcagctcactgcaaccttgtcctcctgggttcaagcgattctcccatctcagcctcctgagtagctgggactacaggtgcacgccaccacacctggctaattttttgtatttttagtagagatggggtttcaccatgttggccaggctggtctcgaactcctgacctcaagggatctgcctgccttggcctcccaaagtgctgagattacaggcgtgagccaccatgcccgaccctgatgatattttcaatagccactaacctctcctgatacagtatggggcttgtaaactggcatgtaaatttaaagcaggctgtcgttggtgcacagcacaaattagtcaatatatggggttagtagtgttttcatcttcagttgtctctgatgcagcttatgtgaatgttctgctaactgaacacttctgtaatttcaaaaaaaaaaagttgtggctgttttgttgacataatgaatgcttctaagtaaatacaatcttttttattaaaaaaaaacagcaatttttcctgcatttgagacatgtcagccttagaaaggcaaagaaggaatcaaaggtaggatctgaccatcgacttataaaagccagattgtgtccagagaagagtcttagctggcatttgaaatacttgattctcttttggtatagaagatgtggctgaaagaggaaagaaaagagtgaatacttggttcatcatgcaccttcaaggttttgttttttctttttttttcattactttaaaaattgcaataatacatgataagataacacataagtttggagtctagaaggcttggaaaggtatagtgcagccagggcgctgacagtagttgttggactagagtcaaggttgtgctgggaagtacctgagggtttggggtcttgagcactgagcgaagggagtctgtatttcatctcgaaagctgtgtgaaggttggagcatttgtagcaggtgaatgctgtgatcatattgcactttagaaacagctccatggccataaggtgggctaggtaacaaggaggggggggaacaaggtgagctgggaggctagtaccagagtgcagaaatcctggcaggactgggtggtggagagaggagaggcctgcagatattgaccccacttcctgttcatctaggagagggagtgcactttgactgttatgggtcatggcacctttcattgaggtaagcagttgtgggaacctcagtttggagagagatggcaaggagtaatgagttcagttgaatccaaaactgaactacaagccctccaagaagagatgtccagcaaaaagtgggatttagaggcaggaggcgaggtctggagctagagatgatagagggagttctttttacggtagtggcaagtgtttgtagggaggcctccctctcttgcttggcgtgttgaggtttactaactgatgctaggtgcaagagtaatttgtgtccttgtaagtgaaattttctctttcatccctttaccaggcctgactggcttgattgtccatcaagcccttgactttagcctcaaatgaccaggcttgtactgatgttattttgcagacttggtgagttctgcttgttattttaaactgagctagttaagagggatgtacctggaatggttgtgaatgtgtttgatagctaggatgtgtaactgacaaaattgataccatacacgtgtctgttaaggactgaatatttgtgtcccccagattcatgtatatgttgaagccctaacccgctatgtgatggtatttggaggcaggacctttgggaggtaattaggcttagatgagatactgagggtgggacctccataataagatcagtgtcattatgagaaaaggaagagagaccagagctcactctccagtgtgtgaggatgcagcaaaaaggcgactgtctgtctgcaagccaggaagagggccctcatcaggaaccaaatctcctggcaccttaatcttggacttcccagccttcagaactgtgagaaataaatgtttgtcatttaagctacccaatctatggtattt

SEQ ID NO: 33955 - DNA, 2300 bp, Homo sapien
ttacacctgtaatcccagcactatggaaggccgatgggggtggatcacctgaggtcaggagctcgagggcatccttgccaacatggtgaaaccctgtctctactaaaaatacaaaaattagccgggcaaggtggcatgtgcctgtagtcccagctactcgggaggctgaggcaaaagaatctcttgaaccctggaggccgagattgtagtgagctgagatcgcgccactccactccagcctgggcgacaggatgagactccgtctaaaaaaaaaagaatcagtgttgcttggagaaatgtctgattccaggattgggagaggaaaagtgcaagttgaggctagaaaatctcattgtatcaaaatgtgtggacatgctcaaagattcaagaggacatgccaaaaggatatgagccagattgtaggggctcccactggccaaaacagagaaaatttgagcattgaaataactatagcaaaggattatagcatattgattaaaacaagaattcatgaattcatagtgaaataaataaatgagaagggaaagttcttccttacagtagaaaggcaactcataaatatagaggaaatgaaggaattagaaaatcagcatttggtagccatcctaattataactaattgaagcaagaagcaagatactaaaactggtaagcaaaataatgtgtgtgaggcataataggatatttacatattctcaaattatctctccataaaatatttattaattacaagaagaaaatattaaccttacaatgaggaaatgtttaccttaacaaagttatcccataagaaagcaattcagcatcatgtgcctcttaataggaagcaccgagaaacataccacatcactttttgtggtattcctgcacaaatccataacctctatctaattgtgaagaaacatcaaactccaattgagagattttataaaataactagcttgtactgcacattatgtgttcaatacatagatggaaaatagaattaactcttcaatttgcacatttccagagcactattaacatatgcttttattttaaaaacataggacgtaagaatctgtgcaagtttagctagtttcaggggaagttggttaaaggaggaattgttcctgcagattagcacccatcaattatttcttcttaatttttatcaaggagaataggaaggattacgggggagaaagacacaaaaccacagcggaaattctcagtccttcaaggtcttctacagggtgtttaaatgaaaagttcaacccttgacataatgagtcaaacagttctctcaaaagttattctttgaatttaatgctaaaattttcacttttttctgctaaatttcattgattccactagagattaaagtgcatacaacataaactaatctacttcatgcaaagaaaaaaagtgtatgtaagaggcaaacatttcatgtgttaaaggattcttggggaaaaaaaggtaaaatcatgaccctcatacaaatataaaagtgaatacatgattttatttaactcattaataaggaaattggtaaggtgttaaaaccaattcaaaggacaatccaaagaacagatcaggaatactaaaataaatatgcaagcggaggtgaaactgttttccttggtagtggtggaggggaaggattgctactccgctggataaagttcatttgtgtatatataaataagaattattttccattgttatttatctataacttataaagttgtaaacaacttccacggaatcagactcaacctggaagggtatggtctctaggcaatgcaaaaattttcccctacacctgttaacaactataatatctccagacagagtagacagaaagtctggatggcaacgggaatctactggtcatacggctaacttcctaattcaataagcacgtgactaaaggattttttccttccactcagatatttcaggctaactagatactgtgtgcttcttagtgtcactgcttagtgggggagccagctctgagtggggtcatatccggacaagcgaatgagctatttattcaatgaccacgcaacactccaaatcctcccagggcaacttgaaagtaaccgcaccttccaaagggcaccgtgcaatcagactgtgtgtttggcctcctgtttgctagtggggaggaagcggcttcatgggtgtacactacgcataaatgaatgtgaaaggctatttagacctctgccttttcaccgtcctcccacctgccacaggctgggctcttgtgctagaaatgacttgctagc

SEQ ID NO: 33956 - DNA, 2300 bp, Homo sapien
ggcttgatagctcctatctttttaccactgaatactattccattgtctggatgtaccaccgtttatcctttcacctaccgaaggatatcttcattgcttccaagtttttgaaactatgaataaagctactataaacatgtgtgcaggttcttgtgtggatataagttttcacctccttcagatagataccaaggagtgtgactgctggattgtaggctaagaataggtctagttttgtaagaaattgccaaactgttttcactatactactcagttgctagtgatgaaaactggtacaacccatacacatatagaaacgaggggaaatagaattagaggtactcattataaactcatggttttatacatatgtttagatatagtatgtgggtgtggtgtatgtataaacacttatatatgtatgtgtgagtgtgtgtgtatatatatatatatatatagttcctgtctttgtcttgagagagatcccagaagtgatgacagcccagtagcaatgagcacatctaaaacacagagattggtttctcaatgtcatccctaaaaagaataagcgttctggccaggcgtggtggcttacacctgtaatcccagcactatggaaggccgatgggggtggatcacctgaggtcaggagctcgagggcatccttgccaacatggtgaaaccctgtctctactaaaaatacaaaaattagccgggcaaggtggcatgtgcctgtagtcccagctactcgggaggctgaggcaaaagaatctcttgaaccctggaggccgagattgtagtgagctgagatcgcgccactccactccagcctgggcgacaggatgagactccgtctaaaaaaaaaagaatcagtgttgcttggagaaatgtctgattccaggattgggagaggaaaagtgcaagttgaggctagaaaatctcattgtatcaaaatgtgtggacatgctcaaagattcaagaggacatgccaaaaggatatgagccagattgtaggggctcccactggccaaaacagagaaaatttgagcattgaaataactatagcaaaggattatagcatattgattaaaacaagaattcatgaattcatagtgaaataaataaatgagaagggaaagttcttccttacagtagaaaggcaactcataaatatagaggaaatgaaggaattagaaaatcagcatttggtagccatcctaattataactaattgaagcaagaagcaagatactaaaactggtaagcaaaataatgtgtgtgaggcataataggatatttacatattctcaaattatctctccataaaatatttattaattacaagaagaaaatattaaccttacaatgaggaaatgtttaccttaacaaagttatcccataagaaagcaattcagcatcatgtgcctcttaataggaagcaccgagaaacataccacatcactttttgtggtattcctgcacaaatccataacctctatctaattgtgaagaaacatcaaactccaattgagagattttataaaataactagcttgtactgcacattatgtgttcaatacatagatggaaaatagaattaactcttcaatttgcacatttccagagcactattaacatatgcttttattttaaaaacataggacgtaagaatctgtgcaagtttagctagtttcaggggaagttggttaaaggaggaattgttcctgcagattagcacccatcaattatttcttcttaatttttatcaaggagaataggaaggattacgggggagaaagacacaaaaccacagcggaaattctcagtccttcaaggtcttctacagggtgtttaaatgaaaagttcaacccttgacataatgagtcaaacagttctctcaaaagttattctttgaatttaatgctaaaattttcacttttttctgctaaatttcattgattccactagagattaaagtgcatacaacataaactaatctacttcatgcaaagaaaaaaagtgtatgtaagaggcaaacatttcatgtgttaaaggattcttggggaaaaaaaggtaaaatcatgaccctcatacaaatataaaagtgaatacatgattttatttaactcattaataaggaaattggtaaggtgttaaaaccaattcaaaggacaatccaaagaacagatcaggaatactaaaataaatatgcaagcggaggtgaaactgttttccttggtagtggtggaggggaaggattgctactccgctggataaagttcatttgtgtatatataaat

SEQ ID NO: 33957 - DNA, 2300 bp, Homo sapien
cggggtttcaccatgttggccaggctggtctcgaactcttgacctcatgatctgcccaccttggcctcccaagatacttttctatatagtcatacataggactatatagcacatagtcctaaaccttccatctaaatcatcccatttctgaatctctgtacaacgctatccatgttaacttgtagggacttaacatgtatgtttattggctggctctcactttactcacatagttcacattgcttcttaaaacctgtcatgagccttatgctctggtgtgctcaaactggtgctgatgtgttctcatcccaaaggactggctggtgcttctcagtttctttccagcattaaattattgcttaacagataaactgtcaacattttgagaatgttaattttttttcagtatttcttttcctctctgcttttaaggcaggtttaacaacttactttcatcctggaataaacttgaagaaaatacattatgatagcatcaaactttatgagaaactggaagaagaaactggtcaggtaaaggcatttaacttgaaactgtctgttaggtcggcttctcagaaacatgtaagatttctgaaggattttgatgcatcattgtgtatgaccgtgtggagtgcttaatgtagtagaggaatatgatgagagtttaaggtaagaacctctagagtctgctttaaaatcaacttaatttctcaaagtatattattcatgtcatgaaccattctttattttttaaatgaagaaagaataaaaagcagctttcaaaagtatctttagccagttactatatctagaaactaagaaattggagtctttcagcaattgcattgcaaaggatctgacgatagaatgtaccagattgtcccatgactctgaacagtacttcattaagagcccctcactttcatgtttatcccttctcatatttactcaaactctcaaaataaaatggcaggcaaaagagtatccataggctaagactgaggtctcaaattttccatgtcacttcccttgcctaaaccatccaatggctccccacagtctaccagacaaagccaaaggattagcatggccttaggaacatgacctttgtcagctgacctctgcctgctgtcccaactgtttctttttccattcttccctctgcttatctgcttcagctactctcaataacatatagttttggaatgtgctgagctctctcaaatcactgctttttgtttttgttgtgttctgttttctgctgcttcccctggccccatcttcggcatccaccttccctggggtcaccacctttgagaagccttccttgacttttcctgcctgctaggcaagtcaaagctggaggtcccatctcttggttctcagagcatttgtgcacacctcttttataacttgaatctctctctattgtaattgttgatttacttgttggtcctccctacaagtaacttgagggcaagggctatatcttttatctctgtaactgagtgcttggcaaactgaaggactttaataaatgtcaaatgaatgtttacttcaattcagacaatctaagcattgcaacattttgattctacatgatctctccttaaattttttgtctttctctttttcatacagtttttgttcacgctgtacattaacactcattccatgctactgtgattttgcatttagctgtctgtcttcaactgtggggtataaattccacttaggcagagtctttacctttcttgttcacccctacacctgtggggcttagaatagtgcctggctccgaacaggcacttagtaaatatggtagttgctgaataagtgtcttttaataagatgcaaatattttaatagttatttctttcactcgtaataaatctttttgtacagctgcattttcattatactggagcagaaccatgtttgagtaccaaacaatgacttatttatatgctctcactggaattattgtcacaggtggtgggattccatcagccaggtagtatcagacttgctaccacccctgtaagggtagatgaatttaaatatcaaatgactcggactggctggcatgcaacagaacagtatctcattgaacctgaaaaaattcaagagatgttccctttactcaacatgaataaggtatttatcttaagggcatttttaccatttgttgacttaagtaaaaattagaaaaagttattaagaagttaactaaaaacagaaaacttggtacacacattttaaatgtgacaaaatcatatgattaattttggaatttgggt

SEQ ID NO: 33958 - DNA, 2300 bp, Homo sapien
gtttcagactaggtatagtgtttttgattatgtggataactatcttaaaatccttctgaatgtagtcgaggatgtttataagagtatttgaaataaaacttaggagccatgcaaaaaacccaggtcagttatcttctgtattagaaatgataagcacaaactgtatgcttgttcaactgctttccaaaataaaacattttttgatagtttgaaattgggtatataaagaatatgcaattgaaataactcaacttttgggtgtttttgtttttgtttgtgagatggaatccctgtcgcccaggctggagtgcagtggtgcaatctcggttctcactgcagtctccgcctcccaggttcaagcgattctcccgcctcagcctcccaagcagcttggactacaggtgcacaccatgacacccagttaatttttgcatttttattagagacagagtttcaccatgttgatcaggctggtctcaaactcctggcctcaagtaatctgcccacctcagcttcccaaagtgctgagattacaggcatgagccaccacactcagccaaaatatgaattttttggatagtcttgaaatttgtatcttatttatctaatcagtttgtttgttaaatttccattttattttgcactggattaaaaacatcattattataaatatttttgcattgctttacaatttacaaagcactttcacatgcattctcttatttaatattcacagcaatcctgtgagttatatagagcaaaattagtatcctcattttatagatgaggaaactgaacctcagaagtgtaaggtcacattctgtgtaacagatggcgcaggaactgtgagttggtggctactgcattcccagtactggagacaaacctagcacatcacaacacccagtaaatatttgttgaatggatagatggaactcaaaagcaggtcttctgattccagaatttcaggtcataggacataaaataaaattcgaatcaactcataataatgttgagtgatgctgataaacaagcctttcctggcaaccaggaataatctacaaatataagaagtcgaaagatgttcagcattgctcatatttaaatacagaccaatcaaaacaaggacatgccatttttacctatcagatttagcaaagataacaaaatgggctattctgggaaccagggaagatgtgggaaacagacacacactggtgtgccgcatgcaaactcttgccacccacttggagaatgtgttgctgtctttcaatctttcagatgcacgtaaccttttccctaacaagttcacctttaaaaactgttgctaccgactcccatatgtactcaaagatagatgcctaagaattttcacatgcacgttatttgcagtaataaacaaccaaaaaccatttaaatgttaatgaatagactaacgatagtgtagaatattgacaggatggaaaactatgcagccattaaaaggaacaaggcaagtcagtgtgtgctgatatggaacaatctccaagatatattgataattgtaaaaagcaagatgtcaaaaagccaaaggaaaacctatactgacctgtgtttgcctatgcgtagactgtctctggttagattcagaagacactattaacaattgttcactggccaaggggattggggcaggagagactttacacggggaacctttggatactgtttcactttataattaaaagataattcgagaagatatatcaaggcctatttcttggaggccagagcgctcctaacccctgagcctgcctcagcctctggctcccacccccgcagccgccccgtcgcctctgagcaggacggggccccactcacccttcccggccgcagacagagcgcgggcgcccgggggagccctgcagcgggcagctccgcagcaggaggccccgcagcagctgcgcgccgggacggagcatgactaggccgaggccgagggcgcaggcgcctgctccgaggccagcgggcagcctgaggccgcggggccggcggggcgggggtcggatcctccccccgggctgggggcgggctcctagacggccgcgcgcccgggaacccggcgcccacagagccgcggcaccatggcacctgctggacgcccgggggccaagaaggtgagtttcgtcccctcgatcctcgcggagctcctggccgctgggctgcgagcgactccgttcacacccggcgtccatccctagccaagccctggggcctcggcaaaacacttggacgggatggccctgagcctcaattttccc

SEQ ID NO: 33959 - DNA, 2300 bp, Homo sapien
ccaggtattaagcctagtatccattagttatttttcctgatcctctccctccttccaccctccacccttcgataggccccagtgtgtgttgttcctcaccattatactagtacgatctaaagtcaactgtaaaattataaagacaggaacatgtaaaataaggaaccctgtaaattaattttgcagtacatttatattttcattccctcctccccatcagtttggcagtgaacctgccttgcatctgacagcgagctctagggtgcatttatgccccctttttgcagatatcactacgtaagacctctgggtttaagatctggcttcaagacatctctattcatactcagtggggatcaacttcactgtgtagtaggaggtgatcagaaaaacccagtctgtctaaaataacttccccttttcctagatttgccagcagaactgctcttttggatttaagacctaattggaggtcttgtctgtggcaattaaatgaattcttaaaatgtacctgctagctgaggagagaggtgagattagttccttcccattaacaccttaactcccaggtacacattcacatggattagtgtgtgataatcttggtgttgtaacagtagaggccccaaagacactgaacaaaaacagggcattttaaaaacgtttaaaaatatgaactgtaaagatgaacatagcattagagaaagttgagagaaaaaagcacaatgttctttgattatttttattaactgtattctttcaatgctcacattttgcttttataacctgaaaaaatatcctaaaacatgctttttaaaccaatattccacatcttgtgtaactattaccattattgtgtccttccttacagtgtgtatataaatatttgtatatggttgggatcagtttgtgatatatttccttttgcaacttaacattgccaaggcacttagctggttctcatactaagttatttaactgtctaataacttaagtagatgaaccttaatttatttagaatcccgtattgcagagtatcttggtcgtttctaactttttagtataaatagctcggtggtgcacatttccacgcataaactgcccctcctcccttcctcccattctgaatgacagggctggagcgggtgggggtctctgaagggtcctggggatgtctttcgtccaagctcatgcccttcctaattttgcttagtcactccttcatcccacccccacacatactcgacgtagaaatggctgggcataaagccaacatctggtgaccagaccaggaaaggggccaggagctggggaccaccgggtgagaggaggttgaggggtgctagcgaatcccacctaccctccaccctgcaccgcagctctgggggcgtccttgcccaggactagtttcagaccagccggcgactcgcaaggccaggctgcttggccaggctgctgacttttccaaaacgcgaggggacagtccgaagagttcccggacggattagcccaaagagctgcgggcgagggtcggttgagggaagaaaatgtgtgcgcgacatgcgtccgaaagctagacttctgatcctcgctccccgcggggctggacccgtgaccctgagctagtcgcctgactcgccgagcctcagtttcctcacctgtgaaatggggataattgtgaagatgaggagataacttgagcacagcactctgtgcagcgccaggcaccgagtaagggctccataaacgctaaccaacccgtgacaggggaaaattgaggctcagggccatcccgtccaagtgttttgccgaggccccagggcttggctagggatggacgccgggtgtgaacggagtcgctcgcagcccagcggccaggagctccgcgaggatcgaggggacgaaactcaccttcttggcccccgggcgtccagcaggtgccatggtgccgcggctctgtgggcgccgggttcccgggcgcgcggccgtctaggagcccgcccccagcccggggggaggatccgacccccgccccgccggccccgcggcctcaggctgcccgctggcctcggagcaggcgcctgcgccctcggcctcggcctagtcatgctccgtcccggcgcgcagctgctgcggggcctcctgctgcggagctgcccgctgcagggctcccccgggcgcccgcgctctgtctgcggccgggaagggtgagtggggccccgtcctgctcagaggcgacggggcggctgcgggggtgggagccagaggctgaggcaggctcaggggttaggagcgctctg

SEQ ID NO: 33960 - DNA, 2300 bp, Homo sapien
ccctacacccaacacgtaggccagtaagctgcctatgtaccctgcttgatgtctcccttggattcaggaactgagggggtttatgttgatttcatagaacagataagactagttaaaagaggcatctgaggcttttctccctgatccattcattgctttgtgtccagctatgggcaggcctgaaatgaactggcctattatcaataaaaggttgcatcttccactgatgcagcctacaaaagagggatcaggattgctgtggggagttgggaggagtgggtggtttgcattgctcagggaaggcatctctgaaaaggtgacacttgaccaaagaccagaaagcagtgaggggatgaccctgcaggcacctggggagatgtgctttagaccaagtgaaatgggaaaagttcccttatgccccttgcagggtgtgtgatggaggcgtggatcacttcttcagcaccccacagcttaaacccctagggggagcatgcaggtaccccatggcagcatctaggggtgaatgtttacagctcctgaagccccagtgggtgtgtgttacagtgtgctctttcagcttagctgtccactggcagcttgtgttaatcagctcaattagaccctccgccttatcgaaaggacagagggctttctgtatcctggggttcttgccagtgtactggaaaaattggatcacacatgggcttggagaatgagtgcaaggttttatcgaatggtggaagtagctctcagcagatggatggggagccagaagggggatggagtgggaaggcggtcttcccctggagtcaggccgctcagcagccagactctcctctgattacccctggctgaattccacttcgtctgtgtcattctgccaccgatggcctgccagagtctgtgtgttcttctgccagtgtgttcctctcaacgtccagctgcttgtgtttgtgtttgctagggtcttgaggtttttataggcacaggatggaggtgtggcgggccagggtggtcttggaaaatgcaacatttgggcgcaaaaacaggagtgcctatcctcaccagggtctgtgggcacaggcctgaggcctttctgtatcaaaaggaaactgcaccccatggctaactgctctgaatggaaccttttaaataagttatgagtgggctaaataggaaggtggtaaaatagaaggaaaagagagtaggaatttagaagctagtctgattttttacttacttagctctgtgatcttgggcaagtcaaccattctgagcctcagtttcctcatctacacctgagaataaaaactgtgtcctgcctcactggcagagttgctgggagtgccaaatgataagacacgtgtgaacacactgcatgactacaaagcgttgtgtccactaccgttctgttcagtggctgacacgaagaaaaattatttttctcacctaacaagaggtccaggggtaacagcccatggctgccgcagccacccaaggatgtcttaagaaatctgcctcatatggctgtcagatgactgctgtattcccaggcattatgttggcattccagccaggaaggaggaaaatagacaaaagggaagggagtgggcgtctatgtcaggaaagcaaaacttttccagaaatcctccaccagcttccgtatgtgtctcactggccagcactgtgtcacagggctgctcccagaggcaaaggaacctgggaattttttgaaagttaggggcattgtccccccacacaaaaacaggggagagaatgcacactaggtagacaactagctgtgttgtcacaaacatgttgaaaagccaaaataactatcgtggaatcagtgctataatttgactcagattaaatgttatttaagaataaatagtctcagccctttcattgtacaaaataggaacctggatcggccaagaaatatggtatgctcaatctttctgaaatattattagagcacatgattttaacaaaactacagctctaagaacgtaataccacttcacctaaaattagaaaatgcttttaggaaaaaaaaaaaaagtagagcggagcttaggtgctttttttctcttcttcaggggattttggagcgcctggagagtggggaggttgtgattggagatggcagctttctcattactctggagaagagaggctatgtgaaggctgggctctggactccagaggcagtgatagaacacccagacgcaggttggtgtccacatccccaagagtgtctacctgagtggtattttatttaaatctgattgagagaa

SEQ ID NO: 33961 - DNA, 2300 bp, Homo sapien
gaaaattccctacgttcgagtacaaatccttttatatacatctatacacttaggtatgcataaaattcctctggaagaacggttaacaggcaatagtggttacctccagggaggggacttgatctgcaacagcagctggggaaaggcttctaaattttttttgccatgtttgttcttggagaaataaagattaaaaaagtaaaatttttgccatgtgtctatattacctattaaaaattcataattcacttctaaatttaatgctactagtttaaaatttctcccaagttttgccacattttgaggaaactgaaattgggaacgtcggctttcagcctttattgagtgttagagtgcttataccgcctcctagtgccagatacccacgactgcggctgctccctgcagccaccgcggggctcactctagacctgttcatctcaccagtgctcaccaggtgaataccttaactagttaacgcattaactaactaaactgttacctattcggatactccaatgccttcaaggtgttttttttttttaatctaggtactgtgaagaatgactttacctcatgcctcattcttgctgaccccagatcacagttgggggtggaggagccaatgaaataatagatcacttgaataacagtatatcctttcaccttttcatttctttttccattttaaacttgacatacttagaagcaaaaggacatttttactttctcagttgtatttcaaacacatgtcactttagccgttaaatttgtattaattcatcaggtgttgcagtaactttcttctctgcatgtgttgaaatggaggttgtttgtccacatacagaatttttttacatgcttttatttgggtaaaattttctgaactgtgtttcagatatttcattgttctgtaggctatttactgtcatgctgtacatttttttttcttttgagacagagtttcactctttttgcccaggctggagtgcaatggcacaatctcggctcactgcaacctctgcccccagggttcaagcgattctcctgcctcagcctcccgagtagctgggattacaggcgcctgccaccatgcccggctaatttttgtatttttagcagagacgggggtttcaccatgttggccaggctggtctcgaactcctgacttcaggtgatccacccgcctcaccctcccaaagtgctaggattactggcatgagccaccgtgcaggccatgctgtacattttttaaagtaatgtttttattattttaaaatcaatgtattctcattataaaaatattttggaaaatacagtgaaacatgaagaataaaataaaacaagccttaattccgccatcaataggtaactactgttaacatctctattccctccagttcttctaatgtctatgtttttatatcgttttcatgctgaattttgaagtcttcaaagtacatttctgcttccatttataaatgttaaaagtctgtccttgttaaatattacaaacatattcttattagaaactactgtgttattagaaactgcaaggcatgtttgggtataggggtagaaggtcattttgaacatacccgccaattcagggttagtattggactcctctactaaagccgcatttgtgtcccgttatactggatgtatatcacacaggagatcacactccaggctgaagatcttccaggacttcatcccctgattccataatcttgacgccttggcctttgacaaatatctgagcatcgaatggacttctcagaggcctctctggcagcctaagtgggccatggtgcatgatcccaggtgagcgagaggacggtcagggtcggggcaaaagtgcaagaggcaaaagggacgctaggcaggtttgaaatctgagcgagtggcaacctcgctttttcttatcttacttttcggtggttccacccatttgggtgaacaatctggattacctccttggcaggccaggttcccaacaggaggcgggcctgatgaagggctggtgggcgtgttcccgcccaaggtccgtgttggcccgcgcggtggctgggaggccctccccacgcccaactgcgggtataaagaggcaggctgcggactcggagcagctcggggctgcgcagcgggaaggctcgcctagtcggtccgcatccgtgtcgaccacctgtctggacaccacgaagatgccacccgttgggggcaaaaaggccaagaaggtgagtctccaggggacccgagggcgctctccttcccctcccacctgctctgtatcccag

SEQ ID NO: 33962 - DNA, 2300 bp, Homo sapien
tctgatttatcatgattgttaataatacagtgctgctacatgttgtgccaaaaatatgaacaggaaatgagtctgaagtctcaattcagcatgattacacatatgaactgatacaacaactaaaatgaaaataagtggggagaaagatagtagtggaaactataggtatgaaaaggaatagaagaattttgtgcctttggggaggtgatactgccagcaggtaaatggagtccatgtatgcatatataaattactgtcttctgtattagttcttttcatttgttatttttatgtatttacttgccttttgagatggagtctcactctgtcacccaggctggagtgcaatggtacagtcttggctcactgcaacctctgcctacccggttcaagtgattctcctgcctcagcctcccaaggagctgggattatgggtgtgtgccaccacgcctggctgatttttgtaattttagtagaggtggggtttcaccatgttggccaagactgctctcaaactcctgacctcaagtgatctgcctgcctcggcctcccaaagtgctgggagtacaggcatgagccactgtgcctggctgctttttgttttgtttgttcttttttttgagacaaggtctcacttcgtcacctaggctgcagttctgtggcacaatcacagctcactgcagacccgtcctcctgggctcaattctcatgcctcagcctcccatagctgggactatcagctaatttttacattttttctcccaagaaatcttgcctaagattaaattattgtttttttgagacgagtctcactctgtcgccaggctggagttcagtggcgtgatctcggctcactgcaacctctgcctcccgggttcaattgattctcctgcctcagcctcccgagtggctgggactacaggtgcacgccactacacccagctaatttttgtatttttagtagagacggggtttcaccatgttggccaggatcatttcaattactggaccttgtgatccaccccccacggcctcccaaagtgctaggattacaggcttcagccaccatgcctggccgattattgtttttatacatacaaggtctcactacattgcccaggcctgcctcaaactcttggcctcaagcaatcctcttactttggccttccaaagtgttgggattacaggcatgagccactgcacctggcctcattcttttataaaacttttatttataattttaataatatttatcacagtttgaaattctttgtctctaaaagaaccatggggaaaagaataattttttataaaatttaaattatttaaaaattgttttctgtttattcactacactgtaagctgtgaggaccaggaccatgtttttgtatgtccagctcgtaggccagtgcctgacatgattttgaaggaggtgacaggtagaaattgaagaaatttattggaaatgttccagatttggatggttttcattctactagatagcagaaaattttttgggctgggtccagtggctcacgcctgtaatcttagcactttgggaggccgaggcgggtggctgtcttgagccaaggagttcaagaccagcctgggcaacatggtgagaccccgtctctacaaaaaaaaaaaaatatatacaataactagccaggtgtggtggtgtgtgcctgtagtcccagctacttgggaggctaatgcaggagaatcacttcagcccaggaggtggaggttgcagcaagctgagatcgcaccattgcactccagcctgggtgacaggagtgaaaccctgtctcaaaaacaaaaaaaaaaggaaaataaaaaatgggaagtgttaaggctaagctcaatactttgagcctcaaaagaaatattcaggccatggtcttgagtagtgagacaccagaagtatggagatagtgatgaaaagcagtcaatgcttttcattccctcttgcttctgtgttttagggttccgaggtcctggcatgatagggagagttcaaagcaagtatttataggttattagaattgattttcttagttgtgaaactgtcttgttccacagctcttggataagcacaagaatacagagagcatggtggagcttctggacttgtatcagatggaggatgaagcctacagcagccttgcagaagctacaaccgaactctatcagtatttactacagccattccgagacatgagagaacttgccatgctacgaagacagcagatcaaggtatttttttattaatcctaactagtagcctgcctgtttcatag

SEQ ID NO: 33963 - DNA, 2300 bp, Homo sapien
gacaatacaagaactaaatcatggattattttctcaaacttgccttaaatgctttttgggctgagtaattttgtctgtaaattaagttcttcgttacatctttcaagttactgagcagctagctaatgtagtaaaggaatagtttattaacttctgtcagttctactcttttcccttgtttgaacttttctctgagaatggctttttttttttaattttttttcttctttaaagttagcatatgcttttgaccagccttactggtggtaaatctagtatttgagggtaggttgaatattgggaaacagctcttaagctcttggagccaattctagcttatatactcacagaacttggctccaagagcttcagatcagtctcttcagaatgttttgatccaaagctgacaaaatcataatttatttttcaggctaccttgtagactaattttggtgttttgcagactgtaggaggctcaaaggcatttataatattttacataaacaaagcaagtacataaacattctagcttgttttatcagttaaaagccatgagtaagtcaaaacattataagggtttggagaaggcaattctagacaaagacatctcaaaataagggaaagtaccatcgttgaaaaaaaatgtgtggtctcttaagattgaatggtatgagcaaaattccagctatgcttggattgttagagtgcttactaagctgtattttgttattatgggaaatctaagctgtcacttttttattttgctgaaaactaaggatatacaaattagcaatagtgtagatttttacgaagttgagaaggcttttaaagattaactattgtggaatgttaaattagtgtaagaaaaaccttgtatactatttcagattacataaagagaagttttgttttgatttcatttccaccaatgtgagtgagacccttgtagcttcgtattcagatgttgtactgtttggagatactctgttcaattggagaagtatagtagcacaaattcactttcctcagatacacattataggtagaagtgacaaggtttaaggtaagaaggaaaagttgtgataatgatggctttaattttgaccctcctccatctcgccaggattagagtatcacaggcctttccttccaaaatttttcttcccaagatggaaatgaaatcagagttcgtttatgagggtttgagaaaggaactataatttcatgttttaattaccagctctaacagatattttaagttgcatagggatttggggtttttacatgtagttattatgtagtcttaacttattctcactgataatagtgatagactagcttccacttccaaaacataaatagatattctttgtggccaggatgttttatagtttcctatgagttcctaagaattagcatttcatgtacaataatttttgttttgaaattgttatccatcttaaagaccactgagtattattcctttctgctgctgtacatgagctatttaggaatcttcggaaataaatttttagttatgtcagttagtgaaaatagtaaatattactatttgtattactgaaaatgcattgtgtattaagagagtttatattttagtaaaatttaaaagcattttctaaatactgtgatgtttacaagtggatacttgtgaaattcagttttctcaatgataaacatagcacagtacgcttatgtttactgattctttcccctaccttggtctcagtaaattatttctgaacaaccaggagtcctttaggtaagctagctgactctgaagtctgacttagctatatcatgatgttttgaataagatttgtcaaaatacttcatagtgcacagacaactgtttggaattaggtttcatttcctgtcattttcatattagaagctataattggtttggaggctatattgcttgtgtagagtcagttattcagaaaatgaataactttactaaggtaaaagtgggcactgtgacctatttttatttggttaatgtatgtagtctctatacattcagtttgcagaaaagtttcaggaatttaaagaagctgctcgactagcaaaggaaaaatcacaagagaagatggaacttaccagtacaccttcacaggtgggtatatcatttctattcttaattatgaaccttgttcatttcagataatatccttcatgccagaattaaatctccaaagtacacacagaaatgcaccctttagtgtggtggctcacacctgtaatcccaggactttgataggcttaggtgggaggattac

SEQ ID NO: 33964 - DNA, 2300 bp, Homo sapien
gcatttgctatacgtgaactaagattgactcattttcctatgtcaaaactgctattttgcaaataaaattactatcctttataacattatttcgtttgcttattgctctgctctttattctttcgtgtttcaggtaaccactaacaaaaagtttaaaagtcgactatgtccagaatggcactctataattgaaaatttaggtgatttttccgaagtcctgttggaagcacatctaccagcagtgtgatcaggctctccctcccacatttccctgctagtcaggacaagagaagcccgggggtgctgctgcaatagcggtgggagtgggagataggctattacccgcttgacactgcacttttgctacgaatgattcactcaggtttggcacatttgttgcaaggaaatctcctcctcccgccgcttccttgttcgagctcctctcgggctgtctcctgtgctttggcctttaaggagaagtgagagcaggtgggcacacaggagctcgccgagtcctcctccccctgctccttccctaatttagcagtacttccggccgcgtgacatcatcccccgcacctcggtgacgtgagctgcgggtgacgtgtgtgcggagagaagcgcgctgacgttgctatttaaaggtcctcctgcggggaggatggagacacagcgcgagcacctggtgtggggcgcggaggaggctgtggcggtcgggagcggggccaagagccagaggaggagcagagcgcacggccagccagccgccagcctctaggggaggggggaaaagaaggacgaacggactgagggcctgccgccggcccagctccccacgagggccgctcggccccccaccatcagcctctccgccgccttgcggctgctgctttctcccgcggcccgctgctcgcaaggcccgtcgggctcccgggaccagtccgcgccccagcccccggccgcggctccgcggcggccaccgcctcccgtcccttcccgcgagcagagggagggaccgccctcgctccccgttctctccgcccccttcccgccccccgcagcccactctgccgccgcgctagcttcacgccggcggcgctgaccgggaaagcagcaccctcttctctgccagccggccggccggcggaggcggaggcagcggcaggcttcaggccgccggggctggcgctgctctgcccggcggtagccggaggcgggcgctgatggaagtgtgaagaggcggcggcggggcccggggaatgtgaggcggcgcgtggcggcggcgcggagcgtgagagacgaggagtaggggtgggggcgctggagcggcggctgcgcttcggcttcgagcccagctctcctggccccaacgcgggcttagcctcccgccttggctcgggcaggcgcccgtcgacccttcggcccctttcgcccgccctggagctgggggcagggtgccagtggaagcgtggggcttggctctgtgattcattcattctccgccgacgggagcctcagacccgctgtgctctgaagagaggagggaagagggggcagccgcgaatgaagggccgggcaccagccgggctccattgtgctcggcggcggggggcgggaaggggctgagggaggtgggatcgggtcccctcctccagctctccggcgtgcgctgcgcccccagcctgctgccagcctggaaatggctccgtttattctcttcgggagaatgaatcgatcctgcctagccttctcttcgtcctccccacctcttctctgctccgagtcttaggaggagaaacatttaaaaagacagattccaatgtggagtgccgtgcaggttgcgagctgccgggtttgcacttcgaggagattttcctgtgtagtttttttcctaatgtgagcgcagggaagccgtggcattactgcttttgggatttttattcacgtgcacgtcgcgtttggttgctcgctccacccccggagacctggtgtggtggagaaatttgaacccgcagccttagctccgaaaaggccgagttacctggctctccctgagtgtcgaggaggacatgagtgaaatgaccagcgaactcattttttataggactcggtgaagccggattctgcatttccctacttgtagactcattttgtggaatagagttgatcgctgtctcctccgcaaagcattttaactcgaataagcaaatgccgcctctgtttgaacgttttggtatttacaagagagaaatcattttacctaagagaactaattgaattggcagcatccttgaaatacc

SEQ ID NO: 33965 - DNA, 2300 bp, Homo sapien
gaaagctgcaaaaccaatgttccttaattaggaaccatgtgagtagtttaacattacaaacagtttctaaaagtcacacgtggtatacattctaacgagttttagcttcttttatttaaactgcgttgatattgatctataactttcctaataatcacttcataggttggtaatcctatgttttggattttccaggtcacttcagattcaaatattttttcctaacgtcaaatggtgtgtctagattttggtctggaaaacagggtcactaaatttgtagactaacttgaaacagtattggcctttggcaatacgcagcaattctatttcttggccatgcttatcaagttaagtaaaataaaatcaaagttcactatatgatttacctaattaaaaaattgttttaacctaattactttaaaataatttaaaaactctgtagtaatttacaatgtaaaaagcactcataatatggtgtttatagacacacatagctagtaaacctatagacagctactcacccttgccatacagaaaatgcaaaacacacttaagagatattgtaattacatattatgtggtcaaaactaaagaagacgaaaatatgcttgtgttaatgaaaaaggatttggtgctctttcttatttttaatttttaaattttaatttaaattccacagactgaaacccatatactttttctctttcttgttttactggctggagccaagtgtcatggaactcatattcttgatgaagagaaactgagaggacacactggcatttgctatacgtgaactaagattgactcattttcctatgtcaaaactgctattttgcaaataaaattactatcctttataacattatttcgtttgcttattgctctgctctttattctttcgtgtttcaggtaaccactaacaaaaagtttaaaagtcgactatgtccagaatggcactctataattgaaaatttaggtgatttttccgaagtcctgttggaagcacatctaccagcagtgtgatcaggctctccctcccacatttccctgctagtcaggacaagagaagcccgggggtgctgctgcaatagcggtgggagtgggagataggctattacccgcttgacactgcacttttgctacgaatgattcactcaggtttggcacatttgttgcaaggaaatctcctcctcccgccgcttccttgttcgagctcctctcgggctgtctcctgtgctttggcctttaaggagaagtgagagcaggtgggcacacaggagctcgccgagtcctcctccccctgctccttccctaatttagcagtacttccggccgcgtgacatcatcccccgcacctcggtgacgtgagctgcgggtgacgtgtgtgcggagagaagcgcgctgacgttgctatttaaaggtcctcctgcggggaggatggagacacagcgcgagcacctggtgtggggcgcggaggaggctgtggcggtcgggagcggggccaagagccagaggaggagcagagcgcacggccagccagccgccagcctctaggggaggggggaaaagaaggacgaacggactgagggcctgccgccggcccagctccccacgagggccgctcggccccccaccatcagcctctccgccgccttgcggctgctgctttctcccgcggcccgctgctcgcaaggcccgtcgggctcccgggaccagtccgcgccccagcccccggccgcggctccgcggcggccaccgcctcccgtcccttcccgcgagcagagggagggaccgccctcgctccccgttctctccgcccccttcccgccccccgcagcccactctgccgccgcgctagcttcacgccggcggcgctgaccgggaaagcagcaccctcttctctgccagccggccggccggcggaggcggaggcagcggcaggcttcaggccgccggggctggcgctgctctgcccggcggtagccggaggcgggcgctgatggaagtgtgaagaggcggcggcggggcccggggaatgtgaggcggcgcgtggcggcggcgcggagcgtgagagacgaggagtaggggtgggggcgctggagcggcggctgcgcttcggcttcgagcccagctctcctggccccaacgcgggcttagcctcccgccttggctcgggcaggcgcccgtcgacccttcggcccctttcgcccgccctggagctgggggcagggtgccagtggaagcgtggggcttggctctgtgattcattcattctccgccgacgggagcctcagacc

SEQ ID NO: 33966 - DNA, 2300 bp, Homo sapien
agatattggtccatagtttgcttgtttaatatctagagtttgggtattagtgtaatgctggccccacagaatgagctgggaagtattccctcctcttcaatttttggaggactttatctagaattggaattatgttttccttatatataccatgttaacaccctacaaaagaaagcctaagtagctgtaatactatcagacaaaatatacttcagagcaaagaacattatcagcaaagaggagggtcatttgtaaagtggataatttcataataatgaaactttcataaaggataaattcatacaaataagagaataactatgtttatgcaactaatagctgagctgcaaagtacatgaagcagaaattgatagaactacaattgaaaaaaaccagtaatagtcagaaatttcaatactctcaataattagtagaataagtagacagtaaatcagaaaggatatagatttgaacactaatatcaaccaacttgacatgattgacatttatagaacactccatgcaacaactgcaaaaaacacattcatttcaaatgcacagtgagtatttaccaagacagactatatactctgggccacagaacaagtgtcaataagtttaaaattattaatagtgtacgaagtaccttctctgatcacaatgggattaaatcagaaatcagtaacaggcagctacctggaaaactcctccacatttgcagaccaacacttacaaaaaacccatggtcaaaaaaagaaagcaatagggaaattacaaagtattttgaaatgaaggaaaatgaaaatacaatatatcaaaatatgtggaatgtagctaaaacagtatagagggacacttatcacaccaaatgcctgtacaaacaagagacatctaaaattaatggtcatcagtttctgagttaagaaactagagaaacaaaacaagaaatttaaaaattaaaaaatagcagagtaaaggaaacaataaacataagagcagaaatcaataaaatagaaaacagaaaaccagtagagaaaatccaagaaagcaaaaacgggctttgagatttgagatccgtaaaccgagaagcccctcaccagatcgatcagaaaaaaagatgacacacaaattaccaatttcagaacctgaggggtcagattttatagacattaagtggacaataaaggaatacagctaacagatttgcattattaaacaatttagacatttctacaaattattaaagctcactcaagaggcgatatcaataaatatttgttgaattagtgaataccagctattactatgggcaaggcgctaagtccaggctttagagagaaagaaagcatttttttttttttttttttttgagacaaagtcttgctctgtcgcccaggctggagtgctgtggcacgatctcggctcactgcaacctccgcctcccgggttcaagcgattcgccagcctcagcctcttgagtagcggggttacaggcgcacgccaccaagctcggctaatttttgtatttttagtaaagatggggtttcaccatgttggccaggctggtctcgaactcctgacctcgtgatccgcccgcctcagcctcccaaagtgctaggattacaggggtgagccaccgcgtccggccaaagaaagcattttccttccaaagaagctctcaggttactggaggggcaaaagaacagataaagtttaatgttgctccgggggagaagattaggggaacactggttaaagaaaggcttctctggggacaagtcactcggccaacacacgaaggacccacagaaaacgtctgttacagctagaacggctgcacgtgagttcaggcaaggggcccagaagtggccctccggcgactgcctgctccacccctcttagtgcagtcctaaccctttcccaacttgtgctggcagcagttaagaaactcctttcaaatccggctgtcttgcgcctgcgcattcaagcaaagcgctcataggcggggtggggggggtggggggggttggggggtggggggggttggggggtgggagggaggcggccaccggaagtgtgacctttcgctccccgctgcctattctcatccggggtcacgtcggtcttccgggtgtctttgacagggttttctacgccgctttttcggcgactttttgctcttccgctttttgccaccgcccccaaccttctatatccttgcagcccctaccttttcttgtgttgctcctcccctggcagccgtgaggggggttagatctcagccggagccggagctgggc

SEQ ID NO: 33967 - DNA, 2300 bp, Homo sapien
aaagtggtgtttaaaatgtgcaatctgtactacaattctaaattttggattgatttgaactaggatctttgcaaataaatctcatagacattaatgtttgtaagaaatttttaattaaatgatggaaggaacatagaatggctacctgtgattttgattagtgtttaacagattgccacagctgtgattgaattccttttgtactggatgagcatggtcatttgggattactgatggtgaagtctagctggtgttaagagaataaatattgctgatgctaaacctggtttagtgagctgtggaagccttgactctgctgttttccctccttatgccccactagctgatgtatctgtactgtaattcaatgatttacagttcattacctccagacataatgcatgcataccagctcgtgtaactggtgaataatccccagcttacagtcatatttaacaactctgtgacttgctataattaaaaataaatgttaactcttctagccatcaaatcattctcatgaaatgaatatctttattgtaaagttacctccatttgtacatagcagttctggttctgttctcttcagggagcatccattatatgtacctgctatgtgctagctactttgctagtgtgtaggcttgtaagagatggggatgatgggacaaagaagagtagtaaacttacgaagtctgctggggaaggagatacaaacataatttgaatataggattatgtgggaacctggaagagaggtactgagtttaactttgggatttcagtgaaaggtggtgatcttgaatgatgggtatcctggtaaaaatgggaccaacctttgaggcagaaggaattgtgttaataaagacacagtggagtgacttgacaatgttgggaactcctgacttctaaagacacctgaccagctgggcgtgggggctcacacctgtaattccagaactttgggaggctgaggtgggcagatcacctgaggtcaggagttcgagactaggctagccaatatggtgaaaccccgtctctactaaaaatacaaaaattagctgggcatggtggtgcgcgcctgtagtcccagctactcgggaggctgaggcaggagaatcgcgtgaacccaggaggtggaagttgcactggaccgagatcgcgccattgcactccagtctgggcgacaagagcaagactccatctcaaaaaaaaaaaaagagtagacaggtaaaacatggcctgttaggcaaccgttacctttgtgagggtgttggggttcagtctttgagcagtgggaagccattgaggggttttaaccacaacttgatccggggaaaggtttggggcatttgggccagtttcagacaaaacttagctttttgctaacgtgggggaaattgctcctcctcaaggtttaagatgagtggagataaagtttcctggctcaataacagggaccactgagcaagaaaatacacagtatattgacttgcgatataaagagagccgggacggaacactggttcaaaactgggcttttgagcagggcacgcctagctttgtttctcattgggtcattttactagcaatgacagcctgagctgctggagctcttcggagtctcagtttcctcatctgggaaaccagcactacagtaaaaccttctacaggtaccaccacagaatcgaggtaatgaaagcgagacccttagcagagtgcctggtagttaagtgcccagctcagggtattgtttgggataaagggtccagaaagtagctcagctcaaaaccgaaaagactcactctggaggaaataagagacggggctaggttgcctttcctcctttgaaccccctggtgcagccggagcccgcgccccttaaagtgatctccagttgtccgaaaggcccgccagggatctggcgaaacgggggcgggggagggctcagggaagaggagaagctgagcccgggccccagaagctcggtggcgaaactttgacgccttctatttaaagtcgcggggctcgcccgcccccggcgccgggaacccgagccgcccccgcaggggcagggctggggagggcaggggccagagcagtcggagggagaacaccaggcgcggcgcgggcggctccggctccggccccggcccaggcccgggagaggcgatggcgagccgcgatagcaaccacgctggcgagagctttctcggctccgacggggacgaggaggcgacccgggagctggagaccgaggaggagtcggagggcgaggaggacgagacggcggcggagtc

SEQ ID NO: 33968 - DNA, 2300 bp, Homo sapien
acaaccaaaggtggctaagccggaccttcctgaggaaaagggaaagaaaggaatttcatctttcaaatcgtggatgtccagcttgttttttggatcgagcactccagataacaaagttgctgaacaagaagacttagaaacacagccaagtccatccgtagaaaaagcagtgactgtgatagatcctgaaggtacaattcccaccaattttaatgtagctgagaaaccagctgatcattcattatcagaggtaaaacttaaaactgctgatgaacccagaggtactttagtaaaatctggtgacggtcaaaacgttaaagaaaaatccatgattttatcaaatgtagaagatttacaacagccaaaattcatttctgaggtgtctagggaagattatggaaaaaaagaaatctcaggcgattcagaggaaatgaacataaactcagtagttacttctgctgatggtgagaaccttgaaattcaatcttattcactaatcggtgagaaattggttatggaagaagccaaaactattgttcctcctcatgttactgatagtaaaagagtccagaagccagcaatcgctcctccatctaaatggaatatttctatttttaaggaagagccaagaagtgatcaaaaacaaaaatcactcctttcatttgatgtagtagataaggtgccacaacagccaaaatcagcttcctccaactttgcaagtaaaaatatcacaaaggaatcagagaaaccagagtcaattattttgccagtagaagaatcaaaaggcagtttaattgatttcagtgaagacagactcaagaaagaaatgcaaaatcctacttccttgaaaatttctgaagaggaaacaaaactcaggtctgttagtccaactgagaagaaagataatttggaaaacagatcatataccttggcagaaaagaaggtgctggcagaaaaacaaaactctgtggccccattagagcttagagatagtaatgaaatagggaagacacaaattacacttggatctagatctactgaactgaaagaatcaaaagccgatgctatgccacagcacttctatcaaaatgaagactacaatgaaagacccaaaatcattgttggttctgaaaaggagaaaggtgaagaaaaagaaaatcaggtatatgtgctttcagaaggaaagaagcagcaggaacatcagccttattctgtgaatgtagccgagtctatgagtagagaatcagatatctctttaggtcattctttgggtgaaactcaatcattttcattagttaaagctacatcagttactgaaaaatcagaagccatgctcgcagaggctcacccagaaatcagagaagcaaaggcagtaggaacccaaccacatcctttagaagaaagtaaagttttggtggagaaaaccaagactttcctgccggtggctctttcttgtcgtgatgaaatagagaaccactctttatctcaggaaggaaatctagtattagaaaagtcaagcagagatatgccagatcacagtgaagaaaaagaacagttcagagagtcagagctatcgaaaggcggttcagtagatatcacaaaagaaactgtgaaacaaggatttcaagaaaaggcagtaggaacccaaccacgtcctttagaagaaagtaaagttttggtggagaaaactaagactttcctgccagtggttctttcttgtcatgatgaaatagagaaccactctttgtctcaggaaggaaatctagtgttagaaaagtcaagcagagatatgccagatcacagtgaagaaaaagaacagttcaaagagtcagagctatggaaaggtggttcagtagatatcacaaaagaaagtatgaaagaaggatttccatctaaagaatccgaaaggactttagctcgtccttttgatgaaactaagagctcagaaacaccgccatatttgctgtcacctgtaaaaccacaaactcttgcttcaggagcttctccagaaattaacgcagtgaagaaaaaagaaatgccacgatcagaattgactccagaaaggcatacagttcatactattcagacatctaaagatgacacatccgatgtgcctaaacaatctgttcttgtttcaaagcaccacttggaggctgcggaagatacccgtgtaaaggaaccactgtcttcagcaaaaagcaactatgctcaatttatatctaatacatcagcaagcaatgctgataaaatggtttctaataaagaaatgcccaaggaacctgaagacacatatgcaaaag

SEQ ID NO: 33969 - DNA, 2300 bp, Homo sapien
tcattgctcatttaaagaataaaggtttacatggtactgaagtcaaaatatgggatccgtcctgctttcagtgcatgaaacaggtcaggcagatttgacaaatgtgcacaatgtcctcattgaatctgtgaaataaaagcagcaggcacgcaaacaaaagtaatacgaaatgtggtggtgttttattgtatacaagttgccaccttatgctcaagcaccaagaacaaagcaaaaaaggttagaacaaatggttcgtttccttgtctacttattctgactccactcagatgtcaccaaagtcttcatgtcagctgtccctgctttttagcctaacaaaaacttcaaaaattctggaatttgagatctaaagagtagcactcttccagagattatgatttttttaattttagaaacaaaaatttgtcctaattgtaactaagtccatatgacttataacaagcattgcatagtttgcagtagaattcaagttcacagaatacccaaactaaggtgagtgatcagacagcaaatgaggccacgattgttggtacttagttggtgcttagggattttataccagtaaataacacgactgatgtgactatgattggaagtctacagccaataataaaatttgaaagacaattagaaatttgactcaaatggtctcattttgggccctaagtgtgggatcctccctacaagtgccatagtgcaatggaaagagatggctttatgtgtggaagtcccagagacgtgagggcagtgagcagcgcagcacctagagcctctgagcagcagccatgaagtcgattgctggtggatgataagctccagtggagctgaaacttatcacagagcattgtgcccagcaggcttcagaggcctctcaacctgctcatctcacccttggtagctccactgctacaaagcagagagaaatgacttagaggagactcactgtctcctcagaaggccttgggctgctctgcgaatgagagatggtctctttctctgttgtttcagaggaaaatgagtggaagcccccagcagctgatgcttgtgaggacagcctctctagcttgggcccttttattcttgagttttggcaaggagcaactggaaagtttgccatgactaaggtgcacaatggggtcagaatcatttttggtaggaattgaaaaggatttttacgaagtaaaaaataattggggtcataatggttaagggggatattaaaagcattcccattaagtcagagagaaacatgaggttaaaaacactgggagggaggaggtaaaattactaccatttgcagatgatgggaccatttatctagagaacccaagaaaatcagttgaaaaactcttacataataagagaattcagtaagatggctagatataaaactgatacaagaaatcaaaagcctttatatacaaataacaactagataggagataaaatgaaaaatcttatttagaatagtgacagacataaaaatatataaagatataagatctatataaagaacattttttaagatgctactgagggaaacaaaaaaagacttgagtgaagggaaaggcacatcagttcttggataggaaaatgcaacatcataaaaatttcaattctccctaagttaatctataaatttaacatgatctctaaaaataacaaatagtcaggagcaggctgatggaggaggctacgcatcctgattctaaagatcatatcaaatacaaactagcaaatagaaaaaaaaagtcaggaagcggcaacctaatctaccaggaattctaaattataaagctacaataataaaaccagtatggtcctggggcataaatagatggatcaatagacagattataaaggtcaggaatagacccaaacatatagtctcttgagtgtataataatggaagtatttcagatcagaagggaaaatgatgggttttcctgatgggacagctagatagccatactaaaaaaaaaaaaaaagtaggatttcctacttcacacaatctactgagataaattccagatgataaaatacctagtttttaaaaatgaaattactgggagccaagatggccgaataggaacagctccggtctacagctcccagcgtgagcgacgcagaagacgggtgatttctgcatttccatctgaggtaccgggttcatctcactagggagtgccagacagtgggcgcaggccagtgtgtgcgcgcaccgtgagcgagccgaagcagggcgaggcattgcctcacctgggaagcgcaaggggtcaggg

SEQ ID NO: 33970 - DNA, 2300 bp, Homo sapien
gaattcatgtgctgtacctgttattaaattaataaacatcattgacagatttccaggggagcaattttgaccaaaatttgctgacttccttccctccctctgaggctctgtgttatatgaagaggaaggaaagaaggaagggaaatgaaaatcagagaagggccaaggaagaaaaacattgcttgacaattctctaatagaatgtggaaattgtattaatttagttctacttgtctgtactagaataatgcccagggaccaaccaagaaatctcctatcactcggcagacagaggctgttgacacatggatctcctgaccccagagccctaccttccaccgtccccttgccacagagtcagagacaggagggtcactcactggggagtggagggctggacttagaggatttctggagtcctttgtcatatcatataaactacaaaatgctgtgccattccacatgctcatttaacctggtgtttataattatcctgagaaaagacataactataggatctgaattgcccaaagcgattatctattaggggatcaatcaagattcaaacctggttctttccattatggtggttttctcctttattccagagctgcttccaacctgacggcagatgctgctggcacttggtccccttcacccgcggctagcgagggtgcatgcgcagttgcattagacagttttcgacataccttctcaggtgtctgtgtttctcatttactcttgatgagggctttctcaggaccaggaaatgcagcttggaaagttgggggatgggaatgactccaggccaccttcaacaataggggttggacaggagttgagtgtcagcttctggtatgttctgtgtggtttccagagggtcctctggcacaggagagcccagctgcccacagtggtaataacccactcataacacatgtcctttaatgactttacccacttcctcaaatgttcttcctggaatcacctcctaggtaaacaacaggcactgagccttgcagttggtctacttttggagaaagccaaactgagataaattctaaaattcacttggttacacattcacaccaaaacaacaacaacaacaacaacaaccagtaataatgagcacggctggctgagcagtcagaacctgaggataacattttcaaggattgagaaagtgaaactaacattctccacaaagcagcaagttacttctccagtttcaccaagactccatcttgccagcaactgctggaactgcaatcagggtggtaatggcctccaagggctctagtaaggcagttacagatccagttcagattttctagctattaaacaagagattttagaatatattcagaaagaaggatattatttctcaattcaagaaaatatctgggcgggacacagtggctcacgcctgtaatcccagcactttgggaggccgagacgggcagatcaactgaggttaggagttcaagaccatcctggccaacatggcaaaaccccgtctgaaaaagaaaatataaaaattagccagttgtagtggcgcatgcctgtagtcccagctactcaggaggctgaggcacgagaatcgcttgaacctgggaggcggaggttgcagtgaggcgaaatcatgccactgtactccagcctgggtgacagcgtgaggctccacctcaaaaaaaaaaaagaaaacatctgaattcaagttttgaagtattttttaaaaactacaagtatgatcaacacatttacattatagaagacaagcacaatcatcttgacatacattctagatttatccactttgcacacatattttagaaagattttgagggattcaacataatatcttaaaatgaccacttaattttagtaaaaatagattcccagcttctgttaattgactataactatggtctgagagtgattagattttaaagtgtgtgtgtgtgtgtgtaaaattctcacaggaaaatcaatagtagtgcactgcactgaagtgtaatgagttttactctgcagtttgtcctgctccagagatgccaggccagtaagttacatggagtaagttcacataacacgactggctttatagactctaaccatttatttaacaaaatggaaatttctaatatatagcacatttctacatttaaaattttagggaggagagactcatgttctacagtatacattattacaaaagagttcattataaatttaaatcagctgaaacaattcctttaatgattaggattcatcatcctttagtgcagcgaggtgacatt

SEQ ID NO: 33971 - DNA, 2300 bp, Homo sapien
gtgcaatcagctatgttagagttttttaaattcaatctaacagatacagactctcaagaggaactgcagcaataaaagattgctattatctatgcactaataaacctgtgtgtaaggattctttcatcagatgcaatgacatgctattctgtctcaattcaacactaagggaagagatttaatttctctttaatgcaaatgaaatcactgtatgtagtagcagcagtacggaagaaggccaaactgagtaactgtgttatgtgtccactaagaatgttcattcactcctctcagtcctgctacaaacaaggctcaggaaatccacattctttctgtatgattgttttaaatgcctgaatgtagtatatggaccctcagctttatggcttaggattttctttccccctgccttgcctttgtcagtctatggtttgacatttctaaccctcaaaacagggaggttccattacaatctgaaagttgaattactttactttctttatactgaagactcaacagatagtctccactgatcacacagaggatgcactgtccctcctttgtgtttctgtagtattttgcttatatttctaaccctactcgtgattatctgacttgttacaccttggtgtgtgtatatctcctttgtgcactgtaaactcccgaggacagaattcatgttttatatatttctgtattgttccagaaccttatgatgtctaagacataggagctgctcaataaatgtttcgacagttttaatggtacatatgttatgcattttccaattatacagttattattaatgaattctcatttctgacatatctctttttcatttcttagaactcttggttttgaaacatgtaaaaaagactttagcaggctggcactgtaatttgaatgattatgtaaacagtaagggagtgcctagcaaatatttgttgaatagtaattttacgaaaagttgcagaggtttcttttgagttttagttaagaagatccgaccatctcagtggaatagaggaaagaactcagaggcatgactgcgagggtgtcccagaaagactactgtgccttctagaaaaaagacccagcacccaagttctaactctgagacccagtcatatgtttggatcatagcatttccaagaccaaaatttcctctttaatagtttttctgagaaactgtcaggtttaacgtcaagaaacatttagtctgtgctcattaggcccacagacatgacgagctacatgatttgaggggcccagtccaaaataaaaatgcagagccccttgttcaaaacttaagaatttcaagacagtgacggaagagcatcagccaaatgaggagcctttttaagcacagagccttgtgtggctgcacaggtcccaaacctatgaagctagccctcttctgtgaaaggcaaaaggtctgtagctagggagagaagctacaattcaaatatgcacaaggggctacaagaacccagagctcctaactttgtaaaaacatcacagggaaggtgagttaagctcatttttgagggagcagctgcatagggaagaaagatattccagattgaaggaccagcactgaaggtgggcacaatttacctgacgttcagaaatactgtaacttttaagcagggttgtgccagtgaacatgagggtgagaacaggttgaggctggaaaggcaggcagaggccacatacatgggagaaggggttgaacaattactgagtgcctcctgtgtgccaagttctttctctccgacattgtaaataccacaatcttgtaaatactgggtcatccctgttttacaaacaggttaatttaggcatcacacagatttaatgttcaaagggtttggaacactctagggatctaataaatattaatatttgaagaattactggtgggtctgacttaaggcacacaactcttaccctttaggccaagctgctcctaagagttcttcttaatccctccagtcgttgtttctctcatctctcaagagcccccaaattacccttccctcccttagccacgcccccgcgtttcacgtgccggaaattaggaggaaaagtacttccgggatagtaaaggtcggcccgcgcaagatggcggcccccttggaactcagttgctggggaggcggctggggactcccatcggttcacagcgagtccctggtggtgatggtgaggccgcctcgcgggccagggcgcaggaggaaggggcggggctggaggcgccaggctgacttgccccagtttcccgctgcgctgcggggtcc

SEQ ID NO: 33972 - DNA, 2300 bp, Homo sapien
gggtcaagggttggggacacacatggcagaattcagaaacagggtaacatcaacaaaaatacacacggtcataaaaagaaaaactggcacctggcatgatcaactctgtttcctcatcattcagcagcatgttggggatcctgcggctgatggggaacacacgtccagactctgggcactgcagggtgccctccaacacatctacctccagcagcacgtggtgcattgtcctcaccatggagattcctagcaaatactctaggtattttaaatagaagaaatttaatacagggaaatgattacatatatagtagaagaactgagatgtcaaacagaagagtgaggcaatccacattttagcaactgcagtaagtgacctccaatgtcatggctggagggtgcaaatggtgagaaggcagaagctagaatcatggtggaccccacctgcaagagtcacaaagaagatgcatccattcaggtcacagagaagtaaatactctagtgtctaccttctaccttcttattgctctctagtctcccattttatctagactgctgacaagcatgcagtggaaggtgagcaccagatctgagaggaaacaggcagtgtctggtggcacactacacaagaactctcacaggcatccactaggcttgcttggtgactcatttaaggagtaaccctattttatgtatcagagtagtctatggtgtgatatagcatattgctgcttttgatgtttggtttcatttgttccctgtaggcacctaatcactgttttttaaattccccaggagattctggtatacccaatcagctgagaaccactgaatagtggctttcaaaattttgagcatccaaatattgtcttcacagaaaatcttaatctctgaagtctactgtaaaaacatagaaaggcaaggctgttctgcttgaagcgtagcttgggagcctagattcctctcaaacccaggccactcctgggaacatggtctggagatttgaatgttcccaaatctagtttatctcattagtcgatatttatgcacatcctctgtgtctctcagtgttctctcatgtgtagacatatgccccattccaaagagtgactgtagtgtaatgtggcattaaaggaaccctggatagacctgtattggaccttacatattagagagctctgcagatagctcacaaatctccaagtcgctagctgtaaattgagtgataattggtgtcaggttattttagcacagtttggggataaaatggtgcattaatctcccagtttgtggcttattaaactttgaaatggaattatttgagacataaaagagatagcaatactttgctggatgttctccattagtcgagattgttacagaggagaaatttttgccactgtttatcaaatattttttcctctagttaatccatatcattccgggagctttgcccaggaaaaggacgaattacttgcgttcctccgatctctttcaagttctactcccgtacctttaaactgtcacacggaatctttggtgacagaggaatagaggtgggcaagcagggcgtttggaaaccatactgaaaacgaattatccataaagcacagattcaccagcctagaaatggctctgtctggatggattccttgagatgtgttttatctccattaaaaacacaacaactttcaaactttcactgtgtctcaaaatgatagagaaaaaaattcagcctttcaagtattcaagaaaagcttgaagaaataaaagaaactcgctgctctctgggccactttaggaggcagagcgttcctggagaacttcaggattcattcgcaagggaacccaaggtgggcattcaaagccgatccaaaggatattcttctttttagaaaacaaaaggagcgcaaggagtaggggactgaaggtgcccaaagctagtgggtcagtgtcactttcttcctccctttcgcccctttcctcccgctcctttctcccctgtggtctctgctcagcacccctttctctccagccccgactgcccatcttcgcccctaccctcgcgcgtcggggccgtgtctacacccaccccaggacctggtccgtccaggctccttcccatcctcacacccgcgcctttctccctgcggccccggctcgctgctccagctgcccagctcttcccaggacaggggatcccgccaagggggccgcccccgccccggccctcccccgcccggccgcaccataaagcgcccggccgctgccgcggagcccagcagccagctccccagcac

SEQ ID NO: 33973 - DNA, 2300 bp, Homo sapien
gaccacaggtgcacaccaccatgcccagctcctcagtcttctcgatctccatgaaaagtcaggaggtgaatgggcattggaatgaattcatactagttggtgagagactgatggccactcagtcctagaggtgtaagattcaaatgaggctcttactaacctaatggaactgtaataggaatttgagtcattgtgctaaggttgagtataacaagtatccaagaagcccagggagttacctgggggagagcataccacacctgctagctcatcccgtcagtctgcaactggctagcttctctcaagtgcttcctgattttcacttttttttttttttgtttttgtttttggagacacgtcttgctctgtcgcccaggctggagtgcagtggcacgatctcagctcactgcaacctccgcctcccgggttcaagagattcttgtgcttcagccacctgaggagctgggagtataggcaggagccactgcacctggcctaatttttgtatttttagtagagatggggttttaccatgttggccagactggtcccaaactcctgacctcaagcgatcctcccacctaggcctcccaaagtgctaggattacaggtgtgagccatagcaccccacccattttcacttttcttacttcatttcttatgcaagaaattttctgaaagcctcaagttttctacatcagcttcaaaaatataaggagggccaactaggaataggacaaggtagaataatcacttgtgtgctgataaatatttaacaaccagttctctggagccctgatttgtagtgtttgccagtttctgtgtaaatactcccaccatggccaatttcaaactaccaaccgtttaactggctcacaatattcctaaaacttgaatagttggctcttatgagctggtaggagttggcttcagcacactgctggttctacatgcgtctttgtttcttgttttgcataaataacaagttttgtcttcccaaaaatgtaataagctccctaagggatggaattatgttctggatctcctgtgggcccatggtttctaaaatagttatagacacaaaagatttaaccaagagagtctgtttcctgtggacatactgcgttcttgggcttgcacagccgacaacagggaggctgccccaggggtgggcatggtgtgggttgctgcctcctttcaccagcctcactctcattgcccaggctggagtacagtggtgcaatctctgctcactgcagcctctgcctccccagctcaagtgattctcccacttcaacctcccaaatagctgggactataggcaagtggcaccacacctggctaatttttgtatttttagtagagatgggtttcgccacgttggccaggctggtcttgaactcctggcctcaagtgatctgcctgccttggcctcccaaagtgcttgggaccacaggcaagtgccaccacacctggccccattggagtttttgatgtaggagatcagatgtcctggattacaaggccacacacatctccaggctgtacatgagaggaggatgtccagaaatcctccagatctcatgcatgcaccattgtattttctcactgttaaagtcatgataaaactgtggtgtttttttcttcatacatgatttaatatatctctaggaattctggaataagaaaatatataaccgcacagcaatattctttgaaacaaaatttctagagaatttataaaaatttgcttggatcttgatttacaattgaaatacaagaaaggctagtgtacaaattaggcaagtttctgtgctgtacatccagctactggtaccacaaatagaggatatgttgtgactttttgagttgaggaggacttttatgatcatgtacactctactgtcctttaagaggcattcattcattcattcttcgtttattaattcagtaaacatttactggctatttactacattccaggtactgtggggatattgattgtaatgacatgatcctttattgtcaatatgcttacagtccactagggggagccaaatatataaataagcttaagaattacgttgaaggggccagaatagaagtctgtggaaggtgtgggatgggatgacagcatcagaaagaattgggcaaatctgtcccaggactaggtcagaaaaacgcctccctagggaaggtgccaccccaaacacgtgtttctgagaccccttacccgaaataaggaggctgccaaggtgagcatggaacggttaggcgttttgtatggagcaaactggggg

SEQ ID NO: 33974 - DNA, 2300 bp, Homo sapien
agatacttttactatgtggacttcctttatagatgtaaatttgctttacaaaaggacagcttttcagagctactcccgtgtctgcagtttctcagaataaccagcttgaaatgtgccaaacaagtgtattttgggatagcatattttggtattctacagtcataatttggggtgctgtggcctgagcctcagcagcaaaaagaggacatgattcagggttcggagcgctggattctattaccagctctgccccctaacccagtggtctcttgtgaaaggtcctcgagttccgagtcgagtcaatttccctaaaaggcaaagaggcatcggagttccagctggcttaaacatttgtagatttcgcgccttcccttttcgcccctccttcctctccacccgtctccccaccccgagctactagggggcctgcccatttccccaggccaggagtagggctgaagtgaagtgaccgcggtcgtagccaacagcgaagctcattagaaagtcctggtgagagcctcagcttctgatgagtcacagatcgccacggagcaggttgctgcgcttgactgattgggtttaccctatttttgttttgagttagagccaactgtcctcattccttttcgtggctctgagtagggcctgctccattatatctctttctctaaacgcctgcatctgagatgctggaaaatcctgcgcagctcataacccaaggcctggtttccattcacctttcctcttctactcctaagctgcccaagacactcctttgccagagctctgtctggaaacgagtccctctaaggtcaagccttgcgtcatgtgccaggggatcagacgagtggattccaggcccagttttacttcctcaactttgctgtgaggctttgggcaagttatttaacctctctgggcttcagttgcctcaccgctaaaatgggtacggtaatgcttatttgaaagagcaaagggattggcgcaaaaatcgcactaacagaaatatcttcattccggcagggcgcggtggctcacgcctgtaatcccagcactttgggaggccgaggcgggcggatcacctgaggtcaggagttcgagaccagcctggccaagatggtgaaaccccgtctctactaaaaatacaaaaaattagccgggcgtggtggcaggcgcctgtaatcccagctactcgggaggcagaggttgcagtgagccgagatcgcgtcactgcactccagcctgggcgacagagtgaagctccgtctcagagaaaaaaaagaaaaaaaaaaaagaaataccttcattcctcttggggaggtggctgtgaggacagcagatctgagtgggagaaaacctagagacggcctccctgccttctgtatggaacaagcaattattgggcaccctctttttagtgaggaagcagggacggaaaatgagtccttgggccagcgcaggaggagaggctggaaaacatatcaatattcaggaaggcacggaaagggctctcaatggatctctcaccaagtgccatcagggcagaacagtcaagggcccagggattcgaggaagcttgggaggcgcggagagcccaaaagttgaaagttttcttggcagatgagggaaggaaagggatttcaggaacaaggatctcgtgggtgggctgtcccagtcggcgcgcggcagagcgcagaccagcacccggcggtctggtctgtgcaggaaaggcaggaaccgcttactaaggctccaaccttttagaggcagcaacaagctctttctctggatccgaaggcggagaggcgctgcgctctcatttggcgagggcccgagcgcggccagaccgcgcaccagacccggagcgtggggcccaaaggctggcggccgactccggagctcggcgccccaaccgggaagtgatcgcagcagcccacccgcctgacgccagcggaagtgcgagcccgggtcgagcctgctccgccgccgggcgcccgggaaggggcgggcacggggcggggctgggggcgggcgaggcggggccggcggcggggcggggcttggccgcagttgtttttacccaggcctcggcgcctaggcgcttcgccgaggctgatcttcgttcaagtgtgagctgcggctgagcccagcgctcgaggcgcgaggcagccaggagggcccgtgcggcgcggggagccagcgagcgcgccttcggcattggccgccgcgatgtcagctcagtgctgtgcgggccaggtgagcgaggccgggcgcagcgcgggggttgtcagatcggagaa

SEQ ID NO: 33975 - DNA, 2300 bp, Homo sapien
aaagaaaaaaattatcttcgtatcttgaccatgctaccttcaaaccagttttcataaaaaaaaaaatcaagacaagagcaatattagatttatgtctgacagcattaaaaagctgcaagcacaagaggatggagaatacattttctttttaatatctagggaacatacatgaacactgataatctattaggccagaaagaaaatatcaatttcaaaaggtagaaacattacagacattttctgaatatagtatgataaagctagaaattaattatcaaaaattcccctgtgctggagattaagaaattgtcttaaatgatgcttgagtcaaagggggaaataagaaccaatgctgaacttctaagatggaattaaagcataaggacagttgctagcatctatgctgtcattgtgtgaattagaaaaggagttcctttttcaagtaaaagcagagaccaaccctgctgtatctgtgagtagtcagtgacgatggcctggagcccagctggctgaaagatgagcatgaggctctggggaattagagccaaaatgagttggtaactggagaagaaagaaaacatataaatttctcttctctaggggaaaaaaaacctgagtatgagttttcccttaagactggaagcaaatttctattaaagtgcttgctagcaagattttgaaggccaggaaaaagtcatacacaagaaatgtttctttgattgagttctatattcacaagacctgactcctaagaacaaaaagacaagaaagcagcttattaaaatgcaagaagtttaataaacttgttactttctataacccactagagaatttacctgtttcaaatgctttttattttttaatttttaatttctttttttgaggcagtgtcttgttctgtcacccaggctggagtgcactggcacgatctcagctcactgcaacctcctcctcctgggttcaagcaagtctcatgcctcagccttctgagtagctgggattacaggtgtgtgctgccatgcccagctaatttttgcatttttagtagagatggggttttgtcatgttgcccaggctgatcctgaactcctggcctcaagtgatctgcccgccttagcctcccaaagtgctgggattacaggcatgagccactgcacctggccaattttttaattttttgtgatagatcttgctgtgttgcccaaactggagtgcactaagtagcacagtcatggctcactgcagcctcaacctcccaggctcaagtgatcctctcgcctcagcctcccaagtagctgggaccacaggcacacactaccatgcccttctaatcaaacactttagaaatataactatgtcattttaacaagttactgtgtagagtgtggaaatcttaggggatcaataaaagagccaaaaaaaaaatccccaaataagttactgtgaaaagtaatagtcaaagttttctatcacctgatgtaaatgatttgtgagtaagcttgccaagcctgtcttaaaggatgcctatattcaaagccaagaaaagtcccagtttgtaattgtgttgctattataaccattcagatagtcccttcttggagcagtagaatatttttgaatggagggactcctgacattactttcctaaaatcacaaaaggctgtcactctcagggttttgttttgtgtggataactttctcttacagtcacatctctcctagaatgggagcaatagagcctctaggtgctatgaaaggatggggacctcaccagagaggactggtctcagcaatgtccttaagtggtcaaaacatgctgcggttgaggtcaggattgtgaggggatagaggtgacgtagagaagtaactgagtgcatttagactgagatgaatagcaacctagaaattaaggaggggaagagctattgtagagctctttctggcatgaggagtagggatagctcaaggttggttttgatgcaggagtcactgggcaggaatttaagaggcttccattgtgacacaaaggagacagacactatggataggccacaatggtgcagtgacaaaataaagacctggttgctagggccagagaataaacaccgggtgcctagaggagaagagatggagccccagccttggtcccctttcccacccttcctccccacaaggctgtctgagatgccaccttccacctaaacatcatctcccaaattttaatccttaactttggtctctgacttctgcttgattccacagtctccacccacatttgcacaaaggaccatcacctgtcc

SEQ ID NO: 33976 - DNA, 2300 bp, Homo sapien
cagtttctacaaaaaatataaaaaatgccaggtgtggttgcgttgcctctagtcccagcttcttgggaggctgaggcaggaggatggtttgagcacaggaatttgaggctgcagtgcgtcatgactacttcactgcactccagcctgggtaacagagcaagaggctctctcaaaaaaaaaaaaaaaaaaaaaaataggctgagcatggtggctcatgcctgtaatcccagcactttgggaggccgaggtgggtgggtcatttgaggacaggagttcgagaccagcctggccaacatagtgaaaccctggctctactaaaaatacaaaaattagccaggcatggtggtgggtgcctatagtcccagctacttgggaggctgaggcagaagagtcacttgaacccaggaggtggaggttgcagtgagccgagatctgccactgcactccagtctgggcaacagagcaagacactgtcttaaaaataaattaaaataaataaataaataaataaataaaataagataaagcttgcggttagatcatgtagaacaaatgtacaattgaagataaatgtgtgcatatatatatgtatatatgtatatgtgtgtgtgtgtgtatgtacaagtaaaaaatgtggaatgggccaggcatggtggctcacacctatgattgcaacactttggcgggctgaggtgggtggatcacttgagtccacaagttcgcagtcagcctagtcaatgtagtgagaccccatttctatctaaaagaaagaaaagaaaagagagagataaaggaaggaaagaaagaagaaaagaaagaaggaaaaaagaaagaaaaagaaagaaagagaaaggaaggaagtaaagaatgaaagaaagaaagagagagaaggaaggaaagaagaaaggagggagggaaggaaggaaggaaggaaggaatgaaagaaagaaagagagaaggaaggaaggaaagaagaaaggagggagggaaggaaggaagggaaggatagaagaaaggagggagggaagaaaggaaggaagggaaggatagaagaaaggagggagggaggagaggacaaaagtttgcaaaatttgataaagaaaatacaacatcatataattgttcctcacacctataatatttgtagtttatagaataagcaaacaatttccctagtggcatggaaaagggagagtttaaattatctctgactacacatttgtggtcatgatgaggtaccaagggatttagaattaggtatttttcttaaaaggttaggcaggcagaggagggcagggaaatgaaaggaatcaaaattcctggaccatgaagcaaagcagctttatgaggaggtttaagcacactaagactcacctgttttacttctcctaagaatagaaatggactgcacagtcagaatagtgaaagaagcacatagcttcaaatgtgagttgtagcttctttctacagagaggaatcttgagattgatttgggtatcaagacttatgatttgaagcaaaacgtcaaataaccattagaagaagagccagcacgctgtaactttcccccataaatataaatgtcatattatttgaggaaaattctacattcgattgcaagtaaatcatacaccaccaacctttgcatatcctgtaagtcacaagttactagatatatatgataagcccagaagccagcaatcatattaaattaaaaagggctgccaggtgcggtggctcacacctgtaatcccagcattttgggaggccgaggcgggtggataacttgaggtcaggagttcgagaccagcctggcccatatggtgaaaccccatctccactaaaaatacaaaaattagccagcgtcatggcgcacacctatagtcccagctacttgggaggctgaggcaggagaatcgcttgaacccaggaggcaggggttgcagtgagcagcgattgtgccactgcactccagcctgggcaatggagtgagactgtctcaaaaaaaaaaaaaaaagggcctagaagaaaggcatgcacaacagcatattaattaacactacaaaggagattttaggatttttttttttttctgcccatggacaccgccgaagaagcattgttaaagtctctcttcaccctgccgtcatgtctaagtcagagtctcctgaagagcccgaacagctgaggaagctcttcattggagggctgagctttgaaacaactgatgagagccttgaggagccattttgagcaatggggaatgctcacggactgtgtggtcatgagagatccaaaca

SEQ ID NO: 33977 - DNA, 2300 bp, Homo sapien
tctctgtttattattaatgactttgaatattgattggtaaaatgtgtagtaggcatttaaatttcatattttgtgaactgaccattgtatatactttccccattgatctattgaaggtgtttgtgtcttttttctattctctttaccctcacactttaccgtataaatacttctgtccccagtatgcatttgtatatgtgagtctctgctactagactgtggttccccatgggcagtggccccattttattttatctgtgaacaatgcctaacacatagtaggaaaaaggcatactgtagtttgtagaattattcttaggattaaatgagataacgtaagcaaagcatctaacacactgtcacaaagcagatgctcaatacacacattactttaggcaatcaaaagtttggctatttcattttgttgtttaggaaaaccaaggttaaagattaagtatctttcaaagatcaggaactatagttgtaaactgcagatttaagatgcgaaccctgattctcaaatctttcatcacaaatcacatgtggctggaatactcgaaaaattataattcttgcaattttttttttttcttttttgagacggagccttgctctgtcacccaggctggagtgtggtggctcgatcttggctcactgtgacctctgcctcctgggttcattcaatggtcctgattgtcctgcctcagcctcccaagtagctgggattacaggcgcccgccaccacacccagctaatttttgtatttttagtagagacggagtttcaccatgttggccagattggtctcgaactcctgacttcaggtgatccgcctgcctcggcctcccaaagtgctggggttacaggcgtgagccactgcgcccggccaattcttgcgatttttgaaagatcagtatgaactgtgagctgtttaacctttgaggaactgctttttccctgtatctgtctgtatctgatcccacatgtatgtctcttcccttgtttttattttttatttttttagagacacggtctggttctgttgctcaggctggaatgcagtgttgccatcagagctcactgcagccttgacctcctgggcttaagtgatcctcccacttcagactcccagccagtagctgggactacaggcacgcgccaacacgcctggctaattttttcattttcatttttagtagagacagggtcttgctatgttgcccaggcctgtctggaactcttgacttcaagcgatcctcccgcctcggcctcccaaagtgctgggatgacaggcgtgagccaccgcgccgggtctcatttaaatttataggaaacttgtggtaaaaatagcaaaactcaacaagcaaatatacatcaagtgagtgacattttatttctacatcagataagtcagcttttgcttttagacagggagacagctgttctaccagctgctttaaaataaaaatgcagaactaacgcagcgaagggaaggaaagtgtggctgggaatgtccagtcagctggaggggcttggagctcggcgttggctgggagcatttttattgctgccgggaggaggaaggggaagcgggggaagcgggggaggcgggggggcagcgtgttgtaaaatcagtttgaagtaaacaaaaagttatgttttccgaggggccagcagcgcggagagcaggcctagcccgctgccgggaaggcgggtctgtccagtagagaccggaacgccgcgcaggctcagcaaagggctaaggctggagccggggaagctgcctctaggttagcgaagggtaaaggaagtcagacactgacgcgagtggcctcccgatcccgcagtcgagtggagaaccgagtcccgacctaaggtcgaatcatcaggcgtccccgtcacccaacaacccactcaggcacttccggtaagaaatctagtgcccttggctcggaacctgcgtcgtagtgcgcaagcgccccgggcctggagacggccgcggatgccgagggagggggcgtgtgagccgaagaggaaagcgtcctctgcgcctgcgctctctgcgctgcccggtggggcggggaaagaagccctgagccgggatctggcactcccaggactcccggccggggtagctcttcactcctcagcgcgacgtcgtgtcgagttcccaaaaagctccgcaggggctgtagggaggtaagagccccccgtgaccggtcgtctcggcctcccctcagccctgctgttcccacaggggggcggggtgaccgctggacccgccgacctgggcgctgggt

SEQ ID NO: 33978 - DNA, 2300 bp, Homo sapien
gcctgaggtaagctgcttttctccctgctgttgacctctgctctggaagataacaaagcgtaaatctttttatgtttccatgttaccaccattgtttatgaagaggttagtttaagtgcttatagttgttttgttttttcttatgctgtttcagtagcctagaagatgactgctggtgctgttagccaaggcaatctgctagaattcagaaattttagagcaagctcccatataattatctcccccacttaaaaagaaattaaacatccatgaagatttgaaacgttatttatgttgacaggtcagatttttgggtgaacattcagacatattttgactctaagggtccaggaggggagaagatatgatcattaaagaaattcagtagaatactgagatcaagctttggtttatcaaagaaaatactgtggaatgagcttatttagttatctgttcaaattctattttgatgtcttatagcatatagtttcatttatggtgctatttgtcattaattcatatgccacaggagagcataaataaaagttaataccagctttagggttgaaaataatagaagtgatcatttaaaataatggtatcaaataagaagagaaagacggttcatgggttgtgagacatatgccatgaaggattggaagaaaaagataatttgaatagagattgtagataatgagaaagctgtcctgagattatgtgagtttcaaggaagcacacgtgaatatcaataagtagatttgaggcaagttagaaattactttgaaatccagagtaaagtgtttggatttcacttggttaatggaagccattttatgagtgccatcattcagtggcacttgaggaagattgttttagcagtggcagcattgatagcagatcagtttggagaaatgctgaagggagagctatcagtgttccttattttttggatgaagaatcactcagcagtattcaggcactattctgcattctgaagttcaagcagagagcaaaatagaagctatattctcatgaaatttatgaatgtatgtagagatggatagtaaacaaaaagatatcagatggtgataataccctaaattaaaaaatttaaaaagtgtaagagtgatagatagttaacagattagtggcaaaaggaaattttttctttttgagatggagtctcactctgtcactcaagttggagtgtagtggtgtgatctcagctcactgcaacctccacctcccaggctcaagcagtcctcccacctcagcctccctagtagttgggaccacaggcacacactaccacgcccagctaattttttgtatttatggtagagatgcggtttcaccatgttgcccaggctggtctcaaagcaatcctgagcttaaacgatctgcctgctttggcctcccaaagtgttgggattacaagcatgagccaccgtgcctggtcttaggtggtattttttataatgtgatcagagtaaggctttatggtaatatgacatgtgagcagagtcttgaaggaagtgagataatgaagccgtgtgagtacgagaagaacattctaggccaagggaataataggagcaaagattctaagctggaggaatacttacttgaagaacaaggaggtctgggtagctgggccatagtgaatgagtgggattgtagtgagagatgaggtcaaacaggtaactgggaaagtggaggaggtaaggatgaattatgttgggtcttgtgagccattgtaacaacttaaattttcactttaggtagccattaaaggattttaaacagaggaataatgagatatgatttatgtctaaaagaatctctctaaactatgttggaaatagactctaggggtacaagggcaaaaacagagacagtcatgtaataagggttactctctgtagatatcaaacatacaccagatataatattgaaataacttattggtagcttatcaaagtggcatgctgccaactaaagagcctgtgctggctactcagacagtatctttgccaagtgctacttctttttcttgattagccatttctttctttctccttacaacttgaaaaatagaatatttattgtaatttactttgaagtaaattccaaaaacatctgagattttaacactattgttttcccctttatagctcaggcatttgaaaggatgatgagtccaactggttctaatcttaagtctaatcattctgatgaatgtactactgtccagcctcctcaggagaaccaaacatccagtataccttcaccagcaactt

SEQ ID NO: 33979 - DNA, 2300 bp, Homo sapien
tgtaacaaacctgcacttggacccctgaagttaaaaattttaaaaatgaaaaaaaaaaaaagccgggcacagtggctcacgcctgtaatcccagcactttgggaggctgaggcgggtggatcacttgaggtcagaagttcgagaccagcctggccaacatggtgaaatcctgtctctactaaaaatacaaaaattagccaggcgtggtggtgcgtgcttgtaatcccagctactcaggaggctgaggcaggagaatcgcttgaacccgggaggtggaggttgcagtgagccgagatcgtgccactgcactccagcctgggggaacagagtgagacttcatctaaaaaaaaagaaaaacaagttttttaaaaaagacctgtactgcaatcaatgccatcaagaaagtgaaaagacaatctgcacaacgggagaaaatattgcaaatatttgcaaattacctgttaagggacttgtattgagactatataaagaattctcacaattgaaatgagcacaggatttgagaagacatttctccaaaggaaatatataaatgaccgatagcacctgaaaatatgctcaatattattagtagggaactacaaatcaagataatgaggtagtacttcatatctactaggatggctataatttaaaaaacataacaacaagtactgactggtaaggatgtggggaaattggaatcttcatacattgctggtgggaatgaaagatggtacagctgatttgcaaaactggcagttcctcacacagttaaacagttactatatgaacaagtagttccactcctaggtatgtacacagatatgcacacaggaatgtattcatatacgtccacacaaaacttgtccatgaatgttcacagcagcagcattcataaaagacaaaatgtagaaacaacccgaatgtccttcagctgttgaatggacacacataaaatgtggtatttacaaactggaatttattccagcataagaaggaaggaagtactgatacatgctaaaacatgggtgaattttgaaaacatgctaagtgaaagaagccagttacaaagatcatacatacagtctgtgattctatttacatgaaattccagaataggcaaattcatgagacagaaagtagatgagttgttgcctgggggtaggaagggggtaaatggagagtgattgctttggagtgatgaaaaatattttatctgaaaggctgggcaagaataactcccctttgtattacgtgtcaggtgatgttagttatcctaactctaccactggcagattgagttttttggtcacagaagctgaaaatggcagagctttgttgttaattctgatcactagtttggcttcaaaaagtaatgagttaaggagggctagaaagacagtggatgggaggacccagttgctgagagcgttttctgagtgaacactggtagagagacagaaggggagagaaaacttcaagttatcagctcggtaactttgtacaaaaacttatttatttatttatttatttatttgacagtctagctctatcgcacagaccggagcgcagtggagcgatctcggctctctgcaacctccacctctccggttcaagccattcttgtgcctcagcctcccgagtagctgggattacaggcgcgcgccaccacgccaggataattttttaaattttcagtaaggacgggttttaaccatgttggccaggatggtctcgaattcctgacctcaagtgatccgcccacctcgacctcccaaagtgctgggagtacaggcctgagccaccgtgcccggccagaaacactgatttttatcagtaatgattccacacccttttaggatattactaacatttaaaagaaaatatacccaactgttgaaattcgtgctccactccagcaactgctttcaatcggagttccatcctccgccgcagtatgccctaacgcagcgttatcttcagagctaccaccagcttccgaaacctttcggaggagcgcttcgccaccacctgcacggcgaagcggcgcgtaaacgaacctcgaacgccagcctttgcgcctgcgtgccgcggctccgtttggttccgcttcgctggcgcccgccgggctcttcccccgccgaggcctgtggtttgtggagtcgaatttccctgccaccagtgcccggttagcaggggcgccagcctgggcgcctgcgcggacggcgggcgtcgtcaccatggcagcatccgctggaggcccaggtaagcgccgagcgcgcggcctctgcctggag

SEQ ID NO: 33980 - DNA, 2300 bp, Homo sapien
taagtatatatggtcaccaaaagacatctattttaatgttcatagcagcattatttgtaatgtcccaaacctgagaattacccaaatgtctatcagtagtaaaatgaataagcaattgaggcacaatcacaaaacggaatactatacagcaaaaagaataaacagactacagccacacacagtatgcatctcttaatcatactattagtgaaagaggccagtcaacagagtgattcaatcactataaagtacaaaaagaaacaaaactactctatgctgtttgaagccaccactccctccaatgagaaatctgaagagggagtgttgtgagggtactggtaatgttctgcttcttgatctggatgatgctcattttgtgcaaaatcatcggacttgtgaaatgtgtgtctttttttttgagatgaagtctggccctgtggcccaggctggagtgcagtggcactatctcggctcactgcagttgctgcctcctgggttcaagtgattctcctgcccaagcctccccagtagctgggattacaggcataaaccacaacacctggctaatttttgtatttttgtagagatggggtttcatcacgttggccaggctggtcttgaactcctgacctggaagtgattcaccctccttggcctcccaaagtgctgggattacaggcatgagccacagcactcagccaaaatatttgccttttaataggtacactgcacattgatgaaatttttttaagagaacagtcggaggtggtaagggggaggagccccgtgccttcatgcaaattggctcagtcttcctggtaacctccaaacaaacagctgtaggcaaagggcagcccagatataggattcaaactccctagagcctaactttggggtaaagcaccctgtgcaattgctttgcatatgtttactaaatgaggaccctttaggtcctcatttcggagagatcttttctttaataaaggaagcctgaccagagataaatctacttttcccgagaactcaaaactataaacaagttttgattgacattatctgaataacaaaaatagtgatggcctttctccaccagaccctccaagataaatgaagagttaaaaactttgcttctggccgggcgttgtggctcacacctgtaatcccggcactttgggaggccgaggtgggtggatcacttgaggtcaggagttcgagaccagcctgggcaacatggtgaaaccccatctctactaaaaatacaaaaattggccaggcgtgatggtgcacacctgtcatccctgctactccagaggctggctcatgagaatcggttgaacccaggaggcagaggttgcagtgagccgagatcacaccactgcactccagcctgggtgacagaatgagactccgtctcaaaaaaaccaaaaactaaaaacgacagaaaaagttgcttctgcttcatttccttttcatctctcagtagagtttaacatatgaaatgtatttttcgaaattttgttaatatgtttattcatgttttaataatagcataataaccttataaattcctaaagacgtaaataagaacggttgttcccactaacaccccaacctgaagtgtggctctggctttacctgaagtgggtacagggatgcggaggggtggaaggaccggtggggacagatggacccatgaaccagcgggtggatgtgagctgaggggagggatacggactggaggagccaaagcccgtgacgtaggggtgcgtgcttccctcaatggggagaccctgctgccgctgttgttggccaagtcgccgtggccgaagcgcggtggccgaagcgggggacgggggtgggacttacggggacagaaggcggagcttccagcagctgctggcccccctgggtccagaggagccttgccgccctcacctgcgcagagcctggagccgacgcgtcacccccagcggaagcgcctcgctgcccgggcgtctggcgaggtgtgcgctccgggtcccagctccagcgcttcgcggcagtcgcccgcctctttccgcaagcagggcggggactgggcggcatctaccgagatctgcgattcgaggcgccgaggagccgaagaccacagctcagctcagacggcgccctagggccgcacagagggtcgggcagtgccggagagaggtttgaaagcgccgccgccaactcgacagcgcgtcccaggtcagtgtgaggcgccgtccctgccggctgcacttgggaaactttggcttgcagtggcggctgccgggaggagg

SEQ ID NO: 33981 - DNA, 2300 bp, Homo sapien
aggagcagatgattagaaacggtcattaaagtaattcccccgggtaacaggaacagcacttcatgtggtttataggccttctttcttctgtttggccaggggctttattcccctttatccctgtgacggcgggggcctgtaataatatcttgggccaggtgcagtagctcatgcctgtaattccaacactttgggaggcagaggcaggcagatcacttgaggccaggagttgatcatttgagaccagcagttgatcatttgagaccagcctggccaacatggtgaaaccctgtctctactaaaaatacaaaaattggccaagcgtggtggctcaggcctgtaaccccagcactttgggaggccgaggtgggtggatcacttgaggtcaggagtttgagaccagcttggccaacatggcaaaaacctgtctctactaaaaatacaaaaattagctgggggtggtggtacacacctgtaatcccaactattggggaggctgagggtgaactgcttgaacccgggaggcagaggttgcagtgggccaagattgtgccactgcactgcagcctgggtgacacttgaggaccagcctgggcaacatggtgaaaccttgtctctactaaaaatacaaaaattagcccggcgtggtggtgggggcctgtaatcccagctaattgggggctgaggcaggagaatcgcttgaaccctggagtcggaggttgccgtgagccaagattgcgccactgcacgccagcctgggcgacagagggagactgtctcaaaaaaaaaacaaaaaacaaaaaaaattagctaggcttgatggcacacacctgtaatcccaactacagggaggctgaggcagaattgcttgaacctaggaggcagaggttgcagtgagtcgagactgccatcactacattccaggctgggcgacagagtgagactctcaaaaacaaaaagtattctccttatagagtctctaattctattcccattagtcatttaatcatgcacttcttttctttctccccgctggaacatttttaattacaaggttcaatctttcatagataactgtttgtctgaatcctttcaacggctggccagccaatcttttcctcacagtcatgttgcctaattaggccattaactttacagtttttagtttactacctgtgtaagaaaagcatcttgctaagggaaatctagtttgtttactcgttctcttggagttactgatattaaatagttttatatgtatttgcattacacatttaagaacgtcttgttcttaaaacagatcagcaacaaggaaatctttttgtgacagggttttggtctgtcacccaggctgctggagtgatgacacgattttggtttactgcagcctccacctcctgggctcaagtgatcctcctacctcagcctcccaagtagctgggcctacaggcacacaccaccatacgcagctaatttttttggtattttttgtagagacgtggttttgccatgttcccaggctaaggaaatctaatctttacaactttgccttctgaaatcttacatatactaacttataatttgctttcctgttttgcttcactgagatgttctagagacgggaattaaaacttgtttttttcttccttagagtgcaaaagcagtgccttacaaacttaagcaggcttcagattatctgagatgtttaaaaggcagattctgggacccatccctgattcaggaatagcaggtacaacattttcagaaacattgcctttaaggaagcgggtatgtcacacacaattttaatctcacagaaacataaaatgtgctaacctgaatatttaaaacatatgttttattatttacatgtttgccccaagttatcaccttacagtgctgttccataagccaatctggaaaaagtgagacttgattttgattgtttcctaacaaacaactgatctttgttttgtgtgactcttggctaattctatgttttcctttctctatttttaagctgaccatggagatatattgccatcaaagtttctttgaaattttgtgtggggtgtacaaagaacaacaggaggccagcacttattaacaagtgtaactctttattaagatggaattgttcttattaaagaaatagatgaaaatggttaagtacaattaaatggctccaaaagtcttacaatgaaaacaacagtcctgccagttgttctttccagaggcaaatacttttcattctcttagtttttccttccgttagttaccttcatgggtttttccaaatt

SEQ ID NO: 33982 - DNA, 2300 bp, Homo sapien
gtgtttttaatggacacataatttaattatatattttttcttacagatacccaggtgttctctctgatgtccaggaggagaaaggcattaagtacaaatttgaagtatatgagaagaatgattaatatgaaggtgttttctagtttaagttgttccccctccctctgaaaaaagtatgtatttttacattagaaaaggttttttgttgactttagatctataattatttctaagcaactagtttttattccccactactcttgtctctatcagataccatttatgagacattcttgctataactaagtgcttctccaagaccccaactgagtccccagcacctgctacagtgagctgccattccacacccatcacatgtggcactcttgccagtccttgacattgtcgggcttttcacatgttggtaatatttattaaagatgaagatccacatacccttcaactgagcagtttcactagtggaaataccaaaagcttcctacgtgtatatccagaggtttgtagataaatgttgccaccttgtttgtaacagtgaaaaattgaaaacaacctggaagtccagtgatgggaaaatgagtatgtttctgtcttagattggggaacccaaagcagattgcaagactgaaatttcagtgaaagcagtgtatttgctaggtcataccagaaatcatcaattgaggtacggagaaactgaactgagaaggtaagaaaagcaatttaaagtcagcgagcaggttctcattgataacaagctccatactgctgagatacagggaaatggaggggggaaagctggagtattgatcccgcccccctccttggttgtcagctccctgtcctgtgtgtgggcggaacatagtccagctgctctatagcaagtctcaggtgtttgcagtaagaagctgctggcatgcacgggaacagtgaatgccaaacacttaaagcaattcgatgtttaagtatgtaagttcttttttttttagacagcgtttcgctcttgttgcccaggctagcatgcaatggtgtgacctcggcttactgcaacctccgccttcccagattcaagcgattctcctgcctcaggctcccaagtagctaggaccaggtgcgcgccaccacgcccggctaatttttgtattttgtatttttagtagagatggggtttcaccatgttggtcaggctagtctcgaactcgtgaccgcaagcgattcacccacctcagcctcccaaagtgctgggattaccggcttgagccaccacacccggcacatcttcattctttttatgtagtaaaaagtataaggccacacatggtttatttgaagtattttataatttaaaaaaatacagaagcaggaaaaccaattataagttcaagtgagggatgatggttgcttgaaccaaagggttgcatgtagtaagaaattgtgatttaagatatattttaaagttataagtagcaggatattctgatggagtttgactttggttttgggcccagggagtttcagatgcctttgagaaatgaatgaagtagagagaaaataaaagaaaaaccagccaggcacagtggctcacacctgtaatcccagcgctttgggaggctaaggcaggcagatcacttgagaccagcttgggcaacatggcaaagccccatctctacaaaaaacacaaaaattagctgggcattgtggcgcacacctgtattcccatctagtcaggaagctgagatggaagaattaattgagcccacgagttcaaggctgcagtgagtcgtgattgtgccactgcactccagccggggtgacagaagagaccttgtctcgaaaaggaatctgaaaacaatggaaccatgccttcataattctagaaagttattttcaactgataaatctatattcacccaaataatcaagggtgaaggtaaaataatacatttttagacaagcaaagactcaggggttacctccatgtgccctttttagggaagctgttggagaaaatactccagcaaaatgaaggagtacacaaaccagagaatgacatgaatccagcaaataggatccaacacaggcaatattccagctatggagctagctttaaaaaggaacagtaaaaatattaatcggttagctgggtggaatggcccatgcctgtagtcccagctactcaggaggctcagcagcaggacgacttgagcccaagagttccagaccagcctggccaccttagtgagatcccttctcttaaaaataataacttattgccagatttgggg

SEQ ID NO: 33983 - DNA, 2300 bp, Homo sapien
ccctacccacagcgctccgtttgtcaggtgccttagagctcgagcccaagggataatgtttcgagtaacgctgtttctctaacttgtaggaatgaattcagatatttccagagaatgaccacaacctcttcagtagaaggtaatgtgggattaagtagggtcttgcttgatgaagtttaccagtgcaaatgttagttaaatggaaagttttccgtgttaatctgggaccttttctcttattatggatctgtatgatctgtatgcagttcccaaggttcatttaccattattaaaaaatttttgtcttagaaattttatgtatgtcaacgcacgagcaaattatcaggcatggggcagaattggcagctgggtggaggcttcggtggaggtgagcactccgaaaggaaaacagagtaggcctttggaacagctgctggaagagataaggcctgaacaagggcagtggagaagagagggtaaaaattttttaaggttacatgaccctggattttggagatctcgaatttaaaggtgatgcaccagggatgaacgctcagattttcagtttgaaagctggcgtgacatgtaaaggagtggagaataatgtaccattgtaatgatgaggcgcctctaggacatctaggataatttcaggcgtggggatctaggtgaattgaactgttggagggaagggaataaccaaggaaaagaatgtgggggttgagagatgccccgtttaaaacctaagagacctggatatttatggttgtaagaggaggcatggcagaggaaatggaaacagtaagaaaggagcagatgctgcatctctttaatgggacagatacaaggcatttgggtttgacacttaggtcactggtagagatgatgacaagagcccgtagctaaagaattgataaaagccagtctcaaaaatcccaatatagtctggtaatgttaatgtttctttggttcagatagctgactctcaaagttattttcctaagaaactgaaccaaaagtggacgctatatgtaaaaagtttttatagaagtgttataagagtaggatagagacataattaaacatgttttaaggtaattgagtggaacattaagcacctatttttaaaagtatgatttaatatcaatctacaaagtacacaaatataatacaattgtatcagacagttgtgacagcactgattagaggctgaacattattctaagtctttaattcccacaacaaccctagaagcaggaactattgttatctctattttatagataaagtaaaccacaaggggttaacacgttttgtcttgtgggtgacaaaatgcattcaacttgagcactttgactcagaatcttttttttttttttttttaagagggagtcttgctctgtcgcccaggctggagtgcagtggcgcgatctccgctcactgcaagctccgcctcccgggttcacaccattcttctgcctcagcctcctgagtagctgggactacagacgcctgccaccacacctggctaattttttgtatttttagtagagacggggtttcaccgtgttagccaggatggtctcgatctcctgacctcgtgatctgcccatcttggcctccccagaatctttactatgtcatacacaattgcaaatgattaaaactaaatattggatataaattggataatgccaaagggaaaaatagttagatttaggtaatgagtgataagtatgaattttggtaagacttttaagttcagttttttaaaggagatctctgccaaaccccaaaaacaaagagccctaacatcagcctaaccagatttcaaatttcatcttttggcggtatgcatttttaacagtcacccctcaactaacacatcatcctccctcaactcacattctactaaccccatcaatgcaactccctgcccaccttactcaacatatacaccgctgctagccccataccccgaaccaaccaaaccccaaagacaccccatacggtttatgtagcttacttcctcaaagcaatacactgaaaatgtttcgacaggctcataccaccccataaacaaataggtttggtcgtagcctattagctcttagtaagattacacatgcaagcatccctgccccggtgagtcaccctctaaatcaccacgatcaaaaggaacaagtatcaagcacgcagcaacgcagctcaaaacgcttagcctagccacacccccacgggagacagcagtgataaacctttagcaataaacgaaagtttaactaagctatactaaccct

SEQ ID NO: 33984 - DNA, 2300 bp, Homo sapien
atcctggctaacacggtgaaaccccgtctctactaaaaatacaaaaaattagccaggtgtggtggcaggcgtctgtagtcccagctactcaggaggctgaggcagaagaatggtgtgaacccgggaggcggagcttgcagtgagcggagatcgcgccactgcactccagcctgggcgacagagcaagactccctcttaaaaaaaaaaaaaaaaaagattctgagtcaaagtgctcaagttgaatgcattttgtcacccacaagacaaaacgtgttaaccccttgtggtttactttatctataaaatagagataacaatagttcctgcttctagggttgttgtgggaattaaagacttagaataatgttcagcctctaatcagtgctgtcacaactgtctgatacaattgtattatatttgtgtactttgtagattgatattaaatcatacttttaaaaataggtgcttaatgttccactcaattaccttaaaacatgtttaattatgtctctatcctactcttataacacttctataaaaactttttacatatagcgtccacttttggttcagtttcttaggaaaataactttgagagtcagctatctgaaccaaagaaacattaacattaccagactatattgggatttttgagactggcttttatcaattctttagctacgggctcttgtcatcatctctaccagtgacctaagtgtcaaacccaaatgccttgtatctgtcccattaaagagatgcagcatctgctcctttcttactgtttccatttcctctgccatgcctcctcttacaaccataaatatccaggtctcttaggttttaaacggggcatctctcaacccccacattcttttccttggttattcccttccctccaacagttcaattcacctagatccccacgcctgaaattatcctagatgtcctagaggcgcctcatcattacaatggtacattattctccactcctttacatgtcacgccagctttcaaactgaaaatctgagcgttcatccctggtgcatcacctttaaattcgagatctccaaaatccagggtcatgtaaccttaaaaaatttttaccctctcttctccactgcccttgttcaggccttatctcttccagcagctgttccaaaggcctactctgttttcctttcggagtgctcacctccaccgaagcctccacccagctgccaattctgccccatgcctgataatttgctcgtgcgttgacatacataaaatttctaagacaaaaattttttaataatggtaaatgaaccttgggaactgcatacagatcatacagatccataataagagaaaaggtcccagattaacacggaaaactttccatttaactaacatttgcactggtaaacttcatcaagcaagaccctacttaatcccacattaccttctactgaagaggttgtggtcattctctggaaatatctgaattcattcctacaagttagagaaacagcgttactcgaaacattatcccttgggctcgagctctaaggcacctgacaaacggagcgctgtgggtaggggtgaggtgttttctccagggctgggactttgccctgggcgagggcgccgcagggcaaagacctcaccgggcagcagaatccgggcagaaatcagcaactgggcctcccgcgcagcagaaaaggggaatccagtcgggcccacccttcctgccagcgcagaccgcaagtctggccccatcctctcgccgggagtcggccaccccgaccgtgggcagcctgcgcccgtttgggtcccatcgccccggcccggcagatacctgagcggtggccagggcaggtccccgttcttgccgatgcccatgttctgggacacagcgacgatgcagtttagcgaaccaaccatgacagcagcgggaggacctccgagcccgctcgttacagcagaacgcgcggtcaagtttggcgcgaaattgtggccgccccgcccccctcgtccccatttgtgcaggcgaggccccgcccccccgccccggcgcacgcagggtcgcggcgtgctcgcgcccgcagacgcctgggaactgcggccgcgggctcgcgctcctcgccaggccctgccgccgggctgccatccttgccctgccatgtctcgccggaagcctgcgtcgggcggcctcgctgcctccagctcagcccctgcgaggcaagcggttttgagccgattcttccagtctacgggaagcctgaaatccacctcctcctccacaggtgcagccgaccagg

SEQ ID NO: 33985 - DNA, 2300 bp, Homo sapien
aagcggggagagtagatctgcaggtcctgatactgaaaattgttcaaaattttctattaagtagaaaaagatagtagcaaattagtatagaatataatataatctgtaaaatatatttaaactaatttttgagcttatgactatgcacatatacacatgtacaaatttttaaaatctggaagtatatacagaacaccaatagcagtgggcctcactcaaagggagggattatggggtctatcactgcctaccttccacatttctgtactgtttgaaatttctgtagcaagaatgttttaattttataaccaggacaaaaatagctagaaggaataaaggagaaagttgggagaactacagctaaattgcagaattgtagctctaccatccccttaacctcctatacacatcaccatcacctatagggggccactctgctcaggaacaaaagggacctttctccacaaagaaaaaagacacaattctaatacgctcttctgccctctggagaattccagaataccagagccatgactgaggagaaaaaagaatcccccacaactcaccagagttgccagacattcccagatcacttcctccttccttttgttggactttctttactttctttttaacaggcccatcattttccaatggtctcttctttcttctgtcaatttctgtagcctatatcgggaaggttagaaaatgatgtgttatctctactctgagaaggcctgacgtatgtgaagcaatttaaaccttacaactgaatgacaaggttccttgccatccactcttcaaagaatcctctacttttagctctggaaaaccctatgggtgaactgtttttaacaccataaaagacaaggtagagtctgatagtcaggagcctcagcaactcaagccgtgtttagaattaattgaaaccaaggctgctaccggtcttgattcaatgagccttcagctttctctaattataaaacttgaatcaccctacttacatatgctaaataaaatacctctaagaaataaacagttatgtagcaaaggcacagaggggaaaagataggtaataaaagaacagtatcatttttgacatgttcactgcaatttaagtgtttcctgtttaaaaggtttatgttcatcactaaagatgtgacaagattatgaattttttcttggcagaaaacttgccaaaagcatacataagtccttcaccagctaccctttaaatggtgggtgcaaaattttggtgaattcatgaaaacgtagctcgtcctcaaaaaaaacagaagaggagtaatcattttaagggagaaatatatacgaaaggaacaagattttgaagcacccaagctgccacctacattaaaacacggtaggtggctaaacaccagtcttcaatgcccttccacagcctcaatctgaaaaatactgtgcaggtgacccaagtgaggggtcacccttgggcttttcctgtggcagtatctctggtttaaaaacaaacaaacgtacttattgcgttgaaggatggcaacaggaaggactccatgattagtcacatctataccatcctaagaaactttatccacccaaactgtatttcagactttataatctaaactacaaaaagagttcactggggaactgcacaatatgactgcttttaaccgtagtgatttcaaatattgagccatgctgttgcagtcttaaaaactggagacctaagggcagctttcttctagtcacccaatccagcacttttttaaaaaatcagtaaaactcttcgaccaccaaggaaaaaaaaaaaggatggaggttaaaagacgcaccccttgcccacaagccccctcatcagaatgggagtcaggagacctgagttcctgtctcaggcctgccattaaaaacctgcataacctttgcctatctcctcaaacggaagtactaaaacctcagcgcttcacccaatttgtagccccggctgggctcttcccaccttccccttcttcagcccgccccttcctcctccagccctatcatcgggcggagggtccccgcctccgcccgccttacccacaagccccgcccccccagccccgatggccctgcccagtcccagacagaacctactatgtgcggcggcagctggggcgggaaggcgggagctgggggcgctgggggcgctgcggccgctgcggccgctgcagccgctgcagcgccagggtccacctggtcggctgcacctgtggaggaggaggtggatttcaggcttcccgtagactggaagaatcggctca

SEQ ID NO: 33986 - DNA, 2300 bp, Homo sapien
ttttaaaaacgtaaagagaaatgaccactgttctcacgctgtaatttcaaaatggcaatttccctactatatacttgttaaaagtgaaaattttttaaaaaggtaaaaggaaaaaaaaaccccactcagctgctcagtgaggcagagttaaaatattctgcagaaacagcacttatgaaacaggcagaacccctggggctaccaattcatgaacacacaactggcagtacaagacaggtgtattgtcgtagactcatcacccagaaaagcattattatttacttttaacaataaacattttatgatggcactccgttttagtgataaatgactggggaaaataaaaaatgtgtatagcagaatcaaatataggccctccccgggggtttcactggctttctctcacagctgctggctacattatttcttttccacttacatttttacagcatggggttggggcgggggggtggctcttggttttctggttgtacctgtcagatttgttaatcaaatgaatccagtcctacaaacgatgagcctgtgacagctggcctttggggttggattctgccctgggcagcaaagtgtcccttatttgggtatttttttccaggttgaaaactcggcacttaaaatttagcatcttaccactgtgaaataacaggcattccgaaagaacttcggcatctgatgcctttccgggaacacttgggccactctccttaacctttaccggcagttttaaatactacaatgcaggtacaagcagaaaagccaaggatgcgggctatgcaaagccactctgtgactctacctactgccatgggaacgtacttatggatgtggcatgtgagtgtgtgtgtatgtgtgagtgggtttgtgaaagtgtgtggattcgtgcgaatacgtgtgtgagtgctttgtgtgtatttttggatgaatttgtgaatgtacatgtgtgttcatctgtgtgtgtgtttgattatctgcttatgagtctgtatgattgtgaacgtgtgagtatatgtgtgctgtttgtgtgactgtatgagtgtaatgtgtgtatgaatgtatgtttgaatgtgggtttgagtgaatgtgtgggttgtgtgtgaatgtgtgtgtaagtgagcatatcactgcgtgcatgtgtgtagctccttaagtgtgtatctgaatgtgggttttatttttgtgcgcgggaacgcacattgtgggtgtatttgtctatatgcatttgtgcgttgtgactgtgtgttgagtgtgagcgttgtgagaatgtgtatttgtgtgtcatgagtgtgtgcgcgtgtgtttttgtgcatatgtgcgcgcattgtgtttgtgtgcatttgtgagtgtatttttgtgcgtctgagtgtgtgcattgtggatctgggtgaatgtactggtctgcgtgtgtgtgggtgtgcgtgtgtgtgtgcgcgcgttgtgcgcgagtgtgcgagcgcgtgtgagcgggtgtgtggtgcggccgggcgcctccacctccctgatccgccccatcccggcgggcgcccgagcagaggcagcggcccgggccggggcgggcgagggagggacgcgagccggggcaagcgggctgcgccaccgccggcgccgcgccgactttgccctttaaatcggtctccaagccgattacagctgagctcccacgtgacgttttaccttctgtctcccggagcgcgttgcccgaggacagtccttccccggctgccgccccagcccgccgcgggggctcggctcccgcaactttgggcgaagcggcggccggctcgggcgccctcgcggggccgcgctccacgcgggcgttgggggcttggggggctccgggggctcggccgggagggtggtggttagggcggagagcgtgcctcggccccagcccgcgcccctgccaccgcgcgccgcggcctcccgaaagcgggcggggtgccctgcgcgcggcgtggggaaagggggcgcccttcgccggccgggacctgagcggtcgcgccctcgagggagccagctgggccatggccgcgaggcaggggtgagaccggcggccacccgtgagccctccgcacccgcaccatgcagaagagcgtgcgctacaacgaggggcacgccctgtacctggcctttctggcgcgcaaggagggcaccaagcgcggcttcctgagtaagaagacggccgaggcgagccgctggcacgagaagtggttcgccctctaccagaatgtgctcttctacttcgagggcgagcagagctgccgcccggcgggcatgtacct

SEQ ID NO: 33987 - DNA, 2300 bp, Homo sapien
caaacaatgctcataacttctttttcaaatgtagcatattatattctatatggaactctatatagtagaacaatatctcaatgactaactgtgtaattttctctcaagttatgcagacattttgattgagagggaagtattaatgcagaagtacattcatctagttcagatcgtagagacagaaaaaattgcagctaaccaactccgacatcaacttgaagatcaagacacagaaatcgaaaggcttaaatcagaggtatttcccagtcaatagattccttctcattgtttcacgtttaccgtcatttcctcatgattacttaaggcctattcagggcaacattttaatcccaggctgacttcctctgacatcaacacatacgtggctgggcctgacctagacatgaatctaatgtctatattaggattaagtaaatgtgctacaggaacatatcaggataatgtgcttttttttttttttttggtggggggtggttatttgttctcctgatacccttcattagctcagaaattcaagaattgattatagcatttaactgttttcagataccctacagtaatgataattatgagtctgccatagattcaattaaagtctaaaatgacaactaagggagaaccagcaatgaattcagaaatactttactcttttagatttgaaggagtccaaccttctcccctccacagttttgaaaagaacatttggattaaactataagacatttgctagggtgcatttttccctggagttggaattcctgcctccccctccctccctcagagtgtgaacttctcaggccttgcatccccagatagtgaggctgatgcccagtgtgagcagaaggcggttttagagtccacagccatggtgtgtgcctgagtcctccctccctcccaggcctcagtctagatagagaatcctgaatgtacctttcccgctgtcctatccttcctcatgggcagtaagcaatcactgaagaatgggagaggaatgcagagaatgaaatttcctccctctttctgcccagggatgcattagtatcttctgagattcaaagaagggaataggacacaatgaaacctactagtaattgtatcctcattgacagaaacagtttaggcttgtcagttttggcaatgttcttgtcatttttattgtcatcagacaacattttcctttttgtgtcttgcaccttcctctgagacataccctgtgaatcctaggtggggttttcgccttctgctccctacacacatcacctccggtgttgagagtatgggtacaagcgtcctccaacagagatgtggcagcttctctgatgatgacaacttgcagatggtgttcaccatattattacagttgttaacttcccaattcgaccctgatatgtgatatagtgaaaacagcaacagaaaacttaacaaacctgcattttaaaagactatatcaggcactgttatttaaaacaaaattattgtgttctttcttagccactgtaagctggagcagatgcttgtctgctcagtgaaagaggttggtatttactccacgagagaagctcaacaccaggcgatgttcctcaatatttgtgtgtgtttatctgccttcactatgttctattttagtctgaatgtagattgcagcaaaaaactgtcagttgcaggtatgtcttctctggtctcttgacaggagccataatttatttcctactccctttcttttcccacctccttgccagaaaatggcagaggggtgtatttggtactggggacaaaatagaaagacaggctagagaggggcaattatgatcccttaacttttaaggtattgctggctagtaggtctgtataggttcttaagcttgtaagagcctgctgttgagtgccggtctagagaattttactgctatgtgtagttgagaggccacccagtcttgaaatgcccctcacaggtcacagaactgagctggagatataaagagatcccaggttagtttgatcctttttaccttttctgaggaattctcttggttggcttggaccagccccaaggctctgaagttcccgttacagttgccattttcctaaggatgtctgtgagtctggggtgccatgtggtttggaagactacaggccaatggccagaaccaggggctctgagctgagtgtcactgcatgtggggaccacaggacattgcaggcagccaccttcaggcgaggggatggacatatcactggactcctgacaaggtcttggcgggctcaccactggcagctgg

SEQ ID NO: 33988 - DNA, 2300 bp, Homo sapien
aagcattttgggggacagccacaaacaatgtggttgtcagtcaagagttgtttcctgaattatttcggagggtacattgattttgagcaagcacacttatgtccagtgggtccattctttctctcccagagtgagggtgcaaactctgtggggccaaaagccagggacaaaaggcctcatttttcacctttctcttgctcattcctgtagtagatgtaaagttttggcataataatttagatgtgcagaaatacaattttcattttctttcattaatctcagcttgcctatgcctgtcattttcactcagataatttcaagattcaaactaaatcatgattcttcccctgccctttctcctggccttctccctgggtgttgggtgccttggagggcatctctgggcttttgggcacctgtctgctcctctggcctcctgtggtcattctttgctgatgattcattgggtacaggctgctgtgaattgcctgtacctggtgtcacctggcctgcttgccctgcctgggaacaatgcatggtgattgcacccagggagcctggctgacctcgtctcaggggcgagggggaaagggcctcaaagggcctcaggggaagtttccaggctctcacgtcccattggtgccagagaatagaagggtctacatcaggccctctctgcctaaccctcccctgccttgctgtgaacacccagagttggtgaggggaatctacagagtgccacctccagggtcccagaccggaagatctaggtatgttctgctgacatggcctaaaaactgtctcattttatcaccctactctgaggatttaagcccctctcagagacactcattatttcttttccatcttcattttgccctccaagcttttccctttagcataggagaacaatttaatttctccatgtggcaggaaaccaagcctaagtcctatcttttatcttacctttctcagagtaaaaatgcagtgctctgagaatcccaaatttggccccttagaactcaaaagtcctcttttctgtcaacaatggacctggtaaataaaagccacagtttttaaaaatactggttaaaaacaaaaaaacaaaaaaacaaacttttgttttgagatgattatagcttcacatgcagttgtaagaaataacgcggggattccctgcaccttacacccagtttcccccaacagcagcatcttgcactactacagacagtatcacaactaggaaatgaacattggtgcaatccaccagtcttatccagatttcaccagctttctagggatcaccagctatcaccaagggatccctaaatcttaaagtttccaggcccactccgtagttaagtgatattcttgtctttgataggatgctggtttaggaataaccgaactgatcatgaaatagagatgatgagactaatattgaaatgattgtttcaaaatttgaatataccatctgtagaggctctaaataaaatattagcatttcagtcacattataggtcactcacagtggccttagcatgggctagtggactgtcccccagagaggctgtctctagagccaagcgccttactccagtcatggtaggtagggcctggttgcagatataccctgcttcagacacctttgatgacaacatccgctgtacagctgtcccttctctgcatctgagatcagccggggagttgttcagcaggcctgataatctgcactctggaacccacagactggtctgttgctgtaggacaggttgtacttttgaaacttttttgagcaaggttagccctggaccaagcatgccatctctaagagccctcagacaccagaactgggaagacagccctttgcctctcaggaagctgtgcagctcctctccaggtgagacaaagtagtttgaggaccctcaacctgggcattccaagttcttctccaggcaggacctggatcctccatgcccagccacgctgcctggatgtgggtattcccaggaatgggttatcctccccaagggccaccctaccactctcctatgttcatggaagaaaccccagaccaatgtcaacaacaatgttatttctcagtaattatcagttatacttctctaacaaatggatgaagaagatcacaaaagaaaagatctgtagtagaggacattgcttagtcaataccaaggtaaccaaacatgtgctttagtcatttggagattaacactctaaagggttcatcgcaaaagctgtctgacatgagacctctcctttaagattctatattcggcctg

SEQ ID NO: 33989 - DNA, 2300 bp, Homo sapien
gccgccagggtagagtcctggcctaatagtcaccaggctccacctaggaggggcttctgaaataagactcctgtctacccctaaaataactgcagtggttatatggattactatatatgaaaatactttaacttctatgaagttgtggcaacatttagagctgatggaattaagttacagttgctggacacaagaatagactaaggaaaggggtccctcctgcccaattctgaaatgagcaatccaggctggtgcgacagaggaacccaggttcctttcatcctattacttgctcatcccacaaggcgtcatccttgccttcgaggtcaaatctggggcctgctctagccacactcctgctggactcaggaacagaaaagagaataagtccaggacattttcctttaaagcaaatgatatggcagtcgcacacttcaattctgttcctgcccttatggcagaagccagccacagggcagcctggtgtggctagagccccagagcttcaaaaggagttggtaacgatgagaagggaatagatgccatgtgacagggatggcatttgaaagatttccagaaagccagaatttctactgtgagtcccttgtagagatttcatccccatcacaccacctttataataagcttgaagaggaccagtcccccaaaagaagggtggtaccctcttttctcaacaatgacccaatttttcttctgaccttactaacataaacatttactctataaaatataaggtgttgaggtcgggtgagtggagggggccctaaatgttgattaggcaattggggaggaaaaggaggtttttgctataactgccattctttaaatctacaattccatgctctttaaaagccttataattttctggatctgggagctgggctatttcagggtcaatggatttatttcagttggtgcctgaactgacttgaaacaagtgtgtgtggaaaagagctattttgagaaggaataaaccgagactgccctgatgatagaatatgcaagctggtgggtcttgactccttaaaggattatgaaattaatttgattggtcccaatctttatataaccaccccaatcaggaaacttcccatcccgccaaaaggccccctcacgtgctctccctgtcagtaccccatgcaaaggtaaaatagatgatatttttaaacatgggtcgtgtttaaaagaaatggaaactccttcagagaatgaaggagaaccacactgggtagaaggttattcctggggctccaccccttgctccatcaagtcctctgagcatgagctgggctctgagaaggaagagacaggaaccaattggtcatgtccacgtggcctcagaagctgagtacgtgacggtcaccagatgcctaggcaggctcccttgaaatggcagggctgctgtccaaaatcctgctgggtcattgctatttacaggcagccttcccggcgtgcggtggatatcccaagcggggctatttttaagcagggctatggcctgccgtgggttaagctggtgtggacagaaagcgagatgatctagccatctactgcagggggcctgatcttgaacagaaacctgactgtaattgtccctggatccaggtcccagacaaagacgctggaaggaggtccctccagcccctggctcagggcccggtcagctgctggagccaggcagcttgagacatcctcctctccgaccttggcttgaggggttcatcctccagagctcaccagggccccaaggctggtacacctgagagaagagagaaacaaatcccccaacagatgtgcaatttcacctgctggcccttccattctgagatccagagccctggcaaaggagcctccaggaccaggcctgggaagcaagactggctccgccttttacgtttcagagaaagggcaggtgctataaagggcccagcgcccacgggcctgccttcaagggtacagctgtgggggccggtgcgcccggaggtctacgctgggattggtgaggtcctctggccccgccccgccagggaggatttccaggccggcccgaccagctcgccctgcatacacttcttggctgtgtgcgctcagcaggacgtgggaggctccggcttcaaggtcggtgagtccgtgaaactctgctttattcctccaaagaggggtcatggctagagccagtgtgaagggccttggaggagtggatgccgggctgtagacggggaccccgttaggacgctgactgcgaggaggcaatggtgactcgctaaagccagcagagc

SEQ ID NO: 33990 - DNA, 2300 bp, Homo sapien
taaagttagctattagtagcaatagtttcctccgaattccaaaggacttattctacgccctatttgctcaactactaatctttattggacataccgctacaaaaagaaatcggtatgttcctttgcttccaagaatgaacgacctacagtttaaaatgcaatataccactaaaaagaaaagttttagttaaatgcgccctctagtggtatgttatgtgtaagtaccttgcatctaccaaagataaaacctcttcatgaaatgtcactaccctgaaaccagctggttgagatcattacagtatgggcagcactaccacacatcttttaggaagttccctatcttcaagagctggaagttgctgttgtttgtttgttgtcttttaaaactttctccaccatatgaactacggtatttgtgatatgtaccataccaaatctcaacattcctacaagcactgactttaaaatcccttctcttaaagaaaactgggccactttctagtttgctttaaacaaacatcgcaaagtacttattcttcatttacttaacaaatacgagggccaggcgcggtggctcacgcctgtaatcccagcactttggagggaagaggtgggcggatcgcctaactcaggagtttgagaccaacctggccaacatggcgatatcccatcactactaaaaatacaaaatctagccgggcgcggtggcgggcgcctgtaatctcagctacttgggcggctgaggcagaagaatcgcttgaacccgggacgcagaggttgcagtgagccgagatcgcgccattgcactccagcctgggcgacaagagccaaactccttctcaaaaaacaaaacaaaacaaaacaaaaaaacaaatacgcagtgagcaccaaggatgtaccaggcaatgaggatacaataaacttacacaattattgtgtaattacaaatgtgaaccgtgtcataagaaagtatagactgccgtgagcacacagtaggggattggtctagtatgggggtagggggctggaaggctttcttgagaataaaatacttaaagccttgaagggtgagtagaaagtaactggaagaagaaaaggagtaccatacaaagagactagcaaatgtaaaggcctggagatggcaaggtacacacggcatttgagaaattgaaaaaatgatcctatgcacggagctcaaaggagagactgagcaaggtgaggctagggaagtaggcagggacttcataaggagttcgaatttcatcctaaaacaatgggaagcgaagggagagtttaaagcagtacagcagtactgctttaaatgtaatgatttacattttcaaaagttccgttcctacgacacggaaaatggatttcagggagttggggcagaatgaatccccagaccagttgtagaactacaggtacaatatgggacaagggaggaggtgccaacagagataaaaagaagtggacaaatattcaaaaggttaaatggattgagcaaactgttgagagtagtggtcctggtaaattgcattttttcactaggcacagctggtggtggtatccatttgcaagaagctacagaaaatgagccgtttggaaatccagggttttcctcttaaaaagagaacttgtttggctacaaagtgttaacattttaattgaatgctcaacgagcactgaaggggggacatgaggcactgcctctcacccaagagagcccccaaatgtccttttcagacttttatcacagtgacccactcccaccgcgcctttaccttgcctctgcctggaatgtccttaactccctcttgccggcaatttcaccagatttttgatttcttatccagtctcacgggaagcctttccggcatctcccaccctaccgatcttcccgtctatctcgcctgctacactgtgagttcagacagcacggattgaactcttcatcttttcgtgtcggcgtcctgcacagggccatcccatcactaagcgcgccacaaactcagcccagtattgacgcccacgagtcgcttgtaaagaccgtctgtgacgccggaagtgacgcgctctcgggcactatgtgcttccggtctccaataccgcaggagggcggtcttccccggctcgccaactcggctgctctgggggattcgtgcgcggtaagaagctgcgcggtagcgcggtgaggtgaggttctcagccaccaaagctgcagggtctcgtcgttcgttccctctggcctggcggaacttgcgtgggaagctgggaggacagaaggcttagccgctggg

SEQ ID NO: 33991 - DNA, 2300 bp, Homo sapien
atgcttacaatgatgtactgtacataatactagacaattataagtattccagaaaaaagcagttattataggagatgacagctccattcatgttactgcccctgaaaaccttccagtaggacaagatgtggaggaagaaaagagtgatattgatgctcctgacccggtgtaggcacaatgtgtgtgtcttagtttataacaacaaaaaaaatttttacaggaaaaagctatagaataatgtaagggaataaagaaaatatttttatatagctatacaacacattagcattttaagctaagtgttattacaaaagagtgggccgggtatggtggctcacgcctgtaatcccagcactttgggaggccaaggccaggtggatcacaaggtcaggatatcgagaccatcctggccaacatggtcaaaccccatctctactaaaaatacaaaaattagctgggcgtggtggcgcactcttgtagtcccagctacaggcgcgcaccacctgggaagctgaggcaggagaatcgcttgaactcaagaggtggacgttgcagtgagctgagattgcgccactgcactccagcctgggtgacaagagcaaaactctgtctcaaaaatgagagacagagagaataaactccgtctcaaaaaaaaaaaaaaaaggtcaaggagttaaaattaatttaaaagtttataaagttaaaaaagcacagtaagctaaggttattaccttatttttaataaacttagactaagcataccgcatttataaagtctacagtagtgtacagtaataccctaaataatatcgtaggccttcacactcacataccactcactgactcacttaatagctaccgacagccctgcaagctccatgcgtaagtgccctattcagctgtaccatgttttcttttacactatatttttacagtatcttttctgtgtttagatacacaccatccttttacaactgcctacagtatttagtagttatactgtacaggtctgtagactaggagtaacaggctatcccatacggcccagctgtgtaggtttgtgcaagtacactatgatgttcacacaaccacgaaacggcccaaccatttctcataactataccagttcttaaggggagcatggctgtattaagccaccaccttttttgttgttgttgtggtcgttgttgagacggagtctcactctgtagcccaacctggagtgcagtgggcgatcttggctcactgcaacctctgccgccagggctcaagcgattctcgggcctcagcctcccgaatagctgggattacaggcgcgtgccaccacgcccagctaattttttgtattttagtagagaaggggtttcaccatgttgcccagggtggtctcgaactcctgagctcaggagatctgcccgcctcgacctcccaaagtgctgggattacaggcgtgagccaccgcgcccggcctaaattatcaccttttaagaccagcatccctggcaaccccccaagtctcagctcctagtaacagaaagaccccttccacagaagctgaagggtggacccaatgaattggtgtgagaaactccatgccactttaccagcgcactcttcgctgaagtttatgcgactgtcatagtggggaccgaagctgttcaaaaggaagtagattatccttcccctacgtacgtgggaagggggaggctctgggttatcaagagggtgaagtgggagagccaagcggcccacccacaggcggattccagggcggctggacgcacagcccccagcagccggagcccaacagctgaggtcgccgcccctagacagcccgcgctccagccagctcagggacccagcggctaagccttctgtcctcccagcttcccacgcaagttccgccaggccagagggaacgaacgacgagaccctgcagctttggtggctgagaacctcacctcaccgcgctaccgcgcagcttcttaccgcgcacgaatcccccagagcagccgagttggcgagccggggaagaccgccctcctgcggtattggagaccggaagcacatagtgcccgagagcgcgtcacttccggcgtcacagacggtctttacaagcgactcgtgggcgtcaatactgggctgagtttgtggcgcgcttagtgatgggatggccctgtgcaggacgccgacacgaaaagatgaagagttcaatccgtgctgtctgaactcacagtgtagcaggcgagatagacgggaagatcggtagggtgggagatgccggaaaggcttcccgtgag
